United States Patent Application Publication US 2015/0354009 A1 - sequence listing, part 20

SEQ ID NO: 571 - DNA, 248733 bp, Homo sapiens
aagagctcgcccagctctgcgggcgccgccaccttcgccgccaccgctgcctttctcctcctcctgtcggcgtgcgggggccgcgcccggcggcagctctgccctaggtgggcggcggcgcggcccaggctgcagctgagcgctctgcgcggcgcagccgggtctcccgcgtgtaccacgccgtgacaggtgcagagtccgggctgaggacccacctgcagccgccgccgcgatgcccaccatgcggaggaccgtgtcggagatccgctcgcgcgccgaaggtaaggggccgccgaggctcggggctagcccggggtcgggaagcgagtgtgtgtgtgagcgtgtgtgtttatcctggaagagaccgcatcctacctcttccccggcggcagtccgactgtcgcgcccggcccctaggggacccttccccccgcgctgcccccagtgtactcgcagaccctttccaggctccagtaccctcgaatgggtgttctccgcgggagccccgaggcgtgctttgcaccgcagtgtgaccattaggtcccagtcactgagctcactcgccctgcccacctccctccccaccagttcgatttccactcagcagatccccagcccgccgcccctgcctccggcgcccaccgttttgcaaccccctatctgagctcccagcgaagcgagtttgcttttccccggctgcaggatcctttgatccgtagtcccttggctctcgaagcgcggggagccttcatcggggtcgggtgccgagtgggttccctgcattacagcttctgcaattctgcctcctgcagcggagtcccaccggctcgcgtctgaggtttcgtttttgtgtttcccttttgcccgaaaccctcacttcggccagctgagctgacttttcagccaggtggaagctgttttctttgctccacctggggccagctcttgaatggccatggttgtcaacactgagcaacagatgctccggggtagaagcaagtaagctttccgagggcccagactcttcatcgtctccgaggagccctcaacatcctgcctgccatgtggcaggcactctgtaaatattatttgattttgctcgcgtcaaagccaagactgtaaatatcccaaggtttgtttgtcctctcccataaacctgtacttgaatcctgcagagggtggaataacatgtttttcagaaatctatcttgccatcatcgctgattcccactcttcctccccacctccatcttttaatgtgagacaggtggtgaagtggttttagaaaaatatataagttaggagaattggatttcagggatggagacaggccattttttctccttaggggctccctgtaaaaatagggtccctgaaattttctgattgcagtatttaggaaatattaaatgaaactgctgtggggagaagacgaagcaagattcaaaactggcctgtgtactacataggaattcggtacatgctgtcatttgtaatacccaaaaaatacttatatagggcattatagttttacatacacagttgaatacattatacttttaaaatgcacactgtaaaaattcattttttttacacttctgagtgaaattagtcatagagatagtgaaagtagaatggtaatagttggtggtgttcttttaaataatagcaattgatgggtcctatattgtgggaaataaggggaagagaaaaagtctgagagcactgcaaaacctgtggcatgtgaggggattacagggctgcagtattgttcttgattggcttgtgtattttccaaagtacttttacaaagattactttatggaaacttacaacactcctggaggttggtgaaggtggagtgccatctgatagttgaggaaactgtggcccatatggtttagtaatttgcccaaggtcaagtaactagttcagtgacacatttggattaagagctctgggaaaacaaggactgctgcttgtttaatctttgtattccctgtgcgtccagcacagtgtcagggccatagtggtgcttggtgagtgaatgaccctttcccctgagattagttgattccagtttattatagcttcagcatgtgcttgggactgtggtgaagacaaataatgactctgtggggctggcgttgtggctcattgcctgctctgcccacacttttctttcctaggaaatatttctttcctaaaaaatatagtcctacctttcctaaggaatattctcctttgagagaggccctgctgcctagagggccttgttctgaactgcagcctttttggcctcagctgattggactatggttggctcctgacccagggtcaaccaattcttatgtgactcagacacttgtaaccttgtggtttggctcaaaaagagtctctgtgttaatcatatctctcttgaaaacattaaagttagagatttagagtaaaagcagaagggagcagaggtgaataggctggtatgggagagaatgggtggccataataagtcatgggaatgctgctgatagaagaaagcagaaactatgagtgagtagagagatagcaaagaaaatggaatggatgggcagacacagatcctgagagagggtggcgagaccttggagcctgccctcccgaattttatagccctagttcccaagtagcattaaaataagctcttttcccccccttgaaatgacttgaatgggtttctgttcccttcatccagattggccagatgtatgactgtcatgcctgtaagttgtttacaaccaaactggggagaaaggacttaaagagggaataaatagtctaagaggggatgttgttaattaaatattgtgcatgctgtgggggacgcaggacctgtggaagattaggaatttagtacatacttattactgaacataaggcctgctgagtgaacatttcattgaggtgtgatttgagatgagccctcacacagtgcttctcaaactcgaaggttcataggaatcacctgaggatcttgttaaacgcagagtctgattcaggaggtctggagtggggccagagttactacatttctgacaagaatgtaatgctgaaggatgctggcctgcagatcacagtctgagcagcaggatcctaaaggatactgacatctatttctgtagttaggagagtgttgaagacagtcataacaagaacaaatggggaaagtgaacatggcttatttcagagttcttaaggaaattggccgggagcagagggaaacttggaaggagcaggctaaaagtttggataggtagattactgccagattacaaagcattttaaatgccaaggtgagtcatttggacacaggaccgaatatttgaacaggttcttagagttcattgaatctaatttcttatttaagcctaactccaatatataatatctaacagggccagttgggggccacatcgttataagggagggacatcctaaaagtagtaacttagttaagtctggaagtgtgttggctggtttggaggaaaaggtatggtagatagactcttttgcaaaacagtcttaaaatgacaaaagtcagaattagtattagagtggaacagtgagaatgggaagggaggaatcagatttctgactgaatcattaactcattcagcagatgtctactgaacttcaactactgttacaggcacttgggatacatcagttaacagaagaggaaaagcatggccctggaggtgcttactttctagtgaggcaggagacaaaacacacacaaaatatgctaattatagaatttgttgtgtggcaaatggggaaaatgaagagaaagcaaaatgtttaaggtgggtggatggattgcaattttaagtaggttagttagactagccctcattgaaaagttggcatgaaggagataagggagttggcctggtggggatctgggggaagggtgttccagccagagcaaatgccccaaggcaggagagaatcgggaattaggaacggtgaggggaagaatagtaggaaatgaggtcacaaaggtcattgtgttagtccgctcttaggctgctaataaaaacatacccaagactgggtaatttataaagacaaagaggtttaatggactcagtttcacatcgggaattaggaacggtgaggggaagaatagtaggaaatgaggtcacaaaggtcattgtgttagtccgctcttaggctgctaataaaaacatacccaagactgggtaatttataaagaaaaagaggtttaatggactcagtttcacatggctggggaggcctcacagtcatggcggaaagtgaaggaggagcaaaggcaaaagagcgtgtgcaggggaactgctctttataaaactatcagatctcgtgagacttattcactgtcatgagaacagcacgggaaagacctgcccccatgattcagttacctcccaccaggtctcttccacaacacttggggattatgggagcaacaatttaagatgagatttgggtggggacacagccaaatcatagcaatcatattataggactttgctatttagtgaatatttagtaaacatagggcaggagagagaaggacttttttgaaaaaagcaagtctcaacaataatttagaattctaatattaataagttaccatggatcttattggtaatagcatattgatattttattagtaataacattggtagtaggttcataaattatcagggatcttattgggctggcttgtgaagatttagttgagtaaatctgtggtgggcttggggattcgcattcttaatgagcctcccaagataccctggtgctggtgaaacacattttgaggaaatttccattacagtcttgagcttgactggttgagaaaatctattaaacaacaaggaaattgggaaggaggactaataaaataagagatgatactaattcaaattttgaggtaacggggacatccaaatggacatgttttaaaggtagttggaaatttttaggtgagatgtgggaaacctcaaacttgggaatcttgagagacaatagttgaaaccctgatagtggaaaaatttgccataaggcaagagtagataaagcagaagactaagaattttaggtctctttatttagctgccccagataaatcaaatgggtgtttgaacttagcatttgaaatctggaaacagactgaaataatggtagcttacacaaaatagtttttctcactcctgtaaaactagtgtggaggtagacagggttggctgtgcctgctacacaaagtcataagggatgttggctccttgtgcctttctgcttcactgtcctgagagtttgtcttccataaagtcacagcatggttgctggggtgccagccatcatgtacaatagttttagccaggagaaaatggaagggtgaaaggcaaacaggtttttcagaaagcaccacacaaaaactaatgcttattttgcattggtttccacttgcagggcaagctgggaaatggaaatttccagctggacacattacccagtgttgtgttacaaacggaaaagggtgtatggttattgagcagtgcattagtccattttcacactgctgataaagacatacccgagactactcagcttggaattcattgtatcattatcagcattttgggtcaaagccattcaacaagtctctagggagttccatactttcccacattttcctgctttctgggccctccaaacttttttcaacctctgcctgttacccagttccaaagtcatttccacattttcagtatcttttcagcagcaccccactcttctggtaccaatgtactgtattagtctgttttcatgctcctgatgaagacgtaccgagactgggcaatttacaaaagaaagaggtttaatggacttacatggctggggaggtctcacaatcatggcagaaggcaaggaggagcaagtcagatcttacatggatggcagcaggcagagagagcttgtgcaggggaacttccatttataaaactatcagatcttgtgagacttattcactatcacaagaacagcatgggaaagacctgtccccatgattcagtttcctcctactgggttcctctacgacatgtgagaattgtgggatttacaattcaagatgagatttgggtggggacacagccaaactatatcaggcagacaacagaatcagtcacagtgaagttctcagattgccaaaggctcttgcttggataacatagaaactgctctggagctcatactttacatataataaggattaaattgttcagaactaaagaaatgcacacacacaaaaacttcacatacctatccagtggtttgtgttttcttctgttgaatactataatgctaaaatataatgacatttatttgattatgtaaaatatgtgctaaacgatgtatccagaagttgttttaggaattgtttttctaaatggcaactctaaaatgtttgtaactatgtagaatagtatgttttatttacataaaaggtaacaaaaggaataaaaagtaatttaagctgtccttaaaggaaaaattttaggacgctattccaggtaaaagatgactaaggtttttgttcctttaaaaaccacttattatgcaccagctgtgtgccagctaaatgggtggtgggacaaaaggctgtggtcgatgaaggaggtcccaaaggaaacatggagatgagtatggagatgagttcagttttacctgaagtggcactgtgtgagaaggtgtgtatgagtatagcgatacagcatgtcatcaatatttgaaaatctcaaagtaggtgtcattttacttagtgtaattctggagatataagtgtattagatctgattattttaggttttctatcttcagtgcagaattcatggtttgttttttctgtcatttcaaaaacagaattgaagcatatacctaatgttacagctgtgggaatgtttgcaaaggtcagaggacacttttgaagttaacgaaatgtttgctgcgtgggtctctattcacatggtttcattggaatgtcaatgacatgaaggccaccactttccccttcattctttacttcttagcgaaaggagcccaaaccttccaatgattgtattctccgggtagtaagctccctaagggcagggggttttgtctggtttgtccactgatatattgctccccatgaggacattgcctggcacatagtaggcattggttaaatgaatgaatctatgtcctaaagatgaaaatgccttataatccaatttgtaaaatactcagagctaaatctagatgtactaaatctagtaccctcctactgaaaccttagcaccccaaaggagcgtttttgtgagatttgttcgctgctgtaccctctacacctagagttttgtctgccacatagccaccactctatatttgttgaatgaatggataactctgagctttgtttttaatggaagagcttaactatgagtcttgatagaagtactgcctgcttactgggaaaaactcatgcttcagaaagtcttgcaggagagagtaaaattcatcacaaactatgccatccaaatataatcacattgtgattataaacttttatatacttcatataaatttatatatttacaatgttagaattttagtatatgtccttcccaactattttccagaaaagatatatttgttaggaagaatgaggtaatctgcattatttttaataattttatggatatctgtgccaatatagatttgtgtaaattttgtctactgtcactagttatatccttagtgcctggaatagtgcttgacacttggtagcagctcagtaaatttttgttgaatgaacagatcaattttattaattttatgacagcttagcatttttatgttagtacagaataacttactaaagaaccctgtgggtggacatttaggtcatttcagttttttaaactcttgaataagcatctttgtatctttttgtacacctttctgatggttttgttcaaagtccctagaaatgggatttctgggtcaaaagtatatatctttttatgacttttgatacatatttgaaaattgctagaaagattatactggtttacactcccactgaaagtgaatgagagtgcctgtttatcccttttgcagcactgtatagcatttttcttcctccttatggatatagaatgtaaaaagtaagtctttaagtttacattgctttattaggtttaacatattttggtaaatgtagtgattatttttttctgaattgtttatcaagttttgtattgaagtttaagaacttatatgttaacgataataccttttttccttattcatagtttatcttaactttgtagtgctttaacatgtatgtaaattaatttttatgaagtataatctttcctttttttaaatttctgctttaatgtcatatttttcaagataatttttcaattatatttttcttttagtacttttgggtttcattttaaacagttatattagtaattcctgtgtgatttactttgtggtgaaatgtgaggcctggatctaagtttttcctcaaattatttacctgacataataaccatatatttaataatcctttcttcccacactgatttgaggtgcttccgtatgtatatatttgagtttttttctggagtcagtctctctttcccttccccccaccccacccgccgccacctctctttattttggtcccttttagcccctggtatcaaattcctttattgcaacataacaaaaaatattctcttagctgtcccatttgctttgctcttttctctaggtttttctgggttttctttcccccacagttgtatttttctactagaatttatgagtacatcattgaatcaagttaaaaaacatgttggaatatttattggaattgcattgtttataaatttatattaagagaattggcatctttcttatattgagtcatgtatgcttagtttccctcttcaattattgctactttgatattggtatcagtctgaattcatttcagtttttcagttaatttttgtctctgtaggttttaaaattatattgtatgtcttaaagcaaagtatttttaaatgaggttttaaattaataagatttgaccaggtatctgttggttttactactttttgagcaagaatggttcatttctatctgctgatgtattgtggactctgcttccaacttaccacttttattatttcatgtagtggccctgacatgatagctgagatattactcttttttctcctttttgctaggaataaggtcaaatttagaccaactagatttagctaatggttccatggaatctacttacaaatcagcatttatatctcagatcagcactaaaagaaataaaacgtgagccacaatcaagcagctacatttaaaatgtaaaaagagatgttaaatgaattttaatactatatatttaatattaaataatacaagtaatagtgtatttaatatataaatactaatatgtattataaatataaattgtctttggcccaatatatccaaaatattatttcaatattttgttataaaaatttatgagtggtagtttacattttttgtgctacgttttctaaatctggtgggcattttatagtgcatctcaatttgtactatttcatgtgctcagtagctacatgtgactagtggccactgtattgaacagcatagttgtaaattatacctctagcatatgcttacttgttaggatttactagaatttttcagaatataaaattttgtgatggaaacccatagctcaaagtaagcttgttagaaatacatatgtagatcttgaggtttaagtcttcagctcccttcttaacaacagaaggcagtcacgtgtgtataaaacttcacacattatatgggtgcttagataatactgcctttgacttggcagtttagaggttttatgtaagtacattgtggcatcttttgtagcctgttttgtttccaattttttaatctcttataaaatatatttgataaataaaacaccctgccatgtcttcctattcatttttatttaaatgttagcatgagatgtgaagtagataaaactcttaagtagtattcttttatgtacaatatcaccatcacttgtgctaaagggacaactgtatagaacttggcttcatggattaattagacctctaattgacttggcaaagagaggtgtctgttttaaattgagcctctgttcattattttatgtgaattatctttaaaagagatgactgatcttgatccatctagggctgtgcttaataatatcagattagttgagtgacagctcagaatgtcactaagaaggccaaagccagcctgggttctggaccagagcaccactttagtgggccagacctgtttagagtacaagattggcctttgtgagtgaaacaagcaaacaatggtatgcagggttgagtcaaagagatggtttgttctgatgccagcctacaccagttcagcttctgtaattgacctaggtccctgtggttaattctggtcctgaagtaaagctaacgttgtataaaacaaatcttccagcttctacagaccgtctttttcccgtgtcccttcctcaatcccacatagatttagtcccaaaaatctttaacgtcaacatttgaagagctctgacttagcactctaaagatgaggcatgcacaccctgtcaccacttccctgaccctgagtgcctgtcccagcagcttatagagctccaggatgggggggcctgccttgctcttggcaggacaagatgctggttcccaaccctagcttggactccagtgctcagcatttgtgagccgttttgatgccacgccaggcctaccaaggtttctgagtatcatttgctttcactttacccacagttgcttttggccagctcacctgaacccacatcgttgccccatgcaggagatctttggttctgagtgtaggtgttgcccatttccatttgtcctggatctgtcgctccaccattgtattgttattccagtggctgcgactagttggccctttccagttcccttctagtctgtctcactctacttttttttttttctctaacctaggccatgttctgtctctgaccaaagaaatgagatgggtctaagttttatccaatcctggtggctgctctacatgttaagctgggttcagtctaccatctatgccagaatggttgtgataaatattctcagatggacttaagtcaactttcctaactttattttcattgtcatgggtaaatgttagagaaatgacatggggaggaatgtctctgctatctttaatgaaaagtgtgtccaatgtggacagggcagtgggaggcttgtgaaatgtaaattgtttttatagccacatcgtgtgatgctcaaccctggcttcatagtgaattagatagggagcttctaaacaatacagattcccagacccatcccagaacgatggaatcagttggtctgttctatagggatagggaccaagcattaatattttatctcctaggtaattctcatgtgcagtggtattgaaaacactggtatacaaccttgaatttacttgctggcagagaggatgggaataaattgtatacaactatataggttgcgagccaagaaaccaagagtattagctagccaagtgatagacaagcaatttacccaaaatatttaccaaagaaaatcaatatttttggtaaattgtgtatcatccagttagctaataggactaattatactcctcttaatttcccctctcagaaatgatcaaggtcatacattaatactatttattaggttttgaagactttctttaaaattctgaattgaacattcaattcagtacaactaagtgaagagtacaacacatttagtttatttttagctggtgttatatctactctgggagcttgttcaatatgagcttttctgcagtgtcattactagttttttggtaacctgcttgcttttagtatgttgtagtaattagttgctttattcagcctatatttgtagcccaaatatttagtcatttgcagctgaaaaaaatagcataatgacttggtaatagtctttgaaatttctgtggcaactttttttttttcaaggagtatattttcgtcagtctagatttattgatttatcccattatgacatgaaataatcttttataggttaacgtacaaaatgtgaaaactcccaatttacctgccttccctaattgctgagatgaggccaatatttgagactctttatttggccattgtgtttctcggtggccgctctgatgggcgctgggttctagctttaggatgctgctggtggccactgccgggtgggaagattatcacttgacgctctggggattagaaaaacaccatagtactgtagatcaagtgcattgtgtccagcattcgtgattgctgtttattttatagttctcatctatccttatttgtctctgcatttagactttccttttattaggtgataatgtgatttgtactttgcagatggaaattattttcaaaagccagaatttgatcttgtagaggttggaaagttctgaattgttggctcaatttaaccccagatggcaactgatttctgtctcttcgtttaacgttcagtaagagaatcattacatgagttggccttttgttgacttccaagtgaatacaattagcaaaagaaaaaactctcttaatttccccaggtaccaaattgaatcccccttgaacttattaagtgaatttcccggtggaatttatccctgtggttggtgaaccactctcctatatattttcattttaactaagccttaatacgaaggccttcagtctgaacttagtagatttctttataggtcagatatttttccatatgttcagctaaaattgaccttttaaacaaaaattcattgaagcaaataaatcaccattgttactgtttgtttcatgtgtttttggtctgctcagtaccagatgacacggtagccacctgcaagtagggcttttttgttttgtgacataactacgcttgaagctatctttaacatcctaagctaatgccctataaataattggcgagaaagtgaaacaaggcactgggacttcctgtaggcctggagtgatatgtgtgttctggcccttcaaagctgtgcggccttgagcatgtcacttaacctctgtgagactcctgtttctctttgataaagtgataatacctaccagcgaatcatctgcctgttggatagtgaggagaccaagcctggctacacactggaatctcccaaggagttttcaacacactgacccctggtcccacccccagggattctgatttcatcttgggggtaagggttgaaacaaggagaaatgatagtggcttcaactactaagcatcagtggacatgatggggagtggtcaagattcagaatataactagaagatagatccaacagatttgttgatggctaggttatggaattttaaaaaaaggagtcaaaaatgactaaagttttgggccctgagcccaaaacagtggtgccatttaccgaaatagaaaacactgggatgaaggaatgaaaaccagcttgcatcttagaaaggagtgagaaagtcccatgtgtcaaaaatacatatgtttgtagacatttattttattctcttagagtattgcattcatcctaaaatctggatttcagaatttccatcttctgtttccctcatcttcttttctctgaatattctttagaatttcagtaaatgcacctgttagtgtaatacgtgttccccattgctatgaattttaggtatctgggaactgtatggatttattctgtttgggatcgataattacattgccaggactttttgctgcccagtcagagttgatgagaacagtctttcacgtgatcactgcgttcttttggctcttgaggtgctccaaactgcagggacattttccagagtggatatattaaatgaaagcacttactataaagtaggtgctaagcaaatgttttttgaatctgcatctggtgagtgactgggataagatcaggctgttcagattttggaaactgaacttttaaaaacgctggagtggttttgaagtcttcgtggagttttcttatattcatctgtatgcccatcacaccttgcatggcagtggtcacggtataccagcaggtctagggagctaatttcatgattctaattagtagtagtagcatcttgaggtaaaatgttgcattaggaggtacttactgcatggagtgatttttatttatggcattagaaggttcttgaagcatttgtttcatccaccctcgcatcgtttttgttctacctgtggattgagtagggcgtgcggcaatctcacacatgtgtaggtgtcattgctttaatgtcactgagcaatgtgctgggtcttttcagtctttgcagcccaccagctgtcattcacacatcctatcttaatctgtttagtggaggtttctgtcgtcttctttagctacatcctgacaaactgaaggatgccgaccattccttactttgttttgtgaaaatgattcttggctttttgagccagtctcatctgaccagtcttagtgggttcttcagtactgcccacagtgcttgtggtagatgagccatcccagagccacacccattctcagagtctcgttagggtgtgctggagttcttggatgctcttttgtgggtttcctctttttctagctttgtttaatggatttgttggatatttggcaaacctggttgtggcattgtgttatcaacaggcagatgagagtgtcacactttccttatcctgggtaatgtctgtttctgtaggataaaacacttgtcttgtttgtggacagtgtatgttgctgtgtgtgctatactgatgtccctaccaaagttgtaatgggcaggaagactttagtttcttcactggatgtttttgatgattgagactttgtttaaaaaaaaaaacaaaggtgagttgttttcctctcttgcaaagtcacaatggagataagaagcaggtgccagttaaactccactgactcattctgagattaatgtagcagcataatgatgttatttgggtgtttctgcttcttgtaataaaacgaggactagtctgttggaactaatcatatatctacctgtttgtatgttataaaatgtgtaaatagctctaaaagttaaagttgtaatgattcagataactttcatcattgttcattcatttttttccccagtactttttaaggcctagctcattcagagctgtaattcagttctatcttcctatgaacacactgctactgaagtcaatggggttaactatcctacaagcatttgtagtaactaatttaataatactcttttccatgtacaaaatgcggaaaacttgcgccctgcactgtatcagtggttctctcaataagcttatagttgtcttaaaaaaaaaaaagaaatttaaaaggatagaatccttggattctagagttggaagggaacttagaagtcatttaatgcaacacagtaactgatatggcttgaatacctcacagtgaagggaacacacccacacacacccttttaagacagcccattccattctcagacacctcagattttttcttgataagaaagcaataaaagcagtaaaaacatttatgctctacatgccttgctgggtcaggtgtctcccatattgtatttacacagttgcttctttaggcctttagtatagaaccttcaacttattcagcctttcaaaatcttctagaattctgatttttttcatgtcatctgtacattgattaatcgtgtcatgtgtccttatcctgtcattggaacccaggcagtctgcacccagagcccttaccaagttaggcatttactgtaagggatcctcttgtatcacagcagaggttcattgttcttttttttttttttttttctggtgagggggaagtctctgtacgtctgctccttcacttcctaactttggcatgcatgtggcttcagagtgccatgatgctccctccagcccacctgtccgtgatgttccttacttggtgctgagttgactgaccacaaatccacattctctaaaagggatctgactggcctggctggtcaggtgctccatgttgaccctgacacctagggctcaggtactaggccaggccaggagatggaaggagagaccgagtccaagggtgacccaggggaggctctttcagaagggctcacaggcagggatggccaaagaatagctttagtatgtgagacccctccatgtatgtttgtcagctacatagttgtgaatccacattgtttcataatcatggaatcgtgtgtcttcatttataacaatagggcctacacaaaagccttcttgaaatccagatgctgagggttctatttttgaaaagaaagaaaagggatttagtcagtggaggcttactgatccccaccagtcaccacctcccttttaagcagtctgttaatcagctgcacttaatgtttgactagcattggcctcaaactcattggccaatagcattattattcagacttatctaatgtaaaggaccttttttagaggaaacatttctttttggtctttgagaatatattctttgtatgagaaacactgctttcaaaataattaagctcagttccatgtttaactgaattctcagaaatgttcttttaacttctgaattttcagatctttcccaaaaatcctttagaagcagtggatctcattttgtaaatctgtgaactttgaaagcacatctgtagactcccattttaaaaaacagtggtttatgatctttatgatccatcttctttttagaacactgggagagtgcaggtggccctccttatccctgagtttcacgtccatggattcagccaatcatggatcaaaagtattcagaaaaaattccatagagtttcaaaaagcaaaacttcaatttgccacacaccaagtactatgttgaatccatgcaaatgacgtgtaggcattgtgttaggtattataagtaatcgagagatgatttaaaatatacaagaggatgtgtgtaggttatttgaaatactacatcactttatataaggtaattgagcatctgcagatttggtaaggggtcttggaaccaatcccccatgcatactgaacgatgactaaattgtcttcatcttttagttcctctctcattcaccatagttcttctctgattagtaacagttcacttaactattttgcaggttctcacagttctgtaggttagaaaataattatatatacctacacatacatatatgtatttactataggctaggaattcatttagagcagttaggtgctgatttttctttttttccctcttaaaataatcccctaccttgtcttttggtttagttcttcgaactaatgttcattctaacctttccagtcttaagatgattatccttgatagacgattgaagcaaagtagatgttggagctgagaagttctgccttttattatctgttaacaacattgtatcatctattctaggcagcaggctcatctcatcaattctttgtgtcccagatgaaagggggaaaaatcgagtggtctctaacgttttttacaacacctttcctccagtctcagatgtctgtgcatctgttaatattcactgttgaacatgtgaacctatctattttcaacctttcctgtgatctttttttaatcttgtgcttgttcaagtacttcctgtgaagcagcagtggtctctaaatacaactccttcaaccctccctgaccacctccccgccttgtcagggccttccacaattactcagcatgtgggtttggacagctgttggggcttctgcactttgtgggtcttgataataaattgaaatgtgccctcctgaaatccagaatacatatctgacatggcctggtattcccctttgacagtcaaaaactctttgatacagttattttttgaagagtatcattactactttaccacttttgcttggattagaatccagtccgtagtgtcagtctgccttgtttcctgtgcatttttagaggtgaacttaatgccactgcaagtcagtggtgctttaagctaattgagacttctaggagatgcttggtagatgtctggtggttgcaacccctcgtttctggtgcagtctgcttctgtgtcaatttttaaacatctatgttggcaaatatactatttaattcttctgtcagataaagttatctgtgggttattcccaaggagatgtcattaaattccttctgtctttcattgttctggttccttttccagttaagcatgaaatggcgttagtaaatgttttattatttccaagcaattcagcatgccgaagatgactattattttaggttaatatccaaggctggctgccaacaagattgactgtttactatgtgtgacgcccaactctaggcatactatagatttccttgtaatactgcttaaggatatcctttcttctgaatgtcaggagtactctttagaatccaccacttagaatttgtagtgctacttcaggggcttgtcgcaatttagcgtgagttcaagaaatgttaagccattactttttttccttttttagacaataactgctgtggtgtgttttacacttgtttatttttaaatcaattccctcaaaggcacttaaagaaacatgtcatttaccatgtctcctaatgacaggtcctgatgacaaaatatattagtggttattaggatagagacaagactataaatttctgggaatttttggatgccttatattgaaatagaaaatttagcaaacatttagtgcacagaagggactttcctgaagggtcattcatgttacttccccatattagagtagcatacttaatagatacttacccatacccttgtgcctgtcccatcctctgtacataagcatgcatagcatttattattattgaactaagcatatagctcaaaagattagtgtcagatgtatgatggtcttttacatagacaatatattcaaaacttttgtaggtatcccttcaaagaagaatggccaaggagagtattttgacacttaagtagcatccaacaaggctgaaggggtagagaaatgtctgaactggaaatactgttgaggtgtaatagaccagcaaaggacagagttaaagggagaggtgaggtcaaatttaattgttgaatgaatgcatgaatctatctatcagtgtcagagctttagatatgggttggactttatcagtttccaaatgttgtcttgcctttggtgctcagtgactctctaaccttgagcaagtctccatatgacaagtgatgtctcctaatcttcatttttagaactcttttaaaaagtgaacccttttgtataatgaaaagctatcaattgttgaaggagataaccatgttttacatgatcaagggtatgtaatgtttgttataactcagatggacttggaggtaatgagctagcatcacagttgcatgaacaagagggtgatggagaagaaggtagggatgtggaaaaccgtttggctattgtgcaagttccttagagttgcaatccacagttgtcccagaacgtgctggactcagagcttgtttagggcagctgttaacatcagaagagatctgatccagcaagtagggcctgttggggaaggttccaggtagcctgcttattcttaagcaggaaaattgcactgtggttccaggtcatcattccatgttgatcagaaaagccagctagcggttgaggtacagggaacagggcttagcttcttgtagaaggctagccagtctgggtagggcatcactgcccacctacattagatgggtgttgggacaggacttggcttccaacagaggactgaaatgattctgtcaagactccataatatataggctgagcatatcctttaagcgggtggagtagctcctggaatcacatgaaacgcttagagaaaggttgaggaggatctaaggcagcttgactaataccacagattcattcctgtctgtgttcagccttttcatctctccagatggcaaattgactgactggcttagcctggactgtgtgctgacttttaagtcaatgaggagcatggagccttgatggagcagtcccctaagactctgggggaggggttctccaaaggaaagcaatgggctgtttccaggagaagcagatgccgagctggaaagagcagattgtccactgcacagagtctgcattaacactcggtacagggatggtgtattaatgcaactgaaaattccatttttcctctggctactgttgtcatgatctagaaatttgagaggtattgctaaatagtttccattttaatttccatgcttttaagggtgtttgatttcttcagtgccatatttgaaaatgtggtttgtaagtctttacctttgaagcacccagtttattgtttccagagtagtggttccttcttttcatgagctctctctctctctctccccctacccgtctctgaacagctgctgtcaggctcacaatcgaacatttgaagtgactgttctgctctaacaatgcagaacatgggatttcaagcctcttttgtcactgcagtaattgcttctgcatttataattaaatgaactatctgtactaagataccactaaaaacaaagtaaatacaaacatcttaattattcagccaagaattgttttgatccagcttaagaagcttatgtgtgtgtgtgtgcgtgtgtgtgtgtgtgtgtgtgtgtgtgtgtgtgtgtgtattaagcccattgctttcctttggagaactcccccttcccccatagtcttaggggactgctccatcaagttaccatgcccctctttgacttaaaagtaagcacatggcccatgctaagccaatcacagtcaatttgccatctggagagatgaaaaggctgaacacagagaggactgaatctgtggtatcttgaactgattccattagtcaagctgccttagatcttcctcaacctttctgtaagcttttcatgtgcttccaggagctgctgcacctgcttaagaagcttacatacatacatacatgtgtatatatatatatatatatatatatatatgtgtgtgtgtgtgtgtgtgtgtgtgtgtatatatatgtatatatgtgtgtatgtatatattcttaagcttctgtatcaaaacaatatatacaaatacatatgtgtgcatatatatattcaggactttcaattattaagcctttgaaaaggatagtggttaatgctaataattccatcttagtagtacctaactttaatcacacctaagttctgcagttgtgcttgtaaagtctctgtctagtttccctgttaatattcttttattagattctttgactgttgcaagcatgactgcttgtttaatgaccccaacctaagtcaagaaacttgagcagctaatatggtccctttaatgcctaatattggaaaccattgagtgaaaggttatataattgcactctcctaaatatgtttaggaaataatataatagatattctgattccaattacagccttacttataattgcaataaagttgagtctgcaaaaaacttagtggttctataaccgtattaccaggcaacagtgattttgtatcttgttcttgtctccctcctacctaccacccctgcatttctgttgcataaccccatacagatgacaattttgttaaaaaaaaaagtactcaatattaattgaccaaattatatggcaaaatttattattttgctgtctatattgatttacactggtcacaactataaatattatccaaaataagtaaatgttaatacctacattacagtctttaagacttttagttttcccgtatcaagtattttgaaggcgagattaatctgtggggaggatagggtgacgggaactgtttgaatgacaagtattgtgctacattgctaacataatgtcatcctcacattaaccatattttatggatgaggaagctgagactcagatgataaaataatttgcccatgtagaagtgttataatctgaatttgaacatacatctgactacatagcctatttattttctcccatagtatgcctttctgatttcataataaaaataatagctagaatttttgcatatgcatgaggagccaggcactttacacatgcattatttcatgtaatccccacaaactcttgtaagagcgtaggtagctaaaggttaattatcttgtctaaagtaaccagagctcataactggtagacctaaacagtctctctcattcttaggcatgattctttaatgccctccttgattatattctgtattttaaacattattgattaccatgtaataatgagaaaaaggatgcatggtatctaaggattagggttgtttggctgtaaagagaattctattcattaagtggttaattatttgttgtatttacaatcctacaataaagtaatgggcaaaattaatttgaacaatacatgtaacccaacacatccaaaatattgtaaatttagcatgtgatcaaaataaaacattatgggtcagatttttaaaaatcctacatttctttcatgtcttgggcttttgcgtggagtagcaccaggcagtagtactatggagcatcatgcaatcatgaagaggttatatggctcatgccagctctgcctccagagtataatgtatgcatccacttcctttcatctctgtcaccagtctaacccaggactcatcatcttttacctggattatcacagtgtcctcgaaatggtctttctacttaaacctgtcagtgaattcctactgcataaagaatataaattcaggctgttattctcccaatctggccctgcttctttttgttttatgctctgtttactgttagtggccctcatgttcctggaaatgccaagctcattctcccctccagggcttttcctgctattcccccttttgggttgacaactgtcccttatcttcctttatgtgtcatcaaggtctcaactcagcatctccttgagacgtcttctctgaccattcagtgtaaaatagcagcagctatagtagcatcactagcagtgataacaacaacaatgaaaatagctcacattcattactaaactcttactacgtgccaggcattgttctcatatttactcgctgggtccttacaaccaccctttgaggtaagatactgttattagttctattatatgcataatgaaacttaagcacagagacttctgtcaattgttctacaatcacttgtttattttcttcctcattcttaccatgttctgtaattatctttttcttctctagaaaataagtccctgagaaagaggaccttatcttatttcctgctatttctataacatttttaaaatgcccaaaacatagtagattcttaagtatgttgaatgaatgaataagcaaatgaatgaacaacaggtcttattagatcatgatatttcggatgaaaaatggaatatttcagaaatgatacttctctcatatgagcaggtcagaagcctttcacttatactattgagcattttcctctgttacattgtactgtgtgcatataagcatgtgatgatgaatctgggcagatgaagaaaggaagactctgtgtcgtcattctcagcaacccagtagtcactgatcagtaggtgccaggtagttgttggcaactgattatagtcactgcttagcttttcaaatatggatgttgagttaccatcacaaagcaccatttcacttcgtgactgagttttggctgcagattaaggaaggcaactgttgctgtgaaacatctcaataaaggctcaagaagggaaattttttttactttgtttttcagaattttcctgctcttctgaacaaaactattgatttcttttctgcctgctgctcagcagatattaatttcacagaattttagagctgagagtaactgtcagattattagcctagcctggcttccccattttacaaaggaagagaataacccccagggatgaagtggtttgtgcagggtcatgtgggtaattggtagaagaacttgagctcacctcacagcccctaagtgggttaagtgatgaaacactgttcggggaagatgagcacttgctcacttcagagtcataattaggatagtgacccaccagcatcctttgttttcttgacaaataaaattattgctggaagctaaaatagtcaccagaaggatgttgcttgtatatttttatttggtaatacaaagtaatcttattaacatattcagtagttaaaagttacatgtgactattccctatactgaaattcttggtccttctgaagtttagaaatagcatttggccattttacgaccaagaatgcaaaatttggcctcttagagtctctggtttaaaatatgcatagcaaatactggataattttattattgcttgagataaaccacaattcagaaaacaaaattgcttttctgctggcagggggaataggaatcaagcagaatattacagacattatttggcataaataaggaaaagtcttttccttgctcatttcaataaaagctagaccagattcatttttctgggaactggtttgattctgaccgtttttaagaagttacagaccttggagaacacaatgttgaaagaagctaagatttcccagaagctgctatacaaatgtgctttcatacatagaaaaggatccttgctcagttccattcctcaaagtgataggtgtatgaatttgcctgccaatttgctctgtgaaacttaatttaagaagactaataatgccattagtggatgtcaaatgtctgagcaccaaggacattggggtgaatgcctgagttagtctcttggagaatcgaaaatgtgaggaaggcgcatatatctggtgttactatcatcatttactttgtgtgtctgtacttgtgggccattttgagatgtctccaacaacttggaaatttgcgaattgagtataccttctcgtttctttctaagactaacatatacaggagcaaagtcacctgcaagggggctagattggttcctaggcctacaggatttggtaatcccattggaagattaaatatcaatttgtgttcgaaggtggaaatgggtatggagatggtcaaggaaggggtaagtcatggggttaaacattatcagcactcttctcagctctgcagaagggaatagaagcattagccaacagacttgaagtatcatggcctcattgtcaagatattgcaacaaacttttaagaggttggtcctacagatgcatctacccctttagcaggattggttgcatcaggctgtacttccctaatgctatgagagtctcagttcacctaaccactggtgggtgggttactttggtcatttaacttctacacaggccaatctgggagagttgaattgattatggaacttcagttactctagttcctgtggcaattacttctcatcataaatttactaattgttgtttggacatcagtcctacaggcttgggcaacatatgtctacttgaaagagatctgtttctagtatattactaatctggttttgctcacttgttaattcatcaggctttgagggcttactatgaaccagaggtataataggtaacttaccatgtaacaagggaagcaggtgaattgtcagttacaccacaaggtagagaattaccaccccaaaacattcttcaacctctaacccagaagccgcctcccatttttatgaggctcagcctatgactgtatcattattcaccctgttagctctttaagtataatagacatttacaatatctattacatttattgtaatacaaattacatgtattgtaatctattacaatattaggtgttttaagtacattgcatacatattccttcatttactaccaactattccaggacatgaacacagaatacttctctttgacagattaggaaactgaagcctagtgaaagtaagtaactatctaaggtcatgttttattcttggctttgccatttaccaaatactgttcattcgactatacttaatacggagttcaaacccattgcatggtgggcttcagagttcagtctgaacccagagaaaatgggtggggcactgagtggatctcagaagcagtctgttgaatgtcttgaagtccatttccgttaaataggtgagtattgtatgtcctctttgcacaagattgtgctaggaaaagctgagagagataccaaagagcatgattaagatgcgtttctttctctcagtaaagttcacctttagcatgactttacagacaaagaaggcttctgaaggcctgacctaccaggaagactcagaactgttaccagatcaagaacggcactcgccttccccttgctttctgtgaggggatgacataaaagcgtcagagttttcagtagtccttaggagttcagacaggtggattaaaagctactagtaaattttaatgacttatgtgaacgaaccctctaaattattaaacagcaagggacatgggttccttccttaaaacgaggaatagaactccatgtataagaaggaataccatcttagtttgaccctctttggggcagggtggtaaaggattctcctattttgattgcctttgtcaccattctaatagctcagcttaggcattgcccaggtatgcacatgtagctctttatgtggttattatagctgatgaaggtggtgatatgcagaggaaataaaaaaatgaaatcataaaatagaattatctggtgcatattgaataactttcaattttgaatgtagcaaatgtgttttcacctttaacccagagctgtgagatcaaaattgctacctaccttcctcaaagtgttggttcattaatcaaatggaagagtccgtttctctttacatggaaagagtctggattgacaggttacttacgttaagtccagacctaagttgcccatttctgcaatgtaagatgattgcattgaagagtttaattataatggttacaaactctcacttccaaattagcaaaaatgctagtctttttcccaggtaccttcatcagaatattcctgaggatctctgaggtcaagtatgttcactgagatatttctgagaacctctgaggttgctgtgcctgtttactgctagcttgctgtcacctgctaggagtaaacagaattggatacataacagaaggtgatacctgcaatctctggccttcaaacattctgggagtgggcttcaggtgcctgatggctctccatgtcactgctgaggagacaggggagaggtgcctaccagctccactggctgagagcctcactccctgctttcagtgcagatctcccttcctcagtatcacacctggtcagggcacaacagagcgaagcgttctgcatacattcagcttcatgtacaatatctttccaaagcttttctgtaatgcctgggtaaagaaagcctatgttgtctgtgaaatcctgtgctcagagccatccagtctcttcgatggtcctacccctggcaacagtttacagtttagattttccccttcattttggtgagttttctctttaaagatcccttattatctgacctaggttgggcccctactaatccattaggattgttttaattactctgattcccacataagggatggggttaattccagtccctttagttcaaggaaaatcctttgccccacagaaattcttgaatacaagttaatatctgagggggagatgcagtatccaattgctttcagtggatagcaatatccagtgctctcccagcagcgtttgagacctcaatgtaagtaggtgtgtctggatggagtaacacccagttcctcagctaaggacatccaagggcggggccctcaaaagtcccattacataaagtagatacaacactcaaaagtccattatataaagtaaatacaacacaacctgagaacatcagctcagagtggagtgaagagctggtttttttgaggctctctctctaatccagaggcggggaacagcacactctggtcttcatgctaccacgaaggaagacctaataaaggactcaattttttttaaagattgatctccctctattcaataacccatgtgtgaaatttcaattatacaaaactagagggaaaagtatgtgtttagaacatggtgtagggaaacactgtgagcaaagctgctgattgggtctgaaactgcaaaatgggtgtgacagaatctactcggagccatgtgacctccagggtgataaggatacaatgtgcctctcaccctgtgcccctcctacttggaaagctttcagtggttggctgccaagcagagcgcagggtcctctgggacctggcctgcgtgcttcctcagcgtggtttctcgtccgccttctgtctgtgctccagcagcactgccctgtttgctctcccctgcacacatgacaccgtttctcacaccccagtccctgtgctcatgcttctcacctttgtagaacacctcagtgattttctggtttcatactataacaaaccccacaggccagcttttcacatagttgttaccagcacttggccaacagttgttttttcatcagtgggtggagcagcttttcttgcccccaaaaaacagtcaaccactcatttttcattgggtatatgtattcggcaaacattgggtacctgctgtttgttggcactggtgttgagaagatgaataacacaccctctatggccctagggagttcccattctggtagggggaacctgactcaggcagcaacaaaaccttctggtaagtgttttgctgaagagtggggaggttcagagggctgtggaaacccaaagacgttttacctaacttgaacatcatagaacacttcagaagaaaccacatgtcagcaggtcttatgggaggagttggcattggctaggcagaaaagagaagaaaaatgggttttggagatacagtactgttgtcacccctttgatttttcactagaagacacaaaaagctgtttaaaatactatctgttgatattctgttctagaacttgtatgtattttttaaagtgtttgtcaacattgcaacaaagtacccagttgaatgtatcctgttgtttcaatgattatgagatgacttgaagtgctcttgagaaatttaaagttcgtttgtgaacatgaattctaactggagaaaaaaataggtgatgatagtgagttggatcattgttgcagttctctatttaaaccttactatttatcttttcttctgtcttcatctgggaaaaaacccagaaaagtattaaatgcatatgctttaatttttgactatattttaaattaccttgttagttttacctaaaactgtaatttaaaccagtttaaaattaaggtttacttctgggcatctttttatatagtggaaggaaagaagttgaacacttacgggggaaatggaaagttgatgttatgtcttgtttttgatatggctcagtttttacatgactgttaaatgctgccctttaaatctagtagaaatgttaaatatggggatgttactttttattataaaagaaacaacagttaaggggaagcaagtagcttttaacagatttcatattctagactagttatgaaatctgtttttggtctggacaataaaacatttcttgtacaataagaagatctctttttaaggttatgagaagacagatgatgtttcagagaagacctcactggctgaccaggaggaagtaaggactattttcatcaaccagccccagctgacaaaattctgcaataaccatgtcaggtaagaactaccaaagaatgccatgagaccagccagcagagcagagctggttaggtcaaaatgaaaatgcttgcaaagagctttcagtgcagtcagttaatatttgagagctccctgttggcagtgtgaataggctgtttccccatcttctctcccatagagaaatattcataagaatctggaaatagcgaggagcagaaagaataagcacccatcctctgccgatgctgcatagatattgaataatgaaagctgcttatgtgtaaatgcctctgtcctaaacctgttaatagagcgatgcgttactggttttggttagcaagttttaacattttagaagaggtctttgcaattctgcaccaagaattccttctggttatatagtctttaagtattggtttttgatagttgtgaagtttagtatggtgtggaggaatggagggctgtgcgaattacttcactgcactgttgtgttttcattccaacaataatgtaaaaagtatctgtgtaagcactggccacttatgcggcttctgggaccacataaacaccttcaataccaataaagtgtttctccagtggcagagttaactagatttgagaagtgcccacttaatatgtacaatttcaaattctagaggaacatttctcaatttgggtaatgtggcatgtgtctgctttaatctcctttctatttgataaacaagaggaagatctgggtgtttctaagacctaagtagtgatatcttactgatgtgggcatatctggtgtgtttagtgtggatttctagccatgttcctggagtggcagtgaagaaaattcaaacagaaccccagagatctccctgaaattatccaggaaaggcatctctgtttacagtgtctggtcaaattgctcaaattgctgatttcggggttcttttggcaagattttattttctagtcacacgttgtactctgtcttatggagggctggagccctttaactccaaagttgctcttctttgtaagctacttctagtaatgttaagcagaataattggccaaataggacaaaagattatgcaaaaaaaaaaaaatctgtggtattcatgctttaccatttatttaaccttttcactctttttcatttaggttaatgaccctttgcaatattctcccaatttgaaacagccggcaaatgttccttatctaactttttatatgttagtaacagaactttgtaagtgtgggtgctaattatggagaagttttatgctacttttcatttttgttttctagcactgcaaaatacaacataatcacattccttccaagatttctctactctcagttcagaagagctgctaattcattttttctctttattgcactgctgcaggtaaagtcacgtcataaaaccttgtcaaatgttcaggtactaataaatgttaagcccgtgaccaatcccctgaggtttatgtaaatgccgagagataagctggttttggtggacatttctggctcctgctgcaagcagtgttggaatccactaccttttccagccttttgattcatttttatcagcttattttgggtgttctataaatttgatgtggcaaggactgttcattttgggtggtaaaggggatgggacgttttcttaaaatgctaattttcatagtaaaagtatcaactctgaaccttagaatgcaagaagttaaatcttgtgcttctctttgtatttaaattagttgtagtcagaaaaagttttagtttattaaaaagtagcatattgaacatatgcttaaatttgaaaaaatattttcattgaacttgaaaataaaaaatttttaaaacaccacaaaacacaaggaaaaaaatttaaaactctcattattctaccatcagagacaactactcttaaattgtgggtatatatccttctggtctttttttttttttttttcctcccaagcatcgtttattgacttcgtttacaaaaaggggatcatagaatacctattgttttgttacctgctgtattcatataacaatgtatggatattttcccagttattcattgtgtttctaaaatatcattttaatagttatattttaatgaatagatatactgtaacttatgtaaccagtcttccaatggaggttgtagtcctatatacaactgcttactgtgaaactaattaacatgcttttccagtacttattagatacgaacacattacctcactcagcattagtcggccaagatagtaaaatcagtgaggcatattttagaaggcactgagactgttttcttgaatctattataaattttctagttctcattggatttctcttttttttttttttccaaacagcaaatacctgatgtgtcaccaacaggtcgttatacaacactggttcctctcttatttattttagctgtggcagctatcaaagagataatagaagatattgtaagtattctattttttcataattgtatgtgactttgttatttatatatgctttaaatattagttttttcttaaattatttaattcttggcgtgggctgtttaaaatatccattcaacttcaaaatgtctagaatatgttcctatccctgaagttgatttttgttttctgtaatattgctgaatgtttgttacagtgttctattgcatttatagtttagcaaataaaagaaattaatttactgtaataattggcttgaggagaaaagtacatttgaacattattttcaattaaatgaaaaaccctccaaattatctaagtgatattttttggtattttctattttttaatttaaataattataaatttcattttattaaatgccttggatttcttctcaccttatttaatagttctaagtttctttttcctttatctcatttttttaaaagaaagtaatagtaaccaaattagctatttttattctgtggtaataagagaaaggggaagtctctttctcctttataaaactaactctaccaaataaattcaggccttttttctgttatatctattttaactgtcttacttgaggaaaccaatgttttgttttggtttggtttttttcctgttcttttaaactacttcatatatatatagagagagagaaggagagacttttaagttcaggggtacatgtgcagggttgttacataggtaaacgtgtgtcatggggttttattgtacagattatttcatcacccaggcattaaaccgagcatctattagttacttttagttatttttcctgatcctctccctcctcccaccctccaccctccaatgcgcctcagtatgtggtgttcccctctgtgtccgtgtgttctcatcatttactcccatttacaagtgagaacacacggtatttggttttctgttcctgtgttagtttgctaaggataatggcctccatccagctccattcatgtccctgcaaaggacatgatctcgttcttttttatggctgcatagtattccgtggtgtatatgtaccgcgttttgtttatccagtctatcattgatgggcatttaggttgatttcatgtctttgctattgtgaatagggctgaaatgaacatacatatgcatatgtctttataatagaatgatttatattcctttgggtatatacccagtaatgggattgctgggtcaagtggtatttgtctttaggtctttgaggaatcaccacactgtcttccacaatggtcaaaactaatttacactcccaccaacagtgtataaatgttcctttttctctacaaccttgccagcatctgttattttttaactttttaataaatgccattgtgactggtataagatggcatctcattgtggttttggtttgcatttctctaataattggtgatgttgagctttttttcaacgtttgctggccgcatgtatgtcttcctttgagaagtgtccattcatgtcctttgcccacctttttttttttttttgagacagagtttcgctcttatcacccaggctggagtgcagtggtgcgatctcggctcactgcaacctccacctcccaggttcaagcgattctcctgcctcagccttctgagtagctggaattacaggcatgcgccaccatgcccagctaattttgtattattagtactgacagggtttcttcatgttggtcaggctggtctcgaactcccgacctcaggcaatccacctgccacgtcctcccaaagtgctgggattacaggcgtgagccactgcacccagcccttttcccactttttaatggggttgttttcttcttgtaaatttaagttccttgtagatgccggatattagacctttgtcagatgcatagtttgcaagtgttttcccccattctgtaagttgtctgtttactctgttgtttttttttcttttttgctgtgcaaaagctctttaattagatccaatttgtcaatttttgcttttgttgcaattgcttctggcatctttgtcatgaaatctttgcccatgcctatgtcctgaatagtagtgcctaggttttcttccagggtttttatagtttggggttttatatttaagtctttttttgtgtttgttttttttgtttttgagatggattatcactctgttgcccaggctggagtgcagtggcgcaatcttggctcactgcaacctctgcctcctgggttcaagcgattctcccacctcagcctcccgagtagctgggattacaggctcccaccaccattcccggctaattttttttttttttttcctagtagagacagggttttgccatgttggccaggctggtcttgaacttctgacctcaggtgatccacccaccttggcctcccaaaatgctgggattacaggcgtgagccaccatgcccagccttcatttaagtctttaatccatcttgagatgagttttgtatatgatgtagtttcagtcttctacatatggctaaccagttattccagcattatttatcgaatagggactcctttcttcattgcttgtttttgtcagctttgtcgaagatcagatggttgtaggtgtgcagtcttatttctgggttctctattctgttccattggtctatgtgtgttctcctactagtaccatgttattgtggttactgtagccctgtagtgtagtttgaagttgggtagcataattgatacctccagctttgttctttttgcttagaattgccttggctatttgggctgtctttttggttccatatgaatttttaaatagttaaattttaaactattcattgacattctgtaaagaatggtagtttaatgggaatagcattgaatctgtaaattgctttgagctgtatggctatttttacaatattgattcttctatccagcagcatggaatgttttccatttgttttgtcatctctgatttcattgagcagtggtttgtagttttccttgtagagatctttcacctccctagttagctgtattcctaggtattttattctaaaatagttgtttgccagtctgagaggacaatctgttaatccttaggaaagtaagatggtaaagccaggaaatggtgagaaatttagaacgctccaatttaaagttatacaaacattaacactttttctatagaggatcaaattgggatctcattaagatggcatttgccatgttaggaatgggtcaattgaacatttagatcatcagtttcaaaatcatccaagtatttaagagtagaaacagatgttgtgcatgtgtataaaacagcatagtcttcttgattggaaatgacatacttgatggagacactagctgagaagtgtaagagactcctacctgcattgctccacatagacttgccaacctttaaattgtggtaggacttggcagtccacagggattggtctttactacacttttgtcactttctttgccttttggacttcccttttctttgtttagcctaattatcattgagtacctttaatttactaggcatcatgctagtgtttcacaaatgtttttctcgtttaattttttcaataacattgaaagttggatgttaacccaattttaaaggtaaggaagctgaggcttagagaggtcatgtaacttgtctaagaaagtgatagaatcagaattccgtcctatccagtgctcttggctctgcatgattgtgaagagtcaccaacatttattgtgcttctaggttgtacttactctatgtcctttacatttactaaatcttataacaacccttgaagatgttattgatcttatccctattttacagataagaggaggcaggaggggtacggtaacttgtccaaagtcacactggggctgtcagaatccaaacaaggcattttggctccagactcctgccttataatcactactcaaaactgccttccctgtcttgttttgctttgttttgttccctggcaaagctataatctctctagctatggtttctagtactccatctttgaaagtacgtggcaaataaaattgtatccaagaagtttttttttaacagaactctttttggcataatataataatcaggtactattagaaagttgctaatcatgcagtcctaaagaatgtaataatagtattgtgagataatagtatcatatgaagtagttttccaatgaaatcactgttaagaaattgactagaaattgtaagagtagtttagcaagaagtttatgccaaactgtaaagtgatagaaagtttgaaagaatactctctaaaatgggggacaaatcaaataacaatttagatagttggacaaagagctgtctttatcagtgagaataatgaatacatcttttcattcatccgttcagcaagaacatttgaagaactcttgagctgccaggcattcattaggatatgtatgaggatgtgttaaacttttgctgtgctggtaatcatgtctcatatgtcagtggcttaatatataagtttatttttcacttactcaaagacacgtgatggtgggcatcagggattcagcctgaatcaagattctgctttgtggaatataggtggttattgtagcaagggtggggagaggggatggaatctcagttcttctatgttttggcccagaaatggagcacgcatctctttatagctcaatattagaactagtggcatggcaaagagaaggtgttatctcagggtccatggaagtggagagctggatattggtgaagactggtcatggctgccactaatacatcagtgaataaagcagagattacaatctagtaaactttcctatattctattagataatgtttttaaatctctctatatatatagatttaaaattttaaaatatatatatatatatgtgtagatagatagattaaaatatagtaagaattgcctgcaggtaaggtactgaagacttatccacccccagtgcattttaactcttgatgctttagataacttaacatactatgattttctatttttatgtgttaataacaaataacacacatacttggaaatactctaaaattgatggagaactctcttctaaaaagctgtattatgctaaatgctagttcctgtgataaagatcaaatttgttaaattgatatttaccactaaaaatgttccctctttgctataaacttgttaatttaaatactaggagactccattcgttataaaacagttattcaaagcctacaatgcgtaggaaccaaatactgagactatgttagtgagtaaaactagccgtgatggagcttatatccaatagaagagatcgacactaatcaagtaatcatactggtgagaatggcttgaaccctggaggcagaggttgcaatgagccgagatcccactacggcactccagcctggacgacagaatgagactccatctcaaaaaaaaaacaaaaaaatcacactaggctattaatgagaattaaatgatggacgtgaagtccttagaatagtgcctggtatatagtaagtgatgaataaatgttaactgtattatcatctagagatccttttggcttaacagtagaaaatggattgcaaggagaacagagcatttgtgcagacaagaatattctagttgttagtgtaaaaaaaatgaagatatattagactcagcaggtatggtagacatggtgaaaagtaagaaaatgaatttagtacatttttaagagtaaaactgacaagacttaccactatctaacatggctacataccctattctatccacaaccactggaatgtaagctccatgcaaggaaggggttttgtcacttgttactgtagtctcagcaacagtaacagggcctggcacatagtcagtgtttagtaaatatttattgagtgaaagaatggcttggataggaatgagagggagacaaaggtattagaatgaatttcctggtttgggtaaatggatggcatgtgtttccatgtctgagacaagtaccaggtcttggagattaaggtccctggttgccttgtgaacagtttgagatgcctttgagattgccggagagatgttaaagaggcaaccagatataatcgtggagctcagatgagagttttgactggtatatatttatgtactggttataattgaaactgcaggtatgaaagagttgtaagaagagaatatggagttagaagtgaggagggccagggagtaagccttgagcaataccattgctgaatagcaagtaggcagaggagacaagggtcaaggtgcagatggcaaacctggcaatgatgtgataagaaatacctagggagggaagagtttccagaaggagggagtggtcagcattgcatactatgtatcctgaagttcataacactgtttatacaatacagtttattcgtgtgctgtcaatctaatactgatgatattaaataattcattagccctcagtgatagtaaatgaatttggattatgacacagttgaggtatttgaactcagagaatagcttaattttttatgaactattagttttagaaggaataatcttatcaagacacaaaagttagatgctttctttttgtaggcatgggattaaaatctgcctattgagatagattcttaatatattcaacacacttgtttcatgacaagtaacctaattctgtgatgggaagatagaggaaagagatgctcttgtgcaagagttcgctgtagatggaaagtgatgtttaagatcgccttgggtttcactaagattaaatttcctctttgaagtggaatgtttcattaattagcttttatttatctcctttagttggaaatctaaccattgtctcgtattttggaaacatttgtgcctcctttgaatatctaaatttaccttggactgttatttttgatgaaaatttgttttggatcactttctaattttcttctaatctctactaacaagcaaaaagaatattttcaaagttctgtaactacaaaatctctactgatgctacaaatttaacagaactttaaacatttaagaatcttttttggcaaactgtgcttgcttttggaagcaataatatgcctattgaaagtctacattaatacacttttattagtgagtattttatactgaaaaggagttctgattgtgttcctgcatgtctgtgtgggaagaatcattctcaacaattctttcgcagaggcattttgaatgttttgtttgcattttgtgcagttcagtagctgattgtttccacagactgagtgtatgctgccagctcttatctattcctcttgggtgttgccatgtcctggagtgctaatccacacttctagatttttctcttgcagtgttttcatatgcacactgtgattctgaaaactgtattttttctcaaatggaaaacttaggaactcatttgttttacatttgttccaacccatattatagtcaggtacgcacaactatattcaacttcaggctttgtatgatacaatctttgagcgaacagagttagttacactcaccgctcttctgcagtgttaatggagtctgatgagttacactcgatgctgtaaatttagatggaagccatggaaaacctctaggtgaaccggagagaaaatagctttcctgggcactcagattctcacctttcctctgaccttctgtttcttcttcttacccactgctataaaaccttggcttatgcaactcttcaaacctacctagacttagactaactcacttgcttattgtgtaattttgtaggtgctcttgggaggaaggaagatatgataagattatgtaattcaatggctttcggttgcaagtggtgggaggagggaatgctggggagcattgaacaggggagactgtatgccagtggtagacatcgttggttcaagtcattggccgacatcagcatatcattaaattatagaggatgtgctcagcttaattcggtaacaaatttcgtaagctgaaaatatttcaatactattattaaacagtagttattatagataattctctcaggcaatctcctttttgaagtgagttattaaagcaaaatactaaatcaacctttcatacttttctagtacattaaaattttaatcctacctatgtgccgaggtaagatccttgtgaggaccacaaacttatgctctcagaagaggagcactctatggagatactgggaattgttctttcagttttaaaattcctaggtgtgctctaattcttcccatcaccactcctccatcaatgtatactttaacattgacatgaatgagaaatgataaaaaccttgagaaacataagctaaatcttttttggtatgagtgctctcttgttttagtaatcttattcacattttcacagttgttctttttgcttttaaactttagaaacgacataaagctgataatgcagtgaacaagaaacaaacgcaaggtaggaattttacatgcttttttctcatatttgtcaaacctacttgtagtatatacaaacacttcaattacatataattcaattgcaaatagtgtgcatctcaagtttttgttttggggtagattgatttttgctttgtggcatttgttaggatgacacttaaactcactttaaagtgatttatagtgataatacttttgaaagccaacattttaaatatatttaagtgcttcatagcaatagtctctcaaatacagtccataaagtctgcagttgttttgacagtgttaaatattataaatttattttgtttgtaatctacagatgttattctagaaaagatgtatagaaaataatcacatgtgatgtcacttgagtgaaaagcattttggaaacactgagttatacatgcagatgacagacactccagaaataaaacaaatacaacccggcctgcttctgtacagtgcatggcattttggcacagctctttttggatggggctcattttgatacagccaaaagcaaaatgatcttcaatacaagcaaattcgccatcatgctctaagattttttttttttaatgcccaggaatgtgagaaacagacatcttagctcatctctgaatgaatttgccccatctgagaatctcatctctgaagttctctgatgtggtgaggataagtgatgtctgccaacattatctggtatttaggaagactatttttatactgctgatatttctatggagtcctgtcaaaattccctgcttctttttcaccacctcccacaataggcattatatgccaatttttaatacatttaaggatgatatatttactaattaataaatttgcaaaatatttactgagagtattttattatggaacatataagaaagtataagacgggaatttcaacttacaacttataaagagcttataacatatttgttgaaataggtacatgtaaaaacatgtaaaagtacaaagagatgatctgtgtggaagatgaaggatttggactacatgatctcaattatcttcggatttttgtggcaaatcatagtttctatgtcaagtgctataaaaattggtaaggagagaaaactgtggtgtatcttgagctagaccttgaattttaggaggacattggatgaacagagaggaatggagaagatatttttatgtgtgggttgagtgggaaaggaggaagaggggtttttcaggaaaataagactgtaggactcctttgctgaaccattattagactgccaggcgcagaaaggagattcacatcagagggaaacaaaatcatgatttaaaaggtaggctgaggttgaattgtatagggtcttgaaggctaagccaaggggattccaatatttcttgtggatattgagtcgctgttgaaggtttatgagccaaaacgagacaggccgaacatgtgggttaaagatggaaggcagaatgaacaggagtaagggactgttagaagcctgggacagagctactccaggagtttagttgtgaagggacaaacacaggaattgaaagggaaaaaatccagacgtttcaagcctggtatttttggcaatatgcagtttttgcatttgttgccgtattgctcagaatattcagtaacagcttttgaaacagaagtacataaatgcttttccaacccataatgtatcttgtagcagagggctcctatgttcagtgactggcaattattgattttcaagccttggctcaagaagttgacatagtacagtagaggtgtggtcaccatagctatgatgattttgggctaccacacaggtgctccacccttctgggtacgtacttacctccaaaaaaaaaattccttgcctaccattcagataaaattttatttcttgactatccatcttggttcatgagtccccttcatagataacaggattggccctatggctaaatatgagaataggcaagtgagaggaaaagcttctataataaatatatataaaactcaattcaaaaatgaaatattagggcttagctataaaagccatttcagtcaacagaatacacttcatatctgtaggtttctcatcctaagattcaaccaattgaagatcaaaaatagaaggaaaaaaaaaaaatgaggccaggcggggcggctcatgcctgtaattccagccctttgggaggctgaggcggatggatcgccagaggtcaggagttcaagcccagcctgaccaacatggcaaaaccccatctctactaaaaatacaaaaattagttgggcgtggtggcaggcgcctgtaatcccagctattcgggaggctgaggtaggagaatcgctcaaacccaggaggcggaggttgcagtgagccaagaccgcgccactgcactccagcctgggtgacagagagagactctatcttaaaaaaaagaaaaacaatgcaacaataaaaaaaaatacaagtttaaaaatatagtataacaactatttacatagctatttacatatttactatttaaattgtattaggtcttataagtaatgtagagatgatttaaagtatatgaaaggacatgcataggttatatgcaaatactgcaccagtttatttaagggacttgagcatccatggatttgtatccatgggaggtcctggaactaatccctcatggatattgaggggggactgtactttctttcagatcttataagtcccatatccaagaaattatggcttttatgttggtagttgaatttgtttcctaagagaatagtatatttttgttttcccctttgctgcctttgagtattggtcttcttggtttggcagttgataggagataacaaaaatgttcgagtaggatactgtttgctgtcagataattcagattgcttaacatgaaagccatctgttattaggccagaatgaaattcaatttgcttttctgaattgaggcagaagtgggtgtataggagtggggagggaggagtatttttgacaggtaattaatttttgatggacatctgaagcatccaactcattttcattttgtcagtgtttgtcaagtccacataatatgtaagagacatttttttctcaatcaaatgttaacccttttatattcacagaggaatgaatattttctctccttatgtgaggcatcagagggtaacactctcattccttagcaacttcagaaatataaacttgtctttttatttccaacattttcaaccgtttaactgaaaactggtgcttattggatgccctgttttcactgataagttaactcaatcagggatcgaattatggagctgagacctaactcagaacctaaaagttgtcaacaccacttctggaaacaagccttgccccagagatatataagctggtttggttgatgattcagtgacctgatgaatataaaattgtgtactgttttccaacaacctagctgcagagagaagacagagtaggttgacgctcagaagtccagggatgtgagtgagtcttgatgagttttatggtccactccacccagagcactgtggctgcttctctttgctccagtgtttttgttgtgtgatggtttgtgcatactagataggaacactacagagggaaggtccaactcttactcagctttgtgttcccaatagctcccagaccaggatcctgtcttagtaggtgctctctgtgtgcatgttaaatgaacgagtaaatgaaccactctccagataaatacttcagtatacataataaaggaagaagaaagactggaaatgaaaagaagccttcctgaaaattcattatctggagtgcgaataagatgaaaagcagtatcttcataacactgtgtcccagactttcacagtcactgataaaatccaaatatggcagaagttcttgccactttatcttctctgtcaaagtcattatattatcatttaacccttgcttcaccttctgtcaatacaatagtttgtctactgatccctttcattactcaaagcactgccctgttcagaatgcgctcattttccttgtatctaaccttactttcatttcctctgatctcttccctcagtatttgaactcacattttggcacagcctcctccatgtgtctacacacacaagaggccatctctcattgttttctctgagatgagttgttctgccaaatatatctttgcagaaatttataaattacaaatttataattgttattctaatatgcacattgaagccagtccccatatgaatttattgtggtgattgagctagtttttattttaactggtaaaaatatgctgtcgttttttatgaaatgccatgatggctagcttgtcaatatttcaagtggaatgacaacttcatctaaaatcacaacatgggggcctgggaaaggatggatggagttcaggtgcaaactaaggtatttgggaaaatttgtaaatgcttcctaatgagtaaatttgctttttaaagccccaggtgtattccctggacgatggtctgtatacattctgcatatgagaatgtgtgggagatagagctgcgatccttagcagcccattgatcaactggtttgatgctatagttaaatgaaggctaaattgtttaatatcgtaccctattttattatgatactaagcattagaataagtaataaagcagttttctgattatttagaaagggtcacatgaaattcttttaaactagacacatagctaaaaataataaatcgactcatattcaccttatcttccttccccagagctacatcaatcagccttttctgaatggagttgagtgagtgacagctgatagccactaacaagactacttccctgcagggcgcatagttgcttatctcccactggaaaccatttcagctttaaagtcctttgtgaaaaaggtgttgagttgatgtggattgaatgtgttgcgggttgttaagcatgaaatgacctactaacaacaaggcggagttcatctggttcaattcatttcagtgctgttcaaagagatgtattatgctaagggacttaaaatagcaacacctttcttgcctgctgaaaaagagagtgttgctccctttttgtctctctggaggtacccccacatctgctctgttcggtagacctgaacatatattctgccacgtgtatgttggcttacctataaatggtttttagaaagtagtgtttcagtgatcctagggacttaaaattaagcatatttatggcctaagtaatttcagacatctataagctttataatattttcagattgtcacaaagatctgagtattatgcaaatactaaaatctaaccattgaactggttagatgtcttcagcagtagctctggatggagaggagatatttgtggggaaagacagctccaggttgtctttcacttttttttttttttttgcacacaaaggagcaaaacccattgaggaaatttgggaagatggttaaagtgagaggactgattttatggctggctttatgactttgctctgtgctttattcgtgtatgtgcatactccactcacattgtcttttatttttaaatttaaaccaggtagtctgctttcatgggaatttttctctctcctgtttttgccaaacccaaataagttatattaacatattttctgggaaaaatgggtgtgattcaaagttagaacatttgttattttacttcagaaagtctttattgaacatctttcttgtgtaggaccctgtgtagaaaatgcaaagagaaatcatacttgtcctacaggaaattataatcttgtcgggaagataagatgcagactgatataattcaaggtaaaaaaaaaaaaaaaattaagggccaaatgagagatgtagggattccaaaatgccatttgaggggttcatgaagtaagagtggaactttggtaagcagatatcagggtagtaactgtgagtgatgcagggtgaaaggactaatatgagcgttactgtggaagtgggaagacatgagatgtactctggaaatagcaaatagtctgttttggccagggcatagaatccatgtcatgaaacaatgagggacagggacagggaggcaagttagggtcatttttcggagtcttttgaaaaccagggtgaggaacttggatggaattctgaaaagtatggataggcttccacttgtgcttttgaaagaatttgacagctgtatggagaggtggcaaggagaggcacagagagattgattttcttattaaggagggggacaggttgtgtcaagtagaagacaaaggaaagcacacagtggatagattcaactggacctggcaatggagagaaacccagtcaaataccaagtgctgccaaatcaaaagaccaggactgagacacccactaaatccagcatttaaaagaagtagccgttgttcatttttcttaactagagagtagtcgtggagctctgaaaactgaagccagatcgcaaggagttgtggaatgactgatgggtgaggcagtggagggagatttttctttcaaggaatttctcaattaagcagaggaaaaagtgagggactcatgactgtgagcaggagaaagggaaagcatttcgagaatagggtattgctggtctttgtgctccgatcacatcgtgccacttatattgatgtttaataagccattggttctcaaatttggcatcagaatcccctggagcatttgttaaaacacagattgctgggactcacacctagagtttctgtaggcctggagtggggccccagagtttcagttttaacctctcagtgacactgctggtgagggggtcgtgcttttaggacaactcatttaaaggttgtataaatgagttgatagaagtagtatcaaccaatttgacatcaatatatgtattattatgtgtattacatgattgaaagaggaatccaggaagtttccattgtcttttgtgtcagtggacactaatggttcagccaagcccctggtggtttaatgtaacctttataggcaagcttatacaagagactcttcctgtgccatgtcagtttgtgccacactgaggcttttgccttaaagttgtctttggaagtaagagtctatatagtgaataaaataatattttaatgttggcatattggctttccttctttgccccagtcaaagccatagtctcagctatactacagtccttgatgacctaaaattcctcttaaatgctgactcagaggaattggagcacactacattttctgtggttttactattcctctatgacaacagtagtgtcattgtctttttggatgacttgcctcttgttacccacttaagaaatgataggctgggtgcggtggctgacgcctgtaatcccagcactttgggaggccaaggcaggcagatcacaaggtcaggagttcaagaccagcctgaccaacatggcgaaaccccatctctactaaaaatacaaaaattagccaggtgtggtggcacgcacctgtaatcccagctactcaggaggctgaggcaggagaattgcttgaacctgagaggtggaggttacagtgagccgagatcgtgccactgcactccaacctgggtgacaaagcgagactctgtctccaaaaaaaaaaaaatgatattattgcccggggagggcaccccggtgacactttcagcagtggccccagtggtagaccattctgattggggtggggtgggtgggaggcgtgcttctctcagagaagctgatgttagagtgtaagtcagcacctgcacctgtgcattatttgattgggtcctgagaaactggccacttcctccagggcctttgaggaatcccgaatgttctctaacagaatgttttcattcaaaaaagaaacctattacaacaaagctgttaccttgtatcctgctgaataaaaacaagttacatttgaggtaattgtttagtctgagctctcccatggcaggactgtcagactaattaagctgttagaaaactataacaggtgtgtttggttggaactggtagaggagttttgcatttaaaacaatgagctgtcaaagcaccataccactagccattctgacaatcctgtcgtaacttattcctactccccttcaccaggcttctttaatcatctcctctaggctcttaacgctttccatatattggaggaatgtcatcttcctaaatgaaggtagggaggaacacagtcacctccttgttgaaatctaatccagttacattgtgactggtttcttgaacacattctaaatgtacaaaattacattggccttggctgtgtaatgtgaggtttacctaattctctactgaaatgaatacattaaaaaaaaaaaaaaacctgtagaatcagaatagcatctctgttacttttggctcaacaaccctaaatgctcatcacaggctgggcattgtttcttgctttctctaaacttaggtttgtgccgggtcagaggaggttgatgatttaaaaatacctagattgctaattcagtcaccagcataatacatgtggtggtgtttattttcattgttctaaggactgggtgtttaagaaccagttctaaaagataacaatgaattataggattgactagtttccttggccagtgttcaagtcttgatttgtatggaaacttttttttatgttgtgagctgatttttaactttatcagagtatactcatctatattccaagaagacactagcctcaagtttgtgtatttcctttcttcatttctgtattctggttttgtatttcaagaacacagtaaatgggggatggggtagaagtacgtcctcatttctagggagcctaccagcactgcagatgcagcaggcccatgcagcaagtgttgaacagcaaggttctgtaatattttcaaagaagcgttactctatttagttaggattccaacccagtgtagggatgtaaaggtaatttatactttcattaatccagaccactacagccttcagaataaatatcaaatactcatcagactgacaaaattcaaggaatggataagtttgtgcttgtctcagtttatagtcagtggaaatttatacattgctggtaaaagtatggagtgctgtagattcttaggtatctggttgtatctgataaaattacaaactcaaatgccccggagtcagcaatgttctctggggcattctctcttacagggtacaatcatgtgaatatatttcattgctgtggtagtagaaaaaaatagaagtcagaatttgcaccagggggagaatagttgaatgctttatgatgcagctgttgtggaaaattgagttgtctcacacagggcaaggacagctctgtgcctatctctaggacacctggaagtgtgatgctgaacactgcctaagacaaggatgagacggactagctggtgatttataatgtgctgtttaaggtttgaaactcccttgtagccacccaagactagcttctctactcagtttaagcatatatagagattgatggcttaactagttttactggctacacagtttgccttggctagtcaactagagggtagaaaagacgccactggaaacttttgcctgggctttcctgaaattcagatttcacatacataccatggagcttcaacacccgtgttgagggtgaaagagaagggatcctggggagccatgcctgtcagtctctcaggcctctgatgcttttctggtctttcattttcctgctgtaccatatcctttgccttgagtaaagtcttctgtgaatacatcctgtgaagtcttgtgtgtccacctaattatccaacccgttgtaattgacacatctgtgccatggagtattttccaaaaatgagttaaatatctctgctattcattaaagtatttatggcatgttgagtggaaaaccaagtggcagagaaattttaaaagggaaagaaaaaacaagaatgtccatgtttgtctagagaaaggtgtgcgaggattcatcagttagtactccttactgtgagaaactggccttgagaagaggaatgtcagcttttaccttgtatacatacctgtcttgctggaaacatgtattgattttgtcatttggtagaaaacattgaatatgtatttaaaagtttcttagatgtgtacatttgggcagtatgccacatttttctaagtatttctccaataatgaattgagagagaacatttgggtggagaggagaatgcactgtttggctggagacaaagattcgcaaaaggtcggttggagaaaggaggtaaataagtttgaatgtggagagaaaactgatcagagcaaggttgagggaaaatgagcacgtacagaagatggaggcgtcaagcagatttgaaggaggacggcagaagtgcagcagatttggaggcggttttccatgtaagtgccactggcttccactatccgttattgagtgaagactctctggcataatctgttggatctgagaagcctgttgtgacacttcccatgtgttaaatggcacccaacaaagtggatcagggctattttttacatgtgaactaacaaacatctgtaaagtcacagcatgttgaggagggctagattaaattacagagctggaaggagtggccctgagctgataccagagaacagtttgtgttagtgcctctgagggttacataaccatttctaactgcttgcactgaaaattggtttagtcacttataaaactgagatgtctattttaagcaaatgttaaaatagttcattggcatctttttctgtagctattttttaattcagttatagttcacataccatataactcaccatgttgaaggatacagttcaggggtgtttagtgcattcacaaggttatgcaccgatcaccacaaccttaattctagaacattttcattaatccaaaaagaaaccctatacatgtaaacagtcagtctttctttcttccttgaatcccttgcaatcactaacctaccttttgtctccatggatttgtctgttcttggcatcttatgtacatgggatcatacaatacgtggccctttgtgtctgggttctttcacttagcatatctccaagattcattcatgtcattgtatccacacttaaattatttttatggcagaataacattccatttaatggctataccacattttgttatccattcatcagttgatagacatgtgggttgtttctaccctttggctattatgaataatgtttcagtgaacattcatatacaagttttgtgtgaacatatgttttccgtttgcttgggtatacacctagtagtagaatttctgggtctgtggtaactgtgcttaactttttgagaaactgccaaagtattttcctatacaactatttattaaatgtcatgtttatgttatttttaacatgagccctactaggtagtggagttgtatcttcagtaaatctataactgttgcaatggttttatatgatcctatgacagataagaatattagtggatccagcattccacccagttagtacttactgagcaccagtgtgtgctgtgtgataacactggaatggtaacagtgagtataatagggaaggtttctcttgtcatggatcttataatctgggggaagagacagcccttaaataatcctgtttaattaagtatacagtaaaactgtgatgctgtgataagtgttctaaaggaaaagtgcacggagctcatttagatttgggggtgaggaggaaggactgggtgtcaacacaatgtcccctgagaaagtgctgttaaagctgagatctacaaggtgtgtgtacaagttaactaggtgaggatggagggaaagagaattctaggcatggaaacatgtgcaaaggatttgagacagcagagagcatggtgcgctcactacagagggcataaggagggtgtgttgggagtgacaagaagtgatgacaggaaagaggcaagagctgcttcataaaaggccttgtagatgttttgatttattttttgagcctagggaagccaactgaagagttctgagcaaggggtgacccaagtttgtgtgtatggactgatacataataatatgtaattataacatttatgtaaaatcatcatagataatccttatagctacactgtagaaactgaatttgaaagagattaagaatgaatgcaggaaactagcctgaggctaatacagacatccagttgggagggggtggttccttgaactaggggtgctgatattggtgatggtggagaagatttttaaaatattggcagattttgagatgctaaaggcataaaatcaacaggaagtttttagtagtaaaaattattccagagtttcaaaggcatttttctgtaagagttttaaaatgggataaacagggaggcatatgagcataataaaactgccaaaaaatcataatgcagcattgttcacaaagagaaattaagttgcatcaaaagcattgctacagaaacaacaaaataaaagttaaaaaaaccatacccaaactaataagtgaagtaacaaaattacaggatgacaaggtcattcattgtacaaaaatttaatgcatttctaaatattgccaatgactggaatatagaataaaaaataaccctcgtgaggttaagaaaaaacataaaatatcaagaattaaatctagtgaaagacccattcacagaaaactacaaaacatatccaagaaaaattaagatgtaaataagtacagaaagatagcttgtccgtgaattggaagacttgagacccaaatcaaattccaggaagatagtgtgttctctggagcttattcatcctgtctaatctgaagtcttaatcttcatgtcaaatatcttgattttagaaatattggacacttatagtttttttttaaaaaaaactaagtattactattgggataattactaatatgagataggatccgaaggaaataagtggcaatacagagctctagacactattgaccagtttttcctaaattaatgcaaacttatagcccactcactctgtcagttgatcttgggtgtagttgatttgaacaggactttaccatctctctttgttaccatctctcttattatattgtagccactgggttacataattaaaggggagctctcatttatttatttatttatttattttaattttattttattttatttttgagacggagtcttgctctgtcacccaggctagagtgcagtggcgtcatcttggctcactgcaacctccccctcgcggggtcaagccattctcctgtctcagcctcccaagtagctgggactacgggtgtgcgccaccatgcctggctaatttttttggtgtttttttagtagagacagggtttcaccatgttggccaggctggtctcgaacgcctgacctcaggtgatccgctcacctcggcctcccaaagtgctgggattacaagcgtgagctactgctcccagccctcatttattctttatgctttgttacaacttattttgaggaacatactgttggactctggcagagacagcacctcttgcttttctaccggaggctgttttgactccgggtcagaaacaccaaacccctactgctccatgagcaacatcgagcaggggatttactcctgggatcagtttgggtgagctctgcaggcattagagtcttgtgtttcaggatccagtgatcaatttaaggtgcctgtgctttagatccttggtccgtaactgtttaagcactgtaaaaattggtactttaacttctgcggttaagatattgtgctggaaatactttatttgagctctctctagcttggaatgattatttttttaaattaatgaagttgattcaccaaaatgcactgtgaggtattcattaatttgttttataagcatctgaatgtcccatataccaaaagtgctgcaagtacaagtaataaaaaaaaaatggctaagacataatgtatgtgttcagggaatttagaaacacagataatattttaatttaaataatttatattgtgaaacactgagttcaaaacatttttgtttttaattaatattaaatttgctgtttaacattttggggattattattgtgatcgctttagagggttcaggcttcatctatcccaacatcaaaagaaactgaatctgtttttgtacctataaattatgcattttgcaaatacttactgagtagctactgtgtgccaggtactgtgctgtttccagggaatataatattaaaacaaatattaaatgcttttccctcatggaatttacatctggataatttgttgatgggccttgacatatttctctccctaagtactaagtgctgtgccggctacctcacatactctcttatcctgttttatttttatttttatttttatttttattttttggtgtttattagcatactcagtgttatagcacagacaacatcacaggaaaaaaaaattatactggataaccctactgatgtgaagcagtagcgaaaccctaagaaatacctaccccccatcataatttaatagtagcctcttcttctgccttttttttttcttttcagaaaaccaaatatagaaaatttggatttttagggccaggcgcggtggctcacgcctgtaatccaagcactttgggaggctgaggcaggcagatcacttgaggtcaggagttcgataccagcctggccaacatgatgaaatgctgtctctactaaaaatacaaaaattagccacacatggtggtgcatgcctgtagtcccagctacctggaagaccgaggcaggagaatggcttgaacctgggaggcggaggttgcagtgagccaagattgtgccattgcactccagcctaggtgacagagtgagactccatctcaaaaaaaaaaaaaaaaaaaagaaaatttgggttgtttttgctttttgtcgctgtttgtttttttgcattaatataaacctaaaggtacaaattctttctctgttggctttatgtgttaaatttttactaaactattagaaatctattattctgtgcttgtgatttttctttttaaacattgctactcttgtagcatctgaaatgtttttaagcttgtcgcttcctttttcacatcatttttgtggctttctcctccagctgagccccatagttcctctatgtgctaaagaaagcccttggtaacaccaatcagatgctctctgttagtgatgttgtgggagctaaaatatacattggttgtttctaatttttgtgtaagtttacatattcttgctatcataattagaattttaacctataaaaattgctactagttattttgactgaagctattcgtttaaaattattatttcatcagaaatggccttttcatagtaaaacatgttgtttaaaatgtcaccttttctctttccagttttgagaaatggtgcttgggaaattgtccactgggaaaaggtatgcactgatttttattttgttccaggagaagaaatacatagcggtgtactctagtatatataattttttgtataatatgagcaaatgtgaagaattttactaatataaaagctatttagtaatataaacatgcatggcatcttcagtcacattcatttaatatttctgctgtattatagaaagacttattttgaaaaatatctagaactttttgtttttttcatagtatattttgagtactgttatcatagattttatttaaccatgaactgttttgtgttgtaattttttgctttactcatctactgtccaagtaaaaataagaattttgagttctgatgttttacttctgcatattttacttccaattcatatagtgagactaattacatttgcttaccactaattcctttaaaacaaaaatcttacaaattaaacattgtcttctaatgaaatcagttctttaacatcaaagattaatttgtttataggacctctaacatggcagttagtaggttaagtcataatttaacaaatgttattcaggtgtttattcttttcagccttcactttcaaaaggtaagcaattattattagttctcccttagttctggaagaaggtttaaaatctagtcatccacaaatgaatagctttggtaacttggtaaaagactttttggagtctgagccacccttcttagggcactttatttcctgggattgccaggacattagaggtgtatctcacaggacagtattttgctaggacaatcgaagtgtaaccaacagtttatttgcactccagtacttcccagctagttgaagtccatgcccttgattctaccttgtcatggtcatcttgtatttctgcaggggatatcttgtaccccccaattaaaaattaattaaatttctgttgattttcaatcagtggctagaatagagactgacatctcctctttcatatagttgaaaatttacccctattttttctttggtttttgacatgagagcaacaaatgggaaaataccttggttgtgttttatttatttctgtgataggaatctctttttcagaagaacaaaataaaaatgctaaaagcaatttcaaaataagtttcttttctactcttttctggcacctatggaattaaacattttagaaagaagacaggtaggatataatcaagtatgataagatgaattttattacaaatattattttacctagggttgtcagtgtagttaacataaatatgcatgctaataaataacctaggctgcttgctcagaaaataaacagaaagtcaggagataataatgtactacttcactctaaacctttaaaatgtcttattttcctaataaacaatcattatttcaagattgtgctaacctacctggattattgtaattcttacttttcctatttttgacagacaaatcaccagccaggattacccataataatagcattttcagtcatctcacaggtcaatggcacacctaacctaggcatcccattttgagataaagaaggacagaatttaaagtgttgccaaaagtcatccagcccaaaagagctgaagttatttaataattagaattatagaagtaattagaatcactaaaagttggttcagtgatgaaatcatgataaatattcaaaaattaacatcattcttaagttggcagtatcaagtttgaaaataaagtgaagaagaggtctcattcccagtggcctatgggaggcctacaagtaaatttaatgtatgtgtatgacctttgtaaagaaagcatccaaactttgatattcaagattcatacaaatttacaagtatgtcatattcccagaaaaattaaaagtgaaatatcacttgttccaaattatgaagtaatataatcccagggaaattattatattttcctcaagaattgactaaatttttcatctgatttgcaaaaataaacagttaagaaagtagaatatattttggaaaaatgaacagtgtgtaaagattacaggtgaaatggaaagcaaaagttattaaaacactgtggtttgcaaaaatagacattgatgagtagaataacatggagcagatttaagtagtatagaataaaatatagtgccctgaaataaggcctgtttaatatttgaaaaaggaggcaaaaattattttttaaagaattgctatcacagattagcagttttaagaaatagcatttgaatatttatatctaagtcacaacctatgctaaaataaatgtcaactgactaaaagagttaaatgttaaaatgttgtttttagaaaacgtacaaatagaataaaggccttaataaatatttgaagaagagcaatatctcaaaatctatggaattagattatataaattttaaaacaaatacacaacaaaaactgccacaaataagtaggcaggctatgtgaaatatttgcaccaaataggacaaatgattaagatcattgttatataaataggaaaacttgacagtaaaccagaaatatgataattgaccagactcagtataatattcaacctaataaaatttgcaaatttaaaccatattgaagtttcatttgctacctattcaataaataaaaacaaacatttcagatttatttttatgaaatattttatttacatactattgtgaacgagcagtttggctatttatattgagaactgtgaaaacgggattctggaaatttatcccaagaaaagaaaaagttggagaatatctccacgtgtataaaaatgtttattgtagcattatttacttataatagcaaaaaactagaacatatggaaatgcaacaatagggacagttttataaattatggcattttatactcatattttgtgacaagtaaaatctgtaatgtcacatggtgtagcaacacagaagaaattatactattcattcgacaagtgtttattgagtgcatatgccaagcagtgagcttaaagcagcaagcaagacaagtaagggttcctgtatcataagatataatcataggtgaaaaaaaatagtactatgtacactgaaatactggctttgtaaatcgtttattgaacaagcgaacaggcacaaaagcagccttacttgttgggataacaagattttgaggcaagtcttttctttgccttatatgatatttagtccaattaaaaataaaatcaataaaccaaaaccaagagtgtcgtctacatgccaaggtaatatgatagaccttagtgtaaatgggctttacttcagggctctttctctgcctttctaaatgtgtggctactgtggttgctctttaatgatcctcaaaggacctacaaatttgcctagcatgcatctaatcattcacagctgggcagacttcagctctcagatattagtggtttatctctccagttactgccctgaaaccttttccctgttgcaaaaggttaacttgcagatacatagttttaaaagaaagtatggtaatcacaaagccctacacaaggaactacattgtgactcctgaacggtaagctgctggcttcattgctcttgccacagattatttctttacaatgaggtgcagctaacactgttcacaggtttttgagatgtatgcaggtggagaatttagccaaagaatcttggaatcaacgtattcttctggcttattaaggaagcatggtgggctgtatgcatgtgtaaaagttactctgtaaagccacttttgtgcatgaagcttccaccacaatatgtatttcttttttcttttcttttttttttttttttttgagatggagtctcgctctgttgcccaggttggaatgcagtggcgcaatctcggctcactgcaacctccacctcctgggttcaaacgtttctcctgcctcagcctcctgagtagctgggattacaggtgcctgccaccatgcccagctaatttttgtattggtagagacagggtttcgccatattggccaggctggtcttgaattcctgacctcaggtgatccgcccgcctcagtctcccaaagtacggggattacaggtgtgagccaccatgcccagctaatagttggatttttaaatcaggctattgcagtctgataatcttactattttacataatccttgatgttgcaaatatgagtgacttcagaaggctgtaggtagtggactgaaagccctaaacatttccttaactttggcattttggggactaaaattgctttatcatgacattcctccaattagaatatgtatgattaaagcatttttgtcatcttgactttttcttctcttggttcctcttatgcacacactaggctggaaggggaatgccgtattaggagctcagaatccaaaaggaaagacaggtgtttggatgtcttttgagaaattgatcttaaacatagacattctaaggagttaagttccctactttccttacagtaaagaactttagcagtcattgatttagcatgctttagtaagaacttcagcatttagtaagcccctggttttcccaggccactggggtaccatataaattgttactattttattgagtttaggaaccacaagcccttcttttgtcttacaatgagtaaagatgttggaaagcagcacaatcaattagggatttgtttaagtctgactgttagactctaacacgatagtgtagaggacgtgattctgattttgtgaagcacacagttgaatttaagaggaaacattaacatacaggagttgattaaagaaaattaaatggtaacctggatgcattctaagtgccatgatttcagagaatttacattttattatctttctcagtgagtgtaatcacagtaccatcacagcacattattttaaggaccagtttacatttatacttgcagtttttaatttttcctctttgcccttttttgaggtagggggtgtttgattccaagatccctggtaatttgccagtttcagctagtccaactttcagatttcagctgaattattttttgaatcaagggacccagaacttaagcatacgtgtcataaataaaaagacaatacccctgccccaaccttttctaacctcttcttttggtaaataatagactgcagtgggctgcctctgcagtaatttcttattatgattcccacaaaagacactattctgttcttaccctcatagtgttattttagagttcaaggaaaagtagggagggggaagaacaaacaggctttaatttagaaagtcttttttttccatctattaagtattgaaattcatgtttagtctcatttgtctactaagaggtcaactttcatgatgtaaagggagcggctaacagtgtaacttggtcaactcagttaagccaagttgttgcttagttactgtgttgtttgccaaaagctatgtgacacatctgtcacttaaatgactgctatcagtttttgaaaatagtatctctttatctttatgccaggctcagaaaaatgctaagaggtagtacaatgaagagattaatttttaatttaaaatacattgatagtttcacaaaattatgcaaaatcaggatttgcagacagtcaaatgtggatttgagtctaagctcttcaactccccatgatcttgagcaaaaatctcagaatctcaaactcattttctttctctccaaatgatgagttataagcaatacttgtttcacaagcgttattgtgaggagcaattatatatgatagcgtctccagttgcattgagattttcttcaataggataaagatttatattggtaaatccctcctttatatttttatgtcagagaggatatgagaagttaaggtgtcaattaagtggatagaatagattgattttatcaagataagttatatatccaatatacaatgttcattttttttaaaggattcctccaaccctggtctcactcctagataattttcttccattttgtgaagataagtggttcttgtttgccgataaccatttttactgtgtattctatgctttttacaatgggttgtatatttgtaactatctttcaatgcagataattaaccaattcccagttttctttcaggtaaatgttggagatatagttataataaaaggcaaagagtatatacctgctgacactgtacttctctcatcaaggtagagatgcctactgatgctcaaacagtgtagaggatggtttctctaccctgcattgaccttgtgatttctccaaggaaataaggaataaacgaagaatttaaaacctctctaataatttttatttaaacatttaaaaaattgattggacttaaagggctttttcatgtttgccatatagaataagtgataggtactatactttatcattcaaatataattaagagtctactctccctctggatctatccagatcttttgtggggatcataactcttttaagatttcctgtcatttattttatataatacatggattgggttctattgatattttttatctttcagtccttgttcgtcataaatccctacagagtttcttgattattatgatggaatggtataaaaaaatggatgaatgattctttttgccattatgccttttgaaatgccatactcttccaacacaaaagtactttgctctttcttttaagttctttcagttacttaatttaaataattttcattttactcatattttaatcatgaattagtagtcagaacatatggcactgttactctttaaagaatgtgactttcaaatggttttaggtttaaaaactataaactagtcctattttaaattaagaaaaattgtttttaatattttagaggttgtttatcatcatttccttggacaggtttatttgtaaatccacatatgaatatggacagtgtccttttttcaaaatttatttaatcaggtcatcatttaaagtgatttgattcatgacaagttagcgaaacttaacaaataaaagtatttatactagatatttatagaagtaagtctacaaccaattaaagtaactgcaggtagttatatttctataattttgtgccatgtacctataggtttttgttttcagaaaaaataatatagatgttttcaaatcaccccctctgttcttagtttcctttgcttataactttatcaggataaatctctaaaactgagtgaagctaaccgtccattcttggcgtcttcagaattagcttgagggagagcttattgtcattgtctcaggttctaggtagtatcaggcactagaaagagctctctttagggagtgaaaagccaggattcttattctgatttggtgattttgaaccaactgcttaatctctcatgccttgatttcacatcttttatattaagatggattaaatgatcaaattccaatattccccaattctttttgtttaaattgataagctttaagagtaccttacagaatggtgtccattcagttttactaagtaaaaatgtgatgaatgtattggacacttggccatctgaatgtttgaagtcttgtgctgcataacaacattttggtcaattacgaaacacatatacaacggtggtcccataagattataatggagcagaaaaattcctattgcacaaatacttagtattgtgttactgtttctttacactattccatacagtaacatgctgtacaggtttgtagcctaggagcaatctgctataccatatggcctatagactataccatctaggtttgtataggtaccctctatgatgctcacacagtgacaaaaatgcctgacaatgcattcctcagaagctacacctgtcattgtcacgtgactgtatataagttcaaaatgatagtaacaccttctaacaatttgggaaagtattgttttcccaattaaactcttagagacataattatagaatgaatcatataggctgaaccgttaaatacaatttttatttttgatgctcaaaaatgtgaagataatcgactatactgccctgaatttgtatttaattttaagttggaaattttcaaaatctttgccgtctgactctatccaacttcagaaactccccagcaagctacttgtatttcttaaactttagaccacttttacagaatttgttttataagcattaaaaacacttactggtggctatgaatttcaatttatcgaaatagtttctgtgtcttaatatggtctccacagcgattaacttcctccaagattatatttttaaaagattatctgattcattgctttttgttattgagtagaattcaaaataaaagctgtgctgctagacatttcaatccaagtagcagagtaccacctttcagtattttttttcctcaaagggttttagcattacttagctcctttgaatctacattaacctcatgaaataggtagtagttgtttaatcatttaactgaaagagaaattttgactttaggtaatgactaagtcagggttggaatactcctaatttactatcttcacactgtccactatcaaaagaagtacatgatgatttttacccgcaagtgagcaaccacttagcagtaagagtaaacaactgtttataatattttaattttcaatttttttaatttttaattactaagagtacatcttctgtgaggtagtttgaaattaaagcatgaacatggttgaaagttactgtgtttcgtaggctttcattttgaaatgaaacagattttagcatttaataaataatgaatacatttatgtgttaagaaagtataaagtagggtaaaataactcaagctgttaattcaagtccatattctccgcatgtctatttcataccctctctgaaaaaatttctctggattcaaaggcttacccttccaaaacaatgcattctctagacttcattaattgctaagtaactcaaaaggctacagttatgccttctgacttcctaaggcataactgcaaagcttcctaaggcataatgcaaagctgacttctttgcagctttgcattaaagttagtaagatatttattcaattaactttaaaaatattttggagtcagaacatttttaatagtttttttttaagtggggcagggactagtatactttttttttcaagaccctatcacaaccctaaaaaataattttcattattattttcttccttttttggtacaagtggacatacagtagatggcatgaggttgagaaatttgagaaagaaaaatctagactataatgtagttctctataaaatatgctttaatttgataagcttatgagtaaacttttaaaaattaagttttcacactaaaactttaaattgggctaaaaagcaaataaataaccctcaaatattaaatgttttcttatgccttcagacctgatcaaaataagttttgaaaaaaattggcattagatgtttttattaacatgtattattttctataataatttcgaactttctgtctcttttgtccatttgtttgttttttttcctctgttcatttttttttttggccattttaattattttatactgggacgtgtaggtggcagtaggggagatagtgaaagtgaccaatggggaacatctcccagcagatctcatcagtctgtcctcaaggttagaaccactgagtcgtataggatgcgtgtatgtgggtcctcaccgtaaaccggagaacagttgcacccaaatatggttgagttctgtgtctcttcctttaaaacacaaactttttatactgcttggtgatggacatttcacagatgttttaaagggatttttgaatactatgttgactgatgcttgtccttcagctgggcaaattgaactcctgttgttatcaataggagtctaagaggcatgacagtaaaggtagattttaatttcctgtgcaccattaatatatattcgtatttaataacatgcctaagtactaaggcttaatttattatctctccgggatattattttgaataatgttaagcttttcatgaaacagtcattgaaaattgattagattataaacatgtcttattcttgtattttaaatttttctgtaagttctgtaaaatccttccagcgattgtgactataatttgggctcatagggtttatagaggaccccctgcacaaagctggatgttgcacattttgtaccgcatgctttgggatcgacttttatcccacttgtatctagtgacaaagtgcacgttactgtgatcaatttcagctgtctactagtgactgtattgtgatatgcatcttgtttcatttttcacttactaatcaaaaagcctgctttgcctctcttgactagtttgtgttttagatgtcatcataatttgctgaaatatttatgatctagcatgattccttatctgagacttcttgctgccttttcacagcactattaagaattgcttcagtaactgctgtcctaagtgattgttgagaatgttctgaatttcgatgcttattttattaccccaacttcaaatagaacttagccatttgaacttcctaacttcctagccatttaaagacctagataagttactttatgcaaaaaaaaaaagtagaattagaatattattctaattgtcagaatatggaatcaacattgtcatttagtattttctttgtcatcgtgcttctatattatcaggtgtgttttataaattcataaactatgtttcaaatgtatacataagtaaattacaaatttcgagcaatttccagagccaaattgctattgtgacagtgattttaaaaataaaattttgaataagttatagagtgaaaatataaatattgaaggacttaattttggggaaaagtagcagcttttacgaaagaaagctcatagggtaaattgaagaacctgcagagctactttaaaatgaatcagtaaaatatttttgattaatgtctatgtgtttaagcaattttcacaaatcttcgggccacaaaattaagctacatgcccatttctgaaactaggaatagtctgttttgcacatgtacaagttggaagttgattagaaaattccaggtgtttgtaatttgtaaatttttttctttctagctttgagtacacatgcttataagagattacatttataatacttatgtgatattagtaaattaagcctattatataaccaagcattaattagattagaatgcttttctttagaattaaggatcagattatacagttgggctacaaacttagatgtctgtagttgctgggcaagtcaaatcagcatgtgaaagggaaagataagacagtctgggctgtggtggtgtgataaaactggagaacatggaccccttaggccagccgccacacaccagattttactaagacacactggtggggaacccatgaagtgcatcttctaggtcaaggagcaatatggcctagctgactgattttagttttagtttttaccgctgtgagaatctctcaagcaactttaataggagagcaggagtggaaaacatagagggagaaagctatatatccgctttcattgtaaaatttgttcatattactttttttaaataaccttaaatttaaatattatggtttatgtgatcctattcatcatagctaaaagggtagtaaatgcaggtttgtagaactagcaatctggaattttctcatcaaccactttcttaaccaatttacatgcgtgccatgagcatgaaatctcatgtggtgtttttgagctaaagataaatccggacacaaaactgctttacatttcagatacagtctgtgttgtgtctatgtggatgaacaatttaaatataatgtgcaaatctattcatttgcattatcttgaagaccattactgattgttgtcaggaaattgcttttgggtccttctggctgaaaagctaatccgtgagttgtcatgcatgggttctgcctcacagcatcttgctgttagaatgaaaatcatcaagaagctaagtaactattactttgtctagaacgaaaggctttagtgagtctgagcatttaaataagttattattatgcttttcttcccgcactaaatctttgtgcttctcaactccaaactacagtgagccccaagccatgtgctacattgaaacatccaacttagatggtgaaacaaacttgaaaattagacaggtaagatctgatacaagtatatgtataatcactgctattttattacatggaattaagagcttctttctttgtgttattgtcttgaactaatctgtcctattgcaaatatgttcccatggaaccacaacaaagaggttttataaactggtattgttaagtattatggaagattctgatgtatttgtctggttaaatatgatctatcttatagatatatttgtaatatttttaattatgtaatagctaacactcagataatagtagttctaagtgctttgatatgttttaacttcttcctattcacctggttcaaattataatttgactttgccatgttaaaaagctgtacaagggccgggcgcggtggctcacgcctgtaatcccagcactttgagaggctgaggcaggtgaatcacaaggtcaggagatcgagaccatcctggctaacacggtgaaaccctgtctctactaaaaaagtacaaaaaattagccgggcatggtggcgggcgcctgtagtaccagctactcgggaggctgaggcaggagaagggcgtgaacccgggaggcggagcttgcagtgagccaagaatgcgccactgcactccagcctgggcgacagagcgagactctgtctcaaaaaaaaaaaaagctgtacaaggatgggcacagtggctcacacatgtaatcacactttgggaggccgaggcaggtggatcacgaggtcaggagttcaagaccagcctgaccaacatggtgaaaccctgtctctactaaaaatacaacaagtagtcggacatggtggcatgtgcctgtaatcccagctactcaggaggccaaggcaggagaatcgcttgaacccgagaggcggaggttgtagtgagccgagatcatgccactgcactccagcctgggtgacagagtgacactccgtctcaaaaaaaaaaaaaaagaaaagaaaagaagctgtacaacaagctcccacaacacaagtttactacataagctccattgtacacccctgaacctaaaattaaagttttttaaaaagccgtactttctattgccattcaaaaactctcactcatcttactcatcttggggaatagtttacatttctatatttacttttcatatcgtgtcaagcaaaaataactgtaaagtttttaaagttttaagagggactttaaaaatgtatgcctttggtttctagatgaatgatgaaaatgacatttgggagggttgggatgtgttggaactagatcatcacagagggcctggacccagactgccactgtgtgaggggccctgctcagtgacagctgcttctggttggccagagggaaaacctgttttggagtttcccttctctggaataaaaaaagagaaacaaagctatgttctttgaacacagattccatccattttcatcttgtttagattctgaagacagactcagactgtatagtgctaaatattacttttattttcacaagcaaatggttctttggggactgacttcaaattatctttgtagactagcttatagtctcctaaatatatttaagaactctcataaaggtgccctattcttgcgctaaaaacctgtgctcaagtcagggaggaaggtgtctcttaattatgatttgacagagtagaggagaattgcttataaaaataatgggatcttttagatcttaagacttggatgaattcaaaattcctcctctttgcccagatacaacttatttaatatactttttgcttatttaaaaattccaaacagggcttaccagcaacatcagatatcaaagacgttgacagtttgatgaggatttctggcagaattgagtgtgaaagtccaaacagacatctctacgattttgttggaaacataaggcttgatggacatgggtatgtaaaatccgtctttataaaaacacagaatccactgtgtcatagagtattgctgtgtcttctaagtctggatacatattatcttcttgtgtgctaagtttgagtcctcaaaaccctttttaaagcatttttattctgccctgagtccttctgtgaagatgttgaatcttatccattcatgtagtatagctgatgacttcccagagttcctgccaatctggctggaggatattttcagagatattcccagcttctggcacattgtttcgtgggtaaacaatgggagtaagaattacctgtggcttattctattctttggccaaatactcgtgttataggcttaactattcaatctgcatggcctgggtcctttcctgtgatcttgagatgcttcaaggagttcagactctaccttcaaggggtctattgtactggataatttattgtctcctccatgaaatttcaaatgttctttctagcctgtggtattaattatagtcatctcatctctttttgttacctgcttcctgcctctcttgtttcttctcttctaccccttccctcattcattcaaccagtacatattaagcacccagtaagccaagccagttaaggtgttaaggaggcaacagtgaacaaagcagataaatattcctggccttaagccttggtctgttcaggctgttgtaacaaaatatcttagactgggtaatttatgaattacagtaatttattgctcacagttctggaaactggggagtccgaaatcaaggcactagaagattcagtgtctgctggggcctgtttctcatagatgtcatctagtatgtgtcttcacatggcggaggctctcggacctcttttgtaagggcatgaattccattcccaaagtccccaccttctgatacaccgctttgggaattcagtttcaacatgtgaattttggggagacacaaactttcagaccatagcaccttgtgagcttactttcttgcagtaaggtaatggcaaacatacaaacaataagatgataaataagaagtttatactatgttagaaagtgataaatgctttgggaaaacaaatagcacagaataaggaagattgggtgtctttggaagggaacaactttttgttagggtggtcacagttagcctcattgaaaaggtaacatttgagcaatgatgagtgggaggtgaggacatttgccttttgaatatctggagggagataattccagatggaaggagtagtcagtgtaaattattagttctgtcattacatgatcttcaagtggaaaagtgcctggaataattgtggaatgttagggcagtgtggttggagtgctatgatcaatgaagagagtaatagaagaagggcctagagaaaatagagggccagatcctatgggctttgtaggccattgtgaggatgttactctgagtgaaatgggaattcactggaggattttgaggaagaaaggtcagcagttcagttttggactttataagtttggtccaaacagagatgtccaggaggctgttgaatatatatctgaagtttgggacagaagtctgggttcatgagatatgtttggaagtaagtggcatagatatttaaagccatgaggatggaagaaataactgagaatgaaagggtatagacagaaaactgaagagacccaagagctatcctgagaccctccaacgttatgttgggaaaggcaaaggcactagtgaaagagatggagaccaagtttataggatggtaaccaagagagagtgaagaaactgtaccaaagcagggggaccaaaactgagtctgacattgctgatggtcaagtacaatgagactgaccactaacatatttacgtttggcaagtggagatcattgaaattgattagaacaggtgcctgacgatagtgagtttgagaaaatggaagaagagttgaaaatagcaagtatagacttctttttcaaagagttttgttgcaaagagagcaaagaaatgaggcagaaactggcagaaaaggtgaagtctttcctgcttcccttctcccctcttttctcctcctccattcccttctttccctgcttcccctactttatggtataccttatctcccaggcattgtagtggccaactaaatgttggctaaatatactagttgaactcagcagcctgagagaatgtttttggtgttttcattattttgtaattgcattattagagtgtttgaattctaaaggacatttgaagtataccctgaactgtcatcctcattcagatcctccaaaagctttcctgtaatccgtgaagtaattatatgttgttctaaaattttcacagagtgatcgttccatgaacatctggttaaagactaatgatagatttggccatttataccagtattgtttctatagtctgacattcctaactggccagcttccatgtcttaacagttttctgtcaaattgttgctgagcaaatctatgctgtgaaggagaaactttgtatgatggtgccaagattcaaggtacaaagagaatttatataatatgctgtatttcatgtgaaagatagattttcaagacctttgtatctgtggcacttttggggtttacagtgattacccaaagctcttggagaccctttggaatgagtatactttgttgcttttaaggatgagggtcatagtctaatgccagaagccttggaacaccagctatgatgaaaactaactaattcttcttgagtccttgtaattgaaaagtggtatgttttgcttttgaagagtttgtgtctaattccggtcaatccacaccaccactgctgaggtgacagttgccatattataccccattggctgggtaaggaacagttgtcacacgtgtgtcccagagcatagtgcagcttcccaagaagttattggaaacccactttaggcccaaggcccctttcaactctgaaatgcacccttaatcttgagatatataccagaggggtttccttccagacaggtcctaaaggcatgctattgtacataaagaatgagagttgcaattgctttgttctttctctaaattggaatacagtatttcctaaggattcattcaagtgcaattgttacctacgcatcgggattgattttacctgtgtcagaatttgtgtagttcctgaatgtccaaggcccaagctgctactagccttccaagcctactgggccagagcagctcaccagaaatgaagacctcagcctcgctttgcctccacttacaaagaagttctgtgttgtctgtcgacttttcttgtggaattgtttccttctttttccagaatttttaaatatatttttctttatatttgaccttttttctcttattaaaatgaagacttggtagtagtaatccatgacccattaaaatttatgtattacattttcctcaagaactctagtattgtggtggctttgttccttcttatgtccctgtgtgagttgtatcacccagtaacctaccatagtgggtagccttgtgaaaaatccacaaaaataccaactgggaccttattcatgaaaaatgtgtcttaaatgataaggaatgaacagctccaaaatgcttactattcattggaaatttattcacaattcttgggaaaccaatcttcaaatactataaaaatgaatgttctagaggttttaagtacagggacttgtctgtagggggtcagggctggcaatgcaaataagtggtgagatctgtgtatttatcttaggaatttttttgcacctttattatgtacaaagctatttttaatttgggtggggggggagagagagtgtgtggggggtgggtgtgtgtggtgtgtgtgtgtgttgaggctgaggtgagtagacagattccttatccccatcacttcctaacacttttagaaatctaaatggacttatttaggaaaagttataaatagttgtgtaaattagcctctgaattccaaaacattacctattattttggttaatgtattagcttgctcaggctgccctaacaaaacaccatagactaggtggctttaatgatggaaatttatttttctcacatttccaaaggctaaacatctgagatcagagtacctgcatgattgggttctggtgagggtcatcttcctggctggcaaaaggccccttcttgctgtgtcctcacaaggacaagagtaaactcctcgagtgtctttttataagggcattaatcccttcatgaggacccaaccctcatgacctcttctaaatcacattagctcccgaagggtcatttccaaatgccattacattggtggtaagaacttcaacatgtgaatagtggagggacagagtgcagtccataccagatagtgaagttacagaaaatgactggttggtgttaaggaaaagcaatgtaaatacttgtgtcgttgctgtttaagaaaattatttgtactggggggaaattactttccagaaataaatatgagaagggttattttaataatgggtacttttgtaactatatggtaactagagttcttaagcattttagaaaatactgtttctaatgtcaacgtaatctgtcctagcaccgttccactgggagcagatcagattcttcttcgaggagctcagttgagaaatacacagtgggttcatggaatagttgtctacactggacatgacaccaagctgatgcaggtgaaatttttctctatgaaaccttttggacctaaggcttttgtgagtgtatgatttacagatctcagtgcagtggtcccaaacataggagaccatctgtcacagactcctgatccaaccctatatgttcagaatctggtactcctgtgagtgggaccttgaaattacctccctataagaatggcttgggctgggcgcggtggctcacgcctgtaatcccagcactttgggaggccaaggcgggcggatcacaaggtcaggagatcaagatcatgctggctaacacggtgaaagcccgtctctactgaaaatacaaaaaattagccgggcgtggtagtggacacctgtaatcccagctactcgggaggctgaggcaggagaatggcgtgaatccaggaggcggagcttgcagtgagccgagatcgcgccactgtactccagcctgggcaacagagcaagactccgtctcaaaaaaaaaataaaaaaagaatggctaactgcacacgggaatactggaaggttcaccagggattatgcatgaactctcaagaattttgtgtatgggtctatggcagcatttactaactattatagtgattattacaagtcgtccatgtcatgataagtgatctgcattaaaacatttgtcttgtaattttaatgcaatagtcaactttttaaatttctatcttttaataaaattttttagaaatttgaatcaaatgaccatttttcatagcatttatatgtaaggctatttttgccatcagctttaattcttgcattgatcttcacacctgcctacagttgctccgtccctgtgttataccatcaatattcaatagtcagatgggtgtggaaaacagttttaagaaactaaatgaaaatctgctctcagagctaatacctttgtaccttgtacaggcatgaaggtattatcaataggcaagcgagattgctgttagtgattccaccactagccattttataaattctataaatcttcatttcatattcattctgacatttaattttctgttctatggattttttggttagcacaggtctacataaccatttgaatcatcaaatacaactgaggcaacttgcctctgttattctttatagccaggactacttaaattgttgctgcgttcagtaaaacaattgctaaatgccaccagaaatttgaaagccggagatcctttaaatgttgccttcctatgttcaaatttccaggtgcctgtttgcgggagcatgggctgccttgtctgcctgtcttcctgaacggaaacactaaatgtttctagactaccctgtttgcttacatagccaagtaatgcattattcatcttacctgccacaatgcaaaagctatttttgcaaagggaatgtaatttcgttctcttctttcttatagtttacttcctagaaaaaggcctgggtggtgtagtggccttgaaaaaaaggtggttaaccattggcaccttattacatttgtcatgggtttcacataattttcacgtatccacccacatctagatactgagttgtgactttgtcatcctcaacagaatactaagtatagattgctaaatcattggtgtacattttttattactcatcttgtttctttttacagaattcaacaagtccaccacttaagctctcaaatgtggaacggattacaaatgtacaaattttgattttattttgtatcttaattgccatgtctcttgtctgttctgtgggctcagccatttggaatcgaaggcattctggaaaagactggtatctcaatctaaactgtaagcaataaagtgcttactgcacttttttagattaagacatgtatttgtttcacaattgatcttgatttactttatttcgtattgtttctaaaaagaccttgttgccaagatagctggacatttgatctttatttttcagtgagatttctagcaagtgtaagtaaaatttgggaatcctaaaatttcagaatccttaaaaacataatgagcactctatagtggtataaaatgttcactaagtatagtcatttattatatatatcaacgaaaactattccttaaaaatatttttaacataggtggttaactatatggtaaagaaagtagattgaccatgtgtggatataacaaaacatatatatttaaatatatattgtatgtatttataaatatataaaatattttaaatatatttaaataatataaatatttaaatatattttatcttaaataaaatatactttgtttatattttatttaaataaaagtaccaaaaagtggtttatatggtttaaaaatgtttaaacccaatgtattttcatttgaactcagtaatgtggtaagtcctatattaaatgttatcttagagaaggtgctagtaaatagttttcctttagagcatttatccttttattattgtgatattaatgtaccacccctggatatttctgtcaaatgagtttacattttcatttcatgagtacttagccaataaagacttaacttccaaaagtgtgaaagcaaattctagtacaatcacatagcaaaaactggtatttttaaattttttttattatattgatttatctttgcagcaattccaagttgtttttatagttactgatttattatttcagtatcagaactgttactaccatcagtctgtttctttgtatactttataattgtatctggtatagcagttttattttcattttgaggaagaagagtataatgtacctaggagaataatttacctaggactgaatattactcatatagtttggattgtttttgctgctgctgtcttgtttgcttttaaagtatgctttaaattggaaatactcttaagaatttatataaaagtgattctacccaattgagattttatatttataaaccctcagtgctatccctgatgtctctaaactttgtgtttggaagagggtttgcaatatttgacagtcctttcactgtcttagtacttttatacagctcttacctggattaacaacatattgaacacaatgcaattctatcttgaaggatgtacttgagaattaggatagattatcagcaaagtgttcctcccaaattatcaaataagctgcgtagtatggaaaacttgtattatgctaatttggggtcaatgcaaataaaatataaaactgtaaatgacgttcttcctgcctctcccaacagatggtggcgctagtaattttggactgaatttcttgaccttcatcatccttttcaacaatctcattcctatcagcttattggttacattagaagttgtgaaatttacccaggcatacttcataaattgggtaaatatgaattatgattgttatcaccctacaaaataattttgtccttaggatattttgatatctcaggagaaaaaaggttttaattatatctaccgtttcttgaccacagtatcagatttttgaacctaatttgttgcaaagttcctcatctcagaatcacacaagtttacaggccagacattgtagggaaaatgggtctctagttcaggaaacctatggtggtcgtgggagatggagaaccatgagtttggagttaagtgtctgaattatggttctagtattataatttactaggtgtatcaactttctcaagtcacttattttgaaacttattttcttgaacacaatcatagggataatatgccttacctacatcttacagtggttttatggactaaggaatctcttgacatagcaaagagctttgaaaataatcaatcactatacaaataatactgtaattcttactgatatcaaccagattatcatgttatatcatgttattttctacactgtaaacaattttagcttcacttgaatttttcttcataatttttctcttgaatattgttaaatattagaaaaatgttggacatctactttctaaatgtttttaaatgtcttagttttatttttattaaagttaaaattaatgaatttatctaaattaaatctgtgggcctaatctgccagaaaatttaatttttcttttattttgagaaactttgtgttatttttgatgtttctttctttttcaatcattgtaaagtctttcaatatgaacaatattagggtttcgaaaaatatgacatacttttgtaactgctcattatcttcttgtagcgaattatctacctaaactgtcaatctcttaattcattggtaagaaatcagtgtgatttagaaatctaaaatgagctgcaggtgtagctcacttcatgcaggagatatatggctgaaaaattacgtaataggatatgtacaaatataagtaagacttattgaagtttcttatagcaataatagggtaactcattgtgagaatcacataagtaagctagataatcactttgttgttttgattttcaaaaataatatctttcaaagaattatataattttagtattggatgaacccagcaggcttatgctttcaaccacctttctaatatacagagattttataacatctgacagatagaacactgactttccagccttcttttacaaagcaactttcttgtgtgaaaatgagattataactgtcttcctttgattctggttcttcccaatggatctattaagaaaatgcttaatcttgtttctgaatgatagtcttgcaaaatatctgaactcagctatcatgccaattctatcctatcttttcctttctaattaaacattccccgccttctgttgtccttcagttcatgtgatttccagattaatctctattctgatcactttctcttctgaacaaaggcccagttggttaatctctctcttaacacatggcacataaaactcaataacctatttcagaagtgatgttgatcagttcagaatacagacatgggagagatgggctttgaattttgaccttttcatttgacatgaaaatttgtgaactacaaccctgatttgttaataaaatagtctaatatagaaaatgttaatttcataggataatatagtcaagtctcatgattactggacacaaggcaagtacaaataagtaaaaaactatgctctttttttttttttttttttttttttttttttgagacggcgtcttgctctgtcgcccaggctggagtgcagtggcgcgatctaggctcactgcgagctttgccacccgggttcacgccattctcctgcctcagcctccaccgtagctgggactgcaggtgcctgccaccactcccggctgatttttttgtatttttttttagtagagacggggtttcaccgtgttagccaggatggtctcgatttcctgacctcgtgatccgcccatcttggcctcccaaagtgctgggattataggcgtgacatttttatcttttgagaagtgcattttgtttttctttcttggcccagaaagtaaaaccagatagaatctcttgggtactttttccaggggtttgaagacctaattatttgagcagttcttagttgctgagttctagctcacattactaaatacctgccttgtgtcggacacagtaggaagcactttgtgtggtatcttttaatccttataataggtcatttatatagaaaatggtggaatgatagtaaacctagattgcatgattcatagacaggctctaactaccatactgttctgcccttactgtggaatatagtagtctgtattgaatacttttcagaaaaatcgaattaaatggtataggaataacaggaaattagtgcctacatatagttcatcaaacagtgacttattgaagtacgaatatactaattgttttcttttaaagtttcacccaattccttattaccagttgtgttcaatgatttacttaattttattaaaggatcttgacatgcactatgaacccacagacactgctgctatggctcgaacatctaatctgaatgaggaacttggccaggtaaactcaatttattgttgattatgtgtggaattaaaaagttagatttggtgtggtatctgccatatatgataactgcagatgaatggacagcttttaattttccactatttgaataatatatttgttagtgcatgatgaacaattctcatttttaataaatcagtttttaaaaacactgtctcaaggagattttgctctcaaggtaaagcactccaagagcttcgagatgtcccttggtatatagtcaagctagtatgcaacatattggctattttcaagttataaacgtagttttagaattgttcatacctttcagccaggaagggaggaaaagttcatcaacgaagctatgtgagtctagtcaataggaatgttagatttataattcatactatattcacatatgtgtatatttgtaatccattaacatattctaggtttttcttttttgtattgttgccatattccaacttatgctttacaaatagcatctagtccagaattattcttatttcttaccagttcagatgttgcatgaagttaattgcgcaagctgttacaaattctacaattgcctgttgcattgagaaatgctgatagctgtttcagtgctctgtaaatgttaagtagtggtagtggcactttctagtggaaattcagaccatactaaggcatatgtctatatagttttctagtatggtgatagtctttaatattcatatgtgaaaagattcatttgtaaaatactttttaaaaagctgaatatattccttgataaatgggcagaaaatagttccttagtaatattcattgtgcccctgcaatgttaataaaaagcatgaggggtttctctgtaaaagagtggcataaagactttcaaaatattaatgagaaattttaaacttttttaggttaaatacatattttctgacaaaactggtactctgacatgcaatgtaatgcagtttaagaagtgcaccatagcgggagttgcttatgggtgagttttttcctttaattaggatatgaaatacatgcttaattagtgctaacagtttggtacatttgggagttcttattaggggagggtatggggttgtttggttttttttagtctgaaaagcagctgttataattttaggacacatgtatatttcgcgtttctagtttagcattgttttcatttgggatgacatgaggtgggtgctctgcccaatggtattttcagtgtttagtgttgctgaaagtctctctcttgccctggtaataaggaacaaatatatttccttttacactactataaactggagtatagcttggatctggtaaggacagataatcaggccttgagcagttttcaagttaaaatagtgacagttaccccttttgatactttttttttcttctatcatctctcctttttgcagtcatagagcaatctaaaattctgatgatggaaaggaggtagagacatgaaactcttgaatctggaggataattaatatcatcagaaacttttatcaggctgttaatttctttagaattgcttgttgagcacccatttaatttatttcttacttccaggtatgcttacaagctgttccatagccttctctttaaaatattttatagggtaatgtgagaaaattaatttctacatttcctagaaaagacatcaaaaggtgaaacactctcctggctggttgacattggcctattgtcaaacttgccaattatccttatctacctagaagtgagactagtaaatatcagcctcctactcatacaagcatggacacttgcttctaggttttctggcttgcacccactcttccccactcactctgagcagtaagccagtgacaaagagtgttacattttgaaatgccttagttaaaattataaataagtaaacatttcatgaaaaatcccaaaagtatatggttattcctagatatccttgttctttgcgttacgagagcatgactaaaaatgactataaactatatgtataaacgaggttaaaaaggcagttgagtggctttttcacactgtaaagacagcctgttgatttaagaagcatacttactgcttcccgggctggatgctgtttttcatctttcttctttatctgaagatgttctaatttccttagatgtaagaggctcacctgcctcctccaccctcctcccaacaaattgctactggagcaggagagttgcagccacactttttgacatcttgtacttatatattctacccacaatcatcccagaggagaaaagtaaagcctattgcaattctagagttctcagatttatgatgatttttttacacaaattctgtattcattcataactagtatttccacaatggcctgtttaataattggcattgttttttactttgtgtgattttataattcaataagcaggttcatcaaattagtaattattgattgtgaaattttcagaacagaaagctaaaatcagatctagcctctgttttcttccgcattttatcaggttttttcttattcttggaagaggtccttaaacactcctaggcagtagttctaaagagcagtgcccatctgtgtctgttgacaatgtcatcattaacaactgttatagggtgggtctgagctcagtattgtcatcattgagattaaattgccagtgaagtgaatttcttcctgaggaaataatatttcttaatcctgagatacagtcagaagccatgagttctggctttgtctagaatttaccatgtaatcctagaaaatctattttcagatattccctactctttaagatgtggatagtgagaccaaaccatttctaaagtccttttccagatacgaaatctaacataatgtttagaaataaacagaagtttatttgtttgcaaattttaactgtataagccgaaatctgtttcctttttagttatggtatcatattttcaaggataccagaagccatgtagagtaaagctagttaaactgcttccagtgatcatgtttgtgtatgtgcttttaggcatccttaaccttgagtttttatcagtgttccctcccaaacacatcctggtggattattggactgttagcatcgtagagagttgttgatgtctgaaagttttggagaaaccgtgacttctgacttgaccacatgtttacagcagggaaaataacactgttacttaattacagccagtctccatggttagatgtgaaggggtgagagagagtaattactgtctagcacttttctgtgtagatttcctctgggcactcttggattatgggaatccagatgggggaaatgacctggctttgctatcttattttccccagagcagcatttaacaattgcttaatatgggaactattatgtatgagcacttttaaccccagtggaagaaagcaaggtgtttatgcccctagggaggtggcaaaaccagagagtaacacaaaatttcatatcctgacaaaagcctttggtgttacaagtgcagagctgattttgcctcagtgttgccaaaacatcaggtacagctcagtttcaccccagatagggttcaagtgagttctgttgtgtcttatcagaagaataaggcttgaagtttcctgatagtataattcctagctagttctgggtattccatgtttgtaagaaaattataattaacacttaaaaccgtgcatcagaatttaattttaataaattttctttgatttccctgaaccttcgccccaaattggattcatgatgggcaataaaatagatttgtacatagttgccaatgatgattatcttgtagaaatcaacttttagttaggaatgcactgcaaaattattagattatttcattagatctttttatgggacaattacagtaaaatgtaagtgaattgtgatatcatttgtaaatttaacttatgacaaaccagacattttactgtaaacattagttattaaagtatcatttcagctaattgcttcttgtagggaataagtcagttttataatagttacttgaatacccggaataggtaagcagtttctctgttcaggggccacaaatctcaatagagtgaagattctgggatacagtcctaagtgccatctttgtaaaaaaaaaaaaaaaaaatttagaccttttagaataagttggatgaggcttaacaagatacagtctataaaaagaaattctgttaagcaaacaaaatgcttttttgtgtggacaaggcatttaattcgtattaaaaacatcatttgcattttccctttaaatgaaaaataagtttttaaaagcaatctttatatatgaatatactgtgtgaataactttacttgacagtatttggtttagctatatatttgctggaaggatcggctacttctttaaccccaagaagagactcaccacgagaaatttcacgattatcataatactatcccccaagatcttgctacagccatgtttatcttactgctcaccatgacttgtgataaattctagtcaactccattcatttatttatctgtatatctcaagtgttgatgtatgtgacactttgatagataatgcaggtaaaaaaggcaaaagttcacatgatttcctcctgcctaaagtgtatagtctaattggcacttagtggatgctaattaagtaatcatacagacaaatataaagtcctaacacagtatagaggtctatgtgaggctataatgggtggtttgatctaaacagggaaggcaaggaaatatgccctaagaaagtgattctggagttgagatctaagaatgaatttgattaagtgaagaacttaccaggtagatgttatagcactggcacatacaaaggcaaaaagccagataccacgtagacaccagagcttctggagcagcaataacagggaaacttgcatataggatcagtggcaggtttgcaggccacctactgctcatcgggctctaggtagtgctcagcattcttccagggctgcgccagagttgtgaagagggtctctggcacttgagctctggagcttttaagctgcatgacttgggaaactttatcccctgtcctggtatgagattggggctagtgcagcttggcaggaccatgcacagtgttgcttggttagtaccaggcccttccctggcacagtccatgggctagggtccaagccttgaggctgatctgaagtgattgctttaaacatggagttgcagccagtttccacagagctttgcagcatgccaactccttttcttggagtccagcccacaaagggcttgattagcccttcttcttaagcaggcacaaaagccctttggtaggagagagaatagtgagttaaaagggaccacctccattgtgattggagtgatatagtggatactgcactggaagcaaattaatgttttggtagtggaagaggtgccttggaatgatgaagtccctgccttggctgggttgatgaaagattgaacttttaggaagtgaaaggatcccatgagtttttaacaaagtttattgtatattcgtcaaaaataacagtgacttttcatttgtactgaactctgcattttaaaactccatgtctaataaatttacaggaaaagtatatgattatattatgaaagaaatggaaaataaaaaaatctggtctgtcatgtattatgggccccttccaattgaatacatgactggctgaaatgaagtacatctatcagactttcctagtgttcagatgagcgaatggatgaaattaaagaagatattaatgaatatgtttcctgtttgaaataaagagtgttttaatgagtgaaatagtttaagtgaaaattttttaatatcatttaaattcttaaactaaggttccatttaattatagaaatgcaggtaacttttactttaatgtacctgttgaagtaaccatcatctcgtggtagccaaagttacttctaaaatgtatttgacaaattttattagtgtgataatttgtttcaagatattagcatgtttgttaccttgaaacactttattctgattatataacacatatgattaattttccattggctttagcatttcaactgctaagttgaaataattcctactgaattatgaactttgtgaataaaatcagtaaatgttctggtgaagaggcaaattggctatacagttacaggataactttgtaaacctgctgagctaccatgaatcattatgttctatttgctgtactaactgccattctttcagattcaactaaaagttcattttgttaacttttcagtgatccatctttttatacttcccttcttcgtggttttatgtttccagcctttctgtgattatttttcctctctttctgcctctcttcttgctttctgaagccatgtccctgaacctgaggattatggctgctctcctgatgaatggtaagctctatggaactttctgcctcattgatccctataaaaggtttgcattttattgttttgtaagacacatttcactctcttttatataaatatatatatataaataaaatattgctgagcagttagggtaacaatgctgtaaagtagatatttcttgaaatctattgaatattcctgatttttgatggagaaacatgtagtttatagattaggtttgccagagttttacattgtttatctgtaataaagtctaatgatcaattccagagtgtgggctttggactacctcaggtttcagctacagctcctgaagccgtcaggtttttctagctcagtactgccaccttctgccgctacttatgtactttacagagctaccaaaagaggctactgaaacatacccaagcagtggaaattttcttctgtgtttcttacgattattctaataagtctgtgtgcaggctatgaagtgaacgtttttaaaatctgcaccaaatgttagaaaactatgctaccaagcactagagttaactttagtatatttaattttggcatcattaaagttagcgttttatgggtttaatttcactattttatgagttttttgttggttttaccttaaaattcctcccctttgtgaatttatattttcatcttggatagtgcagatttattttgatatttctataattcatcatgagttggtgggcaaatgaaatttcaggaaatatgttcctttaatgttggtaactttagaaaacattgagaatttataggtcattccatttttattttcatattactcatgtatttggtgacgaagccacattttcaatatactttgaagtcgaataacatcatttaaatatttttcaacagggaatttatttcagtgaagtgaagatttggtaaaaattttcagtaaatctcacaacacctagggttaatgacaggcagctgtttggttcttgtgacaactgatgagacaccacatgcccattgcttggagtgtcgtacattttgacacttacacacaagtaatttttaatatttttaaatgtaccaaagcatcttactattagtggataattcaagtttaatattgtatatattccctcttatttaatcctttgagaagtagttaaaatttcgactatatctgcttttctataacattaacataattctattaattttaaatattgttcattagcatagaagtgatatatatatcctctaaaataactcagttattcctaagaagaaattgccttctccatatttttcttaatgttggaaggaaatgttaaaaattgatgtttgtttactcacgtcattcaaaatattctactttcaatagaggttgtttcataacttttattggtgctggaaagagcggatgttattttatctagtttagtaagttctttttgtaaaacacccttttggaaaacttgatattctaaactaggtaactccaaataagaaattgtcagctttgtcataaattgcttgtacatttccacttatagttacatataagcttagatagtaatgatttttaaaaataacaatagggaaggctttcactaccgttacagtaaagtgagttgtttgttaagagggagtctcactctatcacccaggctggaatgcagtggcacaatctcagctcactgcaacctccacctcccaggttcaagtgattctcctgcctcagcctcccgagtagctgggactacaggcatgcaccaccacacctggctaatgtttgtatttttagcagagatggggttttactatgttggccaggctagtcttaaactcctgacctcaggttatccgcccgcctcagcctcccaaagtgctgggattacaggtgtcagccaccatgcccagcctcaagctttattttaaatatatacttggattctccatctataaaataagtaattacctataggcctgcaaaaatgaaagaacaaatgtttcctgagctgctactgtgtccaaggttacgtggagtgatcaaagatgtgggctttggatactaagcaaccaagttcagattttcattctactggtactgttgaacaagttactcaactctttgcctgaatgtcctcatctggaagaatgtagataataatagtagttgcatcatcaggaggttttgaagattagatgagctctgtttgtgtagtgctttggatagtgtctgcacatagtcagcccacactgagtgttagttctggtgctctcacttaatcctcatgacatatttgacatggccattttaaagttggtgaaattcaggcaaagaagcagtttgccccaaattataaaaacgagtagatgatgtgagagttgaaacctacatcagcctggttataaaacagtactggttacattacatcctatggactctaagtaactttaaagaatatctgctttttagatcacaagatatccttgaaatttcagtcattttaccttgatatttctctttttcatttaatatttttcaacctagaatttctttcagtaaatttcttgtggtgttaggcaagagcagattaagcaggtaaaatttaacaagtttgtgtaaagttagcatgagggcatacaactttgcacaactttgagcatttgcccaacctcatccacttggtttcacattgccaatgaaaccaagatcaaaagtgtgatcccagttgaatcctgtgctccaggcatctgactgcatcttcatgctgatcttcaggagtaaagagtatagatgactctataaatccaaaatctgaaagggcattccaatatggctgttcagcagcttcagtttcatgtaaagttcattgaattccatgtataaaacccatgagcttatgtgtattttactgcccgacttgaaccagtattcacaaaaatgccaaattaaaaaaacataattacctcttagatatatgtagattacatatttacatttagttgagtttgaaggcaaacctataatgtattaagtctttccacatattctgttaacattaaagataatcagatgatggttgtagctctactcgcttaggtgtattaatataaatagtttatagagataaaactatttcccaaccagtagctacctactgcagattaacctggttttctcatcattgccaagaaccatcagctagcatataacctcacagattaattcctttttattaaaaatctactgctctagattgatagtatcaatactttggattgaaggggaaaatctatttattcttaacatcaatgtagccctaagatatgctcattttctaaaactatatatttctataattattttttatcattttctgtcttctgttgtggaaaattttaagcatgaacaaaagcagacagatgtactgatccacctgcttcaataatatgcacttaagaccagttcatttatgcctttcccccactatcattttgaagcaaatccaaaataacatattatttgttttttctcaactgtttaatatagtttcacattattcttgttgataatcgttcaagtaaatgctagtgagggtgattccccagaaggatcaccttaaagtgttctgtgcttagtcatttcactggggtttttagtattatcacactatcagtggatagtactacactgtattttctatcctctggtcttatttattttctcatttcattctggtctgtagttatgtatgaagtgagtggtattcatttattctgccgcaaaagctaggctcactaaaacattcttccaggtgtgactgtataacaaagagatctgacacatccaaattaatgttagtcttcaaagcagtcaccttggcagatagtttatttattccagtaaggcagccatttcacagaatgtttttgaaattcctcttttgtaattgcctttagaaagatgttgagtcacatagtgtattagtccgttttcaagctactgataaagacatacccaagactggacaatttacaaaagaaagaggtttaattgaacttacagtcccatgtggctggggaagcctcacaatcatggcagaaggcaaggaggagcaagtcatgtcttacgtggatggcagcacgcaaagagagagcttgtgcaggaaaactcccccttataataaccataagatctcgtgagacttaattcactgtcacgagaacagcacaggaaagacctgtccccatgattcaattacctcccaccaggtccctcctataacacgtgggaattcaaggtgagatttgggtggggacacagccaaaccatatcattccaccccggcccctcccaaatcttatgtcctcacatttcaaaaccaatcatgccttcctaacaattccccaaagtcttaactcatttcagcattaactgagaagtccacagtccaaagtctcatctgagacaaggcaagtcccttctgcctatgagcctgtaaaatcaaaagcaagttacttacttcctagatacaatgggagtataggcatgggataaatacagccattccaaatgagagacattggccaaaacaaaggagctacaggccccacgcaagtccagaatccagcagggcagtcaaatcttaaaggtccaaaatgatcccctttgattccatgtctcacatccaggtcacactgatgcaagaggtgggttcccattgccttgggcagctccacccctgtagctctgcagggtacagcctccctcctggctgctttcacaggctgtcattgagtgtctgcggcttttccaggtgcatggtgcaatgctagatccactgggatctagcattctggggtctggaggatggtggccctctgctcacagctccactagggactctgttggggggggctctgaccccacattttccttctgcactgcgctagcagaggttctccatgagggacccacccctatagcaaacttttgcctggacatccaggcattttcatacatcttctgaggtctaggcagaggtttccaaacctcaattttccccgccccgcaaccccagacagaattctgctgtcttgtccaggctggagtgcagtagtgcaatgttggctcactgcaaccttttcctccttggttcaagtgattctcctgcctcagcctcccaagtagctgggattacaggcatgtgccaccatgcccagctaattttaagtatttttagtagagacagggtttccccagttggctgggctggtcttgtactcctgacctcaggtgatccacctgccatggcttcccaaaatgctaggattacagatatgagccaccacgcctggcccaaacctcaattcttgatttctgtgtacccacaggctcaacactgcatgaaagctgccaagacttggggcttccaccctctgaagcactagcctcttttagttatggctggagtggccgtgacacagggcaccaagtcctagactgcacacagcatggggaccctggccctagcccatgaaaacattttctcctaggcctctggacctgtgatgggaggggctgccatgaagacctctgacatgccctggagacatttttcccattatcttggggattaatattcggctcctcgttacttatgcaaatttctgcagtcagcttcaaattctcctcagaaaataggtttttcttttctatcacattgtcaggctgcaaattttccaaatgtttatgctctgcttctcttataaaactaaatgcctttaacagcacccaagtcacctattgaatgctttgctgcttagaaatttcttccgccagataccctaatcatctctctcaagttcgaagttccacaaatctctagggcaggggcaaaatgctgccagtctctttgttaaacataacaagagtcaccttttctccagttcccaacaagttccttgtctgcatctgagactacctcagcctggaccttattgtccacatcactatcaggctttagtcaaagtccttcaagtctctaggaagttccaaactttcccacattttcttgtcttcttctgagccctccaaactgtttcaacctctgcctattacccaattccaaagtggcttccacattttcgggtatcttttcagcggtgccccactctactagtatcaatttaatgtattagtctgttttcacactgctgataaagacatacctgagactgggcaatttacagaagaaagaggtttattggacttacagttccacgtggctgggtaagcctcacgatcatggcagaaagcaaggaagagcaagtcatgtcttacatggatgccagcaggcaaagagagcttgtgcaggaaaactcccccttgtaataaccatcagatcttgtgaaatatattcactgtcacgagaacagcacaggaaagacctgcccccatggttcaattgccttccatcaggtctctcctacaacatgtgggaattcaagatgagatttgggtgggaacacagccaaacaatatcacatagaaaaccaggcctcattactttggtcaaaaccagtatctaacaaaaatattattattgaattcaatcacttgctcatatttttggactctactttggactttactttgcagccagttgtaccattgaaaagcaggaggtgcagaactttcccccaaaacaatgctttcttagccaggtcccaaggccagaggtcccaggagcagcagcagcagcagcagtgggtcccccaggagagcctctaaggtcacacagggtgcccactgcagacaggctatagtgcatggtgcctcctccctgacaaccacctccacttcacaccagccacagcaaggaactttggcaccagcatggatctctgcctgctgccgatggcatgactgtcgaacaggtggtgttccatcagttctttataccaagtcctttgtgaagcattccacagagcatgtgtcaatggcatgtgttcacccgacctccaaaatagaagagactccaagacaaataggagatatcatcagcgtgtttcatcacctctgacatctgagagaaaaaagaaacctgagcctctactattggatcaaaattacgttaacttaaagaaccagattataaaaagcagaaagatgagggctccaagagccagacttttgtcacgatacccaccattagatcatcattataataccttcaggtgttacagtgttagtgcaactaacacctggcccatacgtcatggaattgcacaggagggcacaggaaagcctcatgaatgtcttaccaaacagggagagaaatggaggcagagcgggagctaggagcagtttttaggtccctattgagatccactccttccaagaggaggaagagccacagagctcagctccctgcaggtctaagtcaaagagccagtgacttctgttgagatgagctggtggtgctccctacagaggctccctgtgtccaaggactacgagccccctacaaaagtctcacaagtcttagagacagacctcatccaattcatgaagccactcattggagtgggcagataattctgaaaatacaataagaaaagttgtaactacagagatcagtttcagggtggttgaggttgtgagtgggccatcactgtgagtgggactactttgggaacagcagacatcagagggtaagccaggggtcccagagtcactagctgacctcaggccttttcccagagggatgtctggagggctgcctacctttgagccattggcatgtccacctcagtgtgagtggccccacattacaactctttctggaaaaggttattgaccctggaccttgtgatgaactttgaaatggaattgaggagaccataagtgctcttcaggccggcccgaggcccagtgcgcacctgtcccagtgcgcggcccacctgagcagcagccgtgcacacgctggataaaaagcaagtgcacttgtcctcgtttgtgtggcttggtgctaacaagctgcctcttcactcccaaaccaatactcaattacgttaggccaataaaatggctatattcgcttgaatttacatatatatgtttcagtggctcgcaatatgagaaaaatgatcttaatagctccattatctatccatgttataaataaacatgtttaaaacaagttaaagctacatatgagaactcagaacctgaattttccacttaaaacttgttaaatgggaaaaatattaggttggtgcaaaagtaattgtggtttttgcaattgttttttaatggcaaaaatctcaaattacttttgcaccaatctaatatttagatctgtgttgaaaatcatagacttttctctgtgcaacctaagtgcaggctaccagctcctaaataaagaaattccctgtatgtgcatgttatgtagttaaacaattctgtctactcaggacatttggaatgttaaagaattcgtaatttgtcattctgcttgcttaagtgttcaaatgtgtacacaaccatgagttcccattctagtggtatgtctgagctgccctccctgttccttactcattaaagtgatgaattttgtaaaaacaaaacaaaaacccacacaacaaaacggtgttattttaaagttatcctgcttttttcgtgtgtgcatgagtgtaatatgtatatgtgtataatgtgcatttagtgtatagatagggtgtttatttcagatgactgatgggttttgtacttgttttaaatttgatttttttaagttcacaatgcattaacatattacaaattcaaggagtgtaaaagaaaaggttttgatcccctccctgtcttagagccctccatttcccctgccaaagacagcctgtgtgactaatttcaagtgtatctttaccgatctcttctataaatattcatacatttattttttctctcttatttttacagaaagtgaagcatactgtacacactgctttgcaccagcttttcatttgacagtgcatctctgagattttttcatattccataaaaagcttccctttgtttgtaaatgcaccacagtatttttaagcagcactactgatgggcctttgtgtttcctaactctttgctattaaaactggactgtaggggttgggtgcagtagctcacgcctgtaataccagcactttgggaggccgaggtggatgaatcacctgaggtcaggagttcaagaccagcctggccaacatggcaaaaccttgtctctactaaaaatacaaaaattagccaagagtgatgacacatgcctgtaataccagctacttgggaggctgaggcaggagaatcgcttgaacccaggaggtggaggttgcagtgagctgagattgtgtcactgcactccaagtgagccaagactgtgccgttgcactccagcctgggtgacagagtgagaccctgtctcaaaaatcaaaacaaaaaacaagtactgcaaagtataaatttgtacatatagtattttataccagttaaacaatataaattcctagaactggaattactgaatcaaagtattttaaattttaaattttgcccaattgcttttcttttagaatttgtatagtttatgttctcaccaatgatacatgctttactattttcctacaattacaacagcacaaagttgtcaagttttatttttgccacaatgatacatttaaatttcacctctctcattatgaggtaaagttgaatgtatatataaagccatttatatttccttccttgtgaattgtgtgtttatatcctttgctcattgttgtactacattgttgatctttttgtaaattgatttctggtaattctttttattccatggaaattagcctttataagttggaaatattttttcccagtttgtcatttagcttttgacttttcttgcagaagttggttgtgttttgttttgttttaagagatgatctccctctgtcacccaggcaggagtgcagtggtaccatcatagctcgctgcagccccaaactccagagctcaagggatcctcccacttctgcctcccaagtagctgggattacacaccaccagctggtgcataccaccagacctggctaattttttaattttttgcagagacaggtcttgctgtgttgcccaggctggtttcaaactcctggcctcaagcagccttcctgcctcagcctcccgaaagtgctgggattacaggcgtgagctactgcacccggcctgttgccatagtttttgctatgcagaaatatttagatttatgtagtcagatttatatattatgttttctgaattatatatgatacctaagctttttccattcctaagttttttttaaaaaaatgtttcacatatctttagtacatttataaaatcattgatccatctggagtttattttggtttacaaggtgaaaagtatggattcagctcttttcttccttttctctgatggctctcctgttgacatgaattttgaatttaaaaaaaagtcttagtacatactgtcatatgcaaggacaactatactgattaagccatatattctttgaatattttaatttttattgctatagagattcttcatttttgtttgatcagaaaatgagtagttacaatgtatcataacttttaagtcagcctaaagaagctgcaaattatatgacattgtgggttccctgctctgttctccttaccttaactgtgatactccctgccttattgcttcttgcaaaataccataacgtcattgtctccttgggagcaaagtgacactcaaaaattactaggcaaagatgtaaccaaatgttgatgttggcttgcatttttatttgtgaaagtttgactaacagtcctattatttttacttttaatgtgatggttcttatttttaactgatatgagcttgcaaattttatctgtttatttttactaaaagtaaatattttgtaaaattttggagaggagtggtggaagctccatgccagagttatccaacccaggctgtctgattagaggatgagttgtttctagtttttgtttctggtttttttgtttttgtttttgtttttgtttttgtttttgagatgtagtcttgctctgttacccaggctggagtggagtccagtggtgcagtttcggctcaccgcaacctccacctcccaggttcaagcgattctcatgcctcagcctcccgagtagctgggaccacacctgactaatttttatatttttagtagagatggggtttcatcatgttggccaggctggtctcgaactcctgacctcaggtgatctgttcacctcagcctcccaaagtgctgggattacagacataagccatggtgcccagcctgttttggggttttttaaattatcttgggaaggaagtcactttctagaagaagagttctttagcattatccctgacagaactttcattactgaatggaaaatggggtatgtccatgtaaatatttcaattgcatatccagagctactcaaatataaatatgtttgaaaattaagtcaattatagtaactgatttataaaatgaaagaattattggtgagattaataaggcatatcttcagatttaaacggcttttagtctggaattctttggaaagaaaatagacttcttgcaagatgttactgtgaatattccttgacatttgtttaacaagtagaaaagtacagctacaaaccatttatgaatatattttaataggaaaatttcataaagccccaagtaatgaactctttttaattaatggtgatatttggaggataaatatatgctatctttttcttagatttttttccttccatcttcaaaattagagaaataatgataatgatgatgatgacgtgttcactttggcccccaagggtattttgatcattctaaactactacctgctaataaagatgtattttcttacgatttggagacttaatagagcaagttactacatgtagatatgtgttccattataaacattctaacttcctccttaagtttactggagaaatgtgtttcattgaagatactatgtatgttctctcctttcaaattctgttttcttcaaagagttttccgtcctgtcaagctgctgcctttacaatatgacagtcttgatatctgacatgttgacattgataatactctttgtaacctgttaatgttgtgatcaaaagctttctggattataattgtttagtattggacacatttttttccctcagtgaaatctgaaattttcttctgtgcactaaacctcaaatgtatatattttcactaaattttgcaaactatacccttttcttttgacattcccacttgtgttccttgtttttcctttgaatctcagtatttttatgttaaattgtatggccgtgagataaatgatagctagtttgcagagataattgactccatttatatcgtatgaagtacataatacatttgctcatctgaagatagccacaacacaaaaattccatacttttattatttgttcttatatttacagaacaaatgtaatatgtttataaatatttgctcagatattaatgatagatgttgatataatctgtaaatggtttattcatgttcttatatttcatatggttttcatcactacatataaagatttctcatgactcaaatagaagaatattttgtataatagctttcgttaattcttagaatcctaaaaattgaaaatattatggaagtggaagaaattcaattccaggtgttttaatagttttagttttatatttttacaaattttatgtggctgcgatataatttaactccagaaaaaatgaactgtaaaatactatttttcattacactgcaaacatctttcacattttagaatgcttgaatatattttgtgatacaatcatgaaatctgtgatgtcttacttagaaatgcaggccaaattacatttaatttattgagggtttggagacataacactttactcataaagtacattaacaaatagatcagtgggctggtataaatgaactgggtttactctattttttacccccttcaggcagaactcacagtttggagatgaaaaaacatttagtgattcatcattgctggaaaatctccaaaataatcatgtaagttacataaaaccattgtctttttgttagtgaataaaaactaatgaatgtttctctgaactatcttctatgtttacatgtttctctttttttactttcatgatcttttatttatttatttagttagttagttagttatttgagacagagtctcactctgtcgctggggctggagtgcaatggcgtgattttggctcactgcaacctctgcctcccagaatcaagccatttctcctgcctcagcctccccagtagctgggattacaggcactcgccaccacacccggctaatttttgtattttagtagagacagggtttcgccatgttggtcaggctggtcttaaactcctgacatcaggtgatccaccccctcagcctcccaaagtgctgggattataggcatgagtcaccgtgcctggcctcattatcatttttaataattatcaaaatctatgccaaatcctttttacttggccaacattaattcatggtggttattaatttgattttaatattatcattcatcaatattctgtcttttcaaattgtttcattttaaatgattattgaaccttctgtgatacaattcaatattaacaattttagaaataagttatcgaaataacttatagaaataagttatctgctcagtaccataggctaaatatacaatagaaactctggcttctgccacccaatgtgaaaatcctgcttatgaagttactgactgtattagggttctctaggggggggcagaactaataggatagatagatagatagatagatagatagatagatagatagatagatagatagatagattagatagatagatagatagatagatagatagatagatagatagatagatagatacacacacaaaggggagtttattaagtcatattaactcacacaatcccacaataggccatctgcacactgaggagcaaggaagccagtccaagtcccaaagctgaaaaacttggagttcaatgtttgagggcaggaagcatcctgcaagggagagatgtaggctgggaggctaagccagtctagccttttcacagttttctgcctgctttatattctggccatgctggcagctgattagatgatctgccttccccatcccacttactcaaatgttaatctcctttggcagcaccctcacagacacacccccaggatcaacactttgcgtccttcagtcaagttgacactcagtattaaccatcacactgacactcagttttcataagatcaagttatagagtcttctggagttaaaccccggaactttttctcataaccacttcaaacccagtatgtcccaacttgaactcatgattgttaccctcaaatatgcatcttctctagcacaggtggacttgtcacttttgcccaagtggggccctatcagtatgttgctaggggtgtttttgtatctctcttttctgcgcgagccttcaacaaaatattaacttcaggatctacaaagcctagccctagaccacctcttccctcttggattctcagctttcagtaaatcataccatcacctatcttgtgactcttcttaggaattagagggttgtctttgatgccttcttttctctccatgtccagatctctgagtcaccaagtccttgttggcactgattgctagaatctatcttgggtgtcggctgcagttaatcctcattttcaccaccccagtccagaccgccagcacccactctgtggattcctgtggtagcctcctggccagtctcctgggttccatttttactcttctccagttattgttgcccatgacagctgaaaaatgcaaatggaaatcaagtcccctcactatcctgtttaagcctattctctgcgttctctcttcactcataaagtaacatgatctggcccctgcctaagctgtcaccctcactttgagctcctttctcctcatcccactggctgccttttattttctaaaacacatcgtttttttccttctttacgacctttcctgcttgatggaaagcactttgctcaattcttcatgaggctaaaacttcatcagctcaaatattacattatcttgagaataaccacagactcgctcaagtcacattacatgatatttgcatattcccttctttacagtgcttgtcttgctataagtaaacaatacgtgtatatttatttgtgttcggtcttccccacaacgccaagcttcacatggcagggaccatgtctgtttagtccactgttctagcttgaacacagttttttcaaataatgttctgatatatctccctagtcacttcacattattattttttttttgcccaagagcatagagaaatgtttttcctttattaaattgaatgacatttctctttattgagagccagacaggaagatatgtaatttaaaatatctggcttctctcctataaaccctaagctccgtgcagaaaggatacacccttctgtcttctcaggctgtaagagtcccctggacataggagttgttcataattttttgattcattaaaatatgaataaagttaccatttttggagaggaaagacaaagcattatagaaaaatcctcaatcattatcaccccaacgcaaagtataaccccagtgcagtaagattgcatgcctaaaatttaaatctgatcaggaattacaactaggtaaatgaacatcttcgaatttttatcctgtcctccaacgacaagattcagctacatctgcctttctcactatactatttctatttgacaacaccaagttgtcttgtataaatgtttagaaaaggaatgaaagagtagaaaaataatttgaattaaaaaacacattttctttataattgatgttggcttcttagttggctataatcccacacccccagtgtataacagctatgtttttatggggttttgtttgtttatcttgtttgttttgttttgttttgagacggagtctcactctcttgtcctggctagagtacaatgttgcaatctcagctcactgcaacctccgcctcccgcctcccgggttcaagcgattctcctgactcagcttcccgaatagctggcattacaggcgcctgccaccacgcctggccagattttgtattttcagtagagacggggtttcaccaggctggtctcaaactcctgaccttaggcgatccacccgcctcggcctcccaaagtgctgggattacaggtgtgagctaccatgtctggccaacaactatgttcttaatagacatgaagtaatattactgtcagtgtcaaaatgttcacatgagaagggcttaaattatgtgtttatttttcacagccaactgcacctataatatgtgaatttcttacaatgatggcagtctgtcacacagcagtgccagagcgagaaggtgacaagattatttatcaagcagcatctccaggtacaaatgaagcaattgtaaagtattgttttgtggaaaattgttctgaatgtaaaagtcaatttaattttaaaaagatagccaaattgagtgttttttagataaaaatttttatttaccaattagaaaaaccttggctttcaaggttaaatatgtacatgatattttaaaatgtgtaactttgtatatgtaatttttggcatattacataagttacatgaaaatgtgaataacgtaattctcataagtgaaaaatgtacttttttacatacacataataatttttcgcttctttataaatacctaagaactcttagtcaagctgattttgcacaggtacaaataggaaaaggaagaagtgttcgcctgaatatagtaagcttatataactttagaacaccaattttgccttcctcttttgttaatgataataaagaagcttgtgtatttatttgggtgaggaaagttttacgcatttgaagggattccataaaatattattagtacagttatcagtattaagtacttaggcttaattttagatctgttttcaatgtaaagttgggcagatagtcagtttgatgagaactttgttagaagtgttttaaactgcattctaagccagcatctgtgacttataggatatactaacttccttaaaagcataagaattgttatgtctcatatcattagggtagaaactatgtgatgttttcttatgccataccctactctagcaataaaaaggttttatttaacatgatgaaattcatagacattaaaatcattagttcatttaaagcttgtttaaactgaatcctcaattagcaatattagtttctctagactcaacattttaggaggaaaaggataaaagtttagaaggcaattttctctgattccttttgagaaagttttctagcaaatacactggatgaaagggtacatttaaattaagcttcttaggaatttgtgactaacagtgagacttgacatttcggaaatgtaactctgagttctgtatgtgtctccaacacttaagattattatcctcatttctttggaattgtcatgtaattttaaaataattggattaataacatgagccagaataaaaagaactttaattaaacagaaaattatattaccttaatgtacttctcttgtgctgagaatatttttttttcaatcatgtgtttgcttttacctctttttctaaaacagatgagggagcattggtcagagcagccaagcaattgaattttgttttcactggaagaacacccgactcggtgattatagattcagtaagttagttgtttttaaggttctttttaatccaagtaatacatttgcatagcttcaaagataaagtaataccaaaaggctcatagtaaaatagaggttccccactccagaagcaactactgggtgttcttttagctatttctttaggcatttatacatctcatattttcaaaaaataaaggtgactattaatacatgttttgactcttcaattttaatgtatcttctgattctgttacatgagggtgtatctcttgaatcaccatccttttagtttatccttcctcatactcaaattattatgattttattccaatttttagttaaatactcaggcccaagttttaaagtgggcaaaagacttgagccaacatttcacaagagaagctatatggatggccaataagcatgtgaaaaaacattgttagtcattggggagatacaattaagaccacagtgagatggcactacatacctacccaagtgattctcccacctcagcctcccaaagcactgggattacaggcatgaaccactgcacctggccactttttcttttattttctaaagactaaattttaaaaatggatagcaccaaatgttaatgagtgtgtagaacaagtgggatactcatatactgctagcagatgtgtaaagtggtaaagtccctttggaaaaccttacagagttgtctaattgaggtaaacttacacctgagccagcaattgtgctcatagttatatagcagaaatggaagtttctgtttctaaaaagacttggaacaaaatgctcctatcagctttattcagagtagccaaaaactagaaaccaaaccaaatgcccatcaatagaagaatggataaacaaattgtgatacagtctcacaatggaacatctaaacaataaaaaagaatgagttattgattcatcaacagcatggatgaaaaatgaatcaaaacatgaatcaaaaacattatgccgagcaaaaaaaaaaaaaaaagccagacacaaaggagtgcatcctttttaatttcatttttatgcagctcaagatcaggaaaaagtgatttatggtgatagaattcagaacagtggttgcctcagggcagggaagaggttgattggaaaagggcacaaggggatttataggatgggaatattttatatcttgattggggtgctaattaccacactgcacaattttcatttgactctgtgttaaaggtctgtgcattttattatatataaattgtctcatttaaaaattattatttagtttctgtgtagtattgccttctattttacctgtacagtattcatagctgaacatcgttgtatttggtaattatttttttgttttttaaattttgtgtttcccaacaccaattattttttttagagatggggtcttgctctgtcacccaggctggagtgcagtggtgcagtcatagctaaccatagccttgaacccctgggctcaagtgaccctcctgcctcagcctctaaaatagttgggattatagataggcatgtgccaccgcacctgatattttttttaatttatttttttaatagagatggggtcttgctatattgccaaggctggtcttgaactcctgagctcctttgattctcccacctcagcctcccaaagcactgggattacaggcatggccaccagacctggccactttttccatcattttctaaagataaatctcttacctgtttgtttcattgcttcccttttttcccccctattatctatattaattgttcccatactttctagtatacttttctcaatacagtcacaccacataatctgttcattggcagttctttccttacgacatcccttttgaagccctccattctcttgtctggacaggttatattctaagaactcttcggtgacactttttggttttccttttggttttctcctgttttggattttctgtttcctgtaactcaatttacgtaaaagttagtaagctcccttccatatttcagcagggaaaatttgtttgtgttggcattttttacagtaaaattttatggctaggatttatttcctagaagcttaagacttttccaactgtatgtaattatatattccttttcttcttagctggggcaggaagaaagatatgaattgctcaatgtcttggagtttaccaggtaaaacatctgctcagtgatttgtatggataagataaatttatatccatttttattttttcccttttgaataactagaaagtatgttttgtttttatttaactaaatttgtttagacaaaatattaaatcaaaatctttagtacattttttattctcattatctgtagataaattacaaaccactttcttcagagtattgcaatgcgtgactactggttgcagttttaaagtctttttgaaagttgatctcatggaggtaaagagtagaatgatagataccagaggctgggaaggatgtgtgagtgggaggggaagggataaagagaggttggttaatgggtatgaacacacagttatgttgaagaagtaaattctgatgtttgataataaagtagggtaactatagttaacaacaatgtgttgtgtatttcaaaatactagaagagaggacttaaaatgttcccagacatacaagtattaaataatcaagatcttgcatatcccaaacaccccaatttgatcattataaattctgtgcatctaacaaaatatcacatataccccataaatatgtacaaatactgtgtatcaattttaaaatttagaaaaagaaatcgttttgaaatatagctgcctgattcacaagcccagcgtatacggccatgcgtcttatggctggtgatctggaaacacaattatgtttagaggcatcagatttatgtggggtggagatgagtcgggatcaggaagccggcattctaattgtatgctcattatatctaattgtcttcaggatttgaaaaaccgtattcttgtctctgttaagtataagaccagttaccatctgttaggaaaggacagaaagcaaagtgattgtcctacttattttatttcttaaggtcgaataatagatcccttcagttataatcagtgataagcctgtgagttttcagcctcttactcccacgtgacaatgtaacctgcttacctgcattcttgaggcagagaggcccttgctgcagggtctttaaagactgcgtgaccattcacaggacacttcacagaattaaggccatgaggaagtaatgctgctgctcaaggaaataagtgtccatcatttttcttgaactttcttctgcataagacaaacttgtacattgcttaggaaaggcatttctctttctgtgccaacttttgttgctgtcttgattaggagtgaccatatgccagtggttaataacaaaaataatgcagtctgtctgacttattatttaaagctttttttaacttagatactctgaaaagcccaaagaagatgaatacattgaataaacagaatggagtattttcaaagtgcactcctcgtctctttcttttcatgtcagagtgattgcttttcccaagcttatttgtattatatctgtagactgtcattaagtagtctattaattgccatttagatacgttttttaaaccacacttagaaagcactatgctaggtgatgagtgccatgaagaaaaaaataaagcagggttgggagtttctgttctttcaggactcaatgatgaaggtgggtttaagaatgaacatgagaaaagtgaatatgatgctgttaaatagtccctatgaaagacattagtggtttagactaggatgatggtagtgaaaataaaaggaagttaatagaatccgtgtaccttgtagaggaatatctgagagactttgtgagggattggcagtagaaggcgaaacgaggaaggggtgagggtctctggcatgaacaactgggtagatagaggtaccatttacacagatggcagaagtgggaataggaatagatgtggaggttgaaatgtttgaagtcttaggttttagatgactgtgagacatacaagcagagctatcaggcaagcagttgaatataagggcctgaaacaaaagagaaatctatggctgaaatagcaatttggcagtcagtggttggtaagtggtatttgaagtcataaaactgaatgggatctcctgaagagaagatataaaatgagggggaaatggaaggctgaagattaagccatgagggtaagggttgattagaaaaagaggaatcagcaaaagagacaaccttgttgttaaagatgtagaggacagagagagggtcatagcacagagccaggagaagaggattcaaagagagagtggtcatctgtgtcggagactgctgcaaggttaggtaagaagtttgagaagtatttgttgaatgtagctattcattgtaatggtgaggagagaagaaaaaggaaaagactgggaatgaaggggatagatgagtgatggtttagagaaggtgaaatgtgaaagagttgaaaagggatgtggcttaatggaggagtggttgcatcgggtgagtttttttgttttttttttttttattatactttaagttttagggtacaggtgcacaacgtgcaggtttgttacatatgtatacatgagccatgttggtgtgctgcacccattaactcgtcatttagctttgggtatatctcctaatgctatccctcccccctccccccaccccacaacagtccccggtgtgtgatgttcctcttcctgtgtccatgtgttctcattgttcaattcccacctgtaagtgagaacatgtgatgtttggttttttgtccttgcaatagtttgctgagaatgatggtttccagcttcatccatgtccctacaaaggacatgaactcatcattttttatggctgcggggcgagaacagagtatgttaaatgcttatcaccaggatccttacagaaggagaagaggcagattctggggagaacagcataacctttggaccgaggttactgagaaagtgagatgagaggaggttcacaggcatgtgtaaggaaggcctctgataagaggaaaatgtttcttccatcatatcaggaaaaaagatggaggagatggtgcacacatagatatgcaggttttaatggcagaaagaaaagggatttcttcccacccccaaaccgagacagagtgtctctctgttacccagcctgcagtacagtggctcgatctcagctcactgcaacctccgcctcccaggttcaagctattctcatgcctcagcctcctaagtagctgggattgcaggtgcacatcaccatgcctggctaatctttgaatttttagtagagatagggtttcaccatgttggccaggctggtctcgaactcctgacctcaaatgatccccctgcctcagcctcccaaagtgctgggattacaggcgtaagccaccatacccgggcaaaaagggatttcttatctgaggtttttatcaaggtgaatttttgtcaagcttctggggtgaggagggaacgcgggagacttggagaatggagaaggtgtgctgtagccctgcacagtgcaagagagcaagcttgttggaatgtgctgggttactgggcagtaaggagcacccagttggtgttgtatatcatgtatttgctagtctctatggccgggtaacttttcttcagcaacatctacctactttgatgtaacacaaaagagagttctcattcacccaatatttggaggtttcaccaggaaaagagaagagcaaggacattgatgagtttgggaccacattatcaaagctggagtaaaagaggcatgaatcaggaagggctaacgtagaatgtataggtgtcattacaaaggaggcccaattaaatgtattcctgatgtacagggatagagactggggtagtaataccaggagcattatggataaagaaagagggaacttaaatattccttttttttttttttttttttgagacggagtctcgccctgtcacccaggctggagtgcagtggtgcaatctcggttcactgcaacctccacctcccgggttcgagcgattcttctgcctcagcctcctgagtagctgggattacaggcacgtgataccatgcctggctaatttttgtatttttagtagagacagggtttcaccatgttggtcaggctgatctcgaactcctgaccttgtgatccgcccgcctcggcctcccaaagtgctagaattacaggcatgagccaccgtgccaggccgggaactgaaatatttctaaatacctctgaaagaaactcctgactgtacactatgataccataactgactgcttctgcatattgaactcatctcagttttttagctggtaaaacaaatagatacagacatttgagtagtcctcttctgccctcagttctgaggaggatgcttacacactcatggtccaaatgagtcctatcctttgtaatgctgtcgcagtttcttccattcagtgttatttgctatctctttttactaatgcattgaaagatgtacatttgacagacagttcttattaaactatgtcatcaacagtattaaaatatttgtgctctttagcttaattttgctgcataaattaagtttttagcatgatgccagtggtttgctagtcatcattgaaaaactagttgtgaatgcttaagttgttttttaaagtactagtatttgccttcatgtgtgatggggtgtcactgattgtcatttgtatttttaataacaattgatttgtattgatatttctatttttcataaaaactataacataatttatcctttaagaaaccaacttaaatattttttcaaatccgaaaacattgaactaggactttactctggtgggtatgagctcttgtaggtttcttaggaactattttgtcaactattccactagaagagtagatggtaccctggtgccttaaaagcataatgtaacttttacaggtgcccagctgtacacccaagggatagtttgtgtatgtggaaggttagggctcatgatttggtcagatttatttttttactgtgaatatcaaaatatgtgaggcatgacaaacacatacatgcatatccttggtatgatgacacattatgcaaaacctctttctttcagtgctaggaaaagaatgtcagtgattgttcgcactccatctggaaagttacgactctactgcaaaggagctgtaagtttttatttttattttttacagttataatttatgatggtttataatgtatatgttaggcattctatggaaatgtaacacagatgtttaacatgaagttgctgacatccacttttgttggtgttttatagtaatagtgttcagcctcttctggtgaaatgtggaattccttctgggtaaatttggtgctttgaaaaagtttggcctaggttatttttataattcaatttttgatacataatatttgaggtttatactatataaattgttagaagacagttaaatacagaaaatatttaaaaattgtattagaatgtgattcactctagtttgaatctaattttttaagagcatagaaatgggggaaaattagatcacagttactaccataattatgtcatgggactaatttgtcttgcattgttttaattataacaatttctgacatggctttggtatattggcagcttatattgacagaaatagtaatatgttattctaactgaatttctccagttaaatatatttatactcatgggaaaatgagaaatctgaccagggcccttttttttaattgagatgagtcagcattttccttctgaactgttctttccatttacctagtttataaccttcccaacttggaacattcctattttgaatagagtcaacaaccttgctttgtctcatagaaactcggaaattgaacttaagaagctcaagcctattatttaaattcattttgagaatgttaaatgccttggtttaaagacaatgaaatgcaatttttgaatgccttgattttaaagcattttggtagaattatttcatgatgtctcatgaatttagttttagaattcttttgattttgtattctcatcgattaaaacacctaacattttttcattgtatgcattctaccatcacagttcgaactgcattttggagataggaagataagacctaagacttgtcaggagcttagactagtcagagaaatattaaataaaaagaagattgggatacaattttaaagtgtattgtaaagatcttccacatcccaaaagtaatattcagtgataagggaataaagagagactttaacacatatacaccatggaatactatgcaaccataaaaaaggatgagttcatgtcctttgcagggacatggatgaagctggaaaccatcattctcagcaaactatcacaagatcagaaaaccaaacatcgcatgttctcactcataagtaggagttgagcaatgagaacacatggacacgggaaggggaacattacacaccgttgcagggtggggggctgagggagggatagcattaggagaaatacctaatgtaaatgatgagttgatgggagcagcaaaccaacatggcacatgtatacctatgtaacaaacctgcacattgtgcgcaggtaccctagaacttaaagtataataataaataaataattttttttaaaaaagagagcctttaagaccttccactttaaatggttgataaatgtccagtttacaaaacccgaatcacatcctttcttgtatagtttggaatcatcttctacctagaaacttgtttgaggagttaaagctttgaataaaaaataaaaaatgatggacttccatttttaataatcatagaattagcttgcatatatttttgctgttctgaaaaaaaatttaatatatttcatatagactttatttttaaagcaattttaagtccccagcaaaattcagcagaagatagagtccacatatacaccctgccatcacacacacacatagcctccccattatcaacatcccccaccagagtggtacatttgtaacaatccatgatctacactgacacatcattatcactcaaaccctagactgtacatgagggttcactcttggtattgtaaattctataggtttggataaatgtgtagtgacatgtatctaccattatggtatcatatacagtattttcattgccctacaaatcccctgtgccccgcctagtcatttatctcttccctcaaggccctggcaaccactgttgcttttactgtccccactgttccttttactgccttttccagaatgtcatatagttagaatgatatggtatatagcctttctggactggcctctttcacttagtaatattcatttaaggttcctccatgtcttttcatggcttgagagcttgtttctttttagcactgaataatccattgtctggatgtgccacagtttatgcgttcacctgctgaaggacatcttggtctctttccaattttggccattatatgaataaagctactgtaaacatgcatatgcatgtttttgtgtaaacataggttttcatctcatttgggtaaataccaaggagaataattgcaagatcttacagtaagagtatgtttcattttgtaagaaactgacaaactgtcttccaagtggctatgccattttgcattcccattagcaattaatgagagcttttgttgctccacatcttcacccacgtttgaagttgtcagtgttttggatttgggctattctaatagatgtgtactggtattttattgttggcttaatttccagttccctgaaatatgatgttgaacattttttcatatgcttatttaacatctatatgtcttctgtgatgaggtatcttcagatcttttgcccattattaaattggttgttcattttattgtagttacttttttatttttttaattgtatttattcatttattcatttatttttagagacagggtctcactctgtcacctaggctggagggcagtgatgtgatcatagcacactataacctcagattcctgggctcaagtgatcctcctgtctcagccttgtttttattacttgtacacatttatggggtacatgagaaattgttacatgtatataatgcagagtgatcaagccaggatacttagagtgtccatcagcttagtacaatacatcttttgtggagtatagtcaccctactcgggctatcaaacattgaattgattccttctatcatactgtatgtttgtactctttaacccagtcctctttatcctccctccttccatcctcctccctctgtctcacccttccctgttggtgtttgtactttctacctctatgtgatcatattttttttagctctcacatataagtgagaatatgcaatgtttgtcattctgtgcctggcatatttcacttgataatgacctccagtttcatctacgatgctgcaaatgacatgatgtcattattctttatggctgaatagtataccattgtgtgtatatacacctgttttttttttttatctattggtctgttgatggacacttaagttaattccatatctttgctattgtgaatagtgctgcaataaacatgtgagtgcaggtatcccctttgatatattgattttttttttcctttgggtacttacccagtagtgggattgctggattgaatggtaattctagtttctttgagaactctctatactattttccatagtggctgtactagtttacattcccaccaacagtatgtaagaggtcctttctctccacatcctcgcctacatcagttatttgttgtctttttgataatagccattctgactggggtaagatacatctcattgtggttttgatttgcctctgattgctagtgatgttgagcatttttttcatatacttgttgaccatttgtatgtcttcttttgagaaatgcttactcatgtcctttgtccaccttttaagggaattatttgttgcctgttgtttcagtttcttgtatattctggctattagtcctttttagggtgaatagtttgcagatactttcttctattcaacagattctcttcactctgttgattgtttcttttgctatgctttttagtttaatataatcccatttgtgaatttttgtttttgttgcctgtgttttcaagatcttggtcataaattttttgcctaaaccaatgcccaggatagttttccctaggttttcttctagtatttttaaaagtttgagtcttatgtttgtttttaatccattttgattttttgttttctttgtatatggcaagagataagggttcagtttcatccttatttaggatgggtttttagatttcccagcaccatttattgaagaagaagcatgacctttctccagtgtatgttcttatcagctttgtcaaagatcagttggttataaatatgtgactttatttctgggttccctagatttatgtgtctatttttgtaccaataccatgttgtttggttactatagccttgtaataaattttaaatgtaggtaatgtgatgcccccagctttgtcctttttgctcaggattattttagctatttgggctctgttttgattccatatgaattttaggattattttttctaactgtgaagaatggcattggtattttgtttttgttggggggggggtattttattttattttttagtacatgaataaattcttcagtggtgatttcagagatttccatgcagccatcacccaagcagtgtacgcgatacccaatatgtagtcttttatccctcactcccctcccacccttcctctccccccaggtcccaaagtatgttgtatcattctcgtgtctttgcatcctcatagcttagctgtcacttatgagtgagaacatatgatgtttggtttcccatttctgagttacttcacttagaataatcatctccaattccatccaggttgttgcgagtgccattatttcactcttttaatggctgagtagtattccgtggtatatacagataccacattttctttatctacttgttgatttatgggcgtctgggctggctccatatttttgcaattgcaaattgtgctgctataaacatgtgtgcaagtatcttttttgtataatgacttattttcctctgggtagatacccaggagtgggattgctggatcaaatggtagttctacttttagttctttaaggaatctccacactgttttccatagtggttgtactagtttacattcccaccagcagtgtaaaagtgttcccttttcaccacatccctaccaacatctattattttttgagtttttgattatggccattcttgcaggagtaaggtggtatcacattgtggttatgatttgcatttccctggtaattagtgatgttgagcattttttcatgtgtttgttcaccatttgtatatcttcttttgaggattgtctgttcatgtccttagcccactttttgatgggattgtttattttcctcttgctgatttgagtttgttgtagattctggatattagtccctcatcagatgcatactttgtgaagattttctcctactctgtgtgggttgtctgtttactgtcctgattatattttttgctgtgctttttagtttaagtcccatctatttatctttgtctttgttgcatttgcttttgggatcttggtcatgaagtctttgcctaagccagtgtccagaagggtttttctgatattatcttctagagtttttatggtttcaggtcttagatttaagtctttgatccatcttgagttgatttttgtctaagatgacagatgaggatccagttttattcttctacatgtgacttgccaactatcccagcaccatttgttgaatagggtgccctttccccactttatgtttttgtttgctttgctaaagatcagttggccataagtatttgactttattactgggttcttcattctcttccattggtctatatgcctatttttataccactaccatgccgttttggtgactatggccttatatagtattatatatagtttgaggtcaggttatgtgatgcctccagatttgttgtttttgcttagtcttgctttggctttgcaggctcttttgtggttccatacaaaatttaggattattttttctaattgtgaagaatggtggtggtattttgatggaaattgcattgaatttgtagattgcttttagcaggatgtcatttttacaacattgattgtacccatccatgagcatgggatgtgtttgcctttgtttgtgtcgtctgtgatttctttcagcagtgttttgtagttttccttgtagaggtctttcacctccttggtcaggtatattcctaagtatttttatttttttgcagctattgtaaaaggggttgagttcttgattctcagcttggtcactgttggtgtatagcagagctactggtttgtgtgcattaattttgtatcctgaaactttgctgaattcatttaccagttctaggagctttttggaggagtttttagggtttttaggtatatgatcatgtcatcagcaaacagcgacagtttgacttcctgtttatcagtttggattccctttatttctttctcttatctgattgctctggctagaacttccgtattatgttgaataaaagtggtgaaagtgggcgtctttgtcttgttccagttctcgggggaatgctttcaactttttcccattcagtataatgttgactatgggtttgtcatagatggcttttattaccttaaggtatgcctcttctgtgtcaatattgctgagggttttaatcataaagggatgctgggttttgtcaaatgccttttctgcatctattgagatgatcacgtgggggtttttttggtttttttgttttttttttttttgagacggagtttcgctctttttgcccaggctggagtgcaatggcacgatctcggctcaccgcaacctccacctcctgggttcaagcaattctcttgcctcagcctcccaagtagctgggattacaggcgtgcaccaccatgcctggctaattttgtatttttttagtagagacagggtttctccatgttggccaggctggtctcgaactccagacctcaggtcatctgcccgccttggcctcccaaagtgctggctgggattacaggcatgagccaccatgccgggcctggtttttgtttttaattctgtttatgtggtgtgtcacatttattgacttgcagatgttaaaccatctctgcatccctggtatgaaacccacttgatcctggtggattatctttttgatatgctgctggattcagttagcaagttttgttgaggacttttgtgtgtatgttcatcagggatatcggtctgtagttttttttgttttatcctttcctggttttggtattgggggatagtggcttcatagaatgactctgaaaggattccctctttctctgtcttttggaatagtgtcaataggattggtaccagttcttctttgaatgtgtgatagaattcagctgtgaattagtctggtcctggaccttttttgttggtaactttttaattaccatttcagtcttgctgctgatctgttcagagattctgtatcttcctggtttaatctaggagggttgtatatttccaggaatttgtccatctcctctgggttttctagtttatgcacatagaggtgttcacagtagccttgaatgatcttttgtactttggtcgtattggttacattatagtatctcctattttgtttctaactgagcttatttggatcttctctcttattttcttggttaatctcactaatggtctatcgatgttatttatcttttcaaagaaccagctttttgtttaatttatattttatagttgttgtttcaatttcatttagttctgctctgatcttggtaatttattctgctgggtttggggttggtttgctcttgttcccctagttccttgaggtgtgaccttagattgtctgtttgtgctctttcagactttttgatgtagacatttaatgctatgaactttccccttagcaccccttgtgctgtgtcccagaggttttgatagtttgtgtcactattattcagttcaagtcattttttaatttccatcttgatttcattgttgacccagtgatcattcaggagcaggttatttaattttcatgtatttgcatggttttgaagtttccttttggagttgatttccaatttgattccactgtggtctaagatagtacttgctataatttctaatttcttaaatttgttgagacttgttttgtggtctatcatgtggtctatcttggagaatgttccatgtgctgatgaatagaatgtatattcagcatttgttgggtacaatgttctgtaaatatctgttaagtccatttgttcgagagtacaatttacgtccattgtttctttgttgactttctgtcttgatgacctatctagtgctgtcactggagtatttgaagtcccccactattattgtgctgctgtctatcccctttcataagtctagtactaattgttttataaatttgggagctccagtgttaagtgcatatatatttaggattgtgatatttcctgttggattagtccttttgtcattatataatgtccctctttgtcttttactgctgttgctttatgtttgttttgtctagtataagaatagctactcctgcttgcttttggtgtccatttgcatagaatatctttttccacccttttaccttaagttttatgagccctaatatgtcaggtaagtctctcaaagacagcagatacttggttggtgaattcttatccatttacattcaatgttagtattgacacgtaaggttctattctattcatcatactatttgttgcctgaatacctttttttttcattgtgttattattttacaggtcctgtgagatttatgctttaaggaagttctattttggtgtatttcaaggatttgtttccagatttagactccttttagagttcttatactgctggcttggtagtggcaaattctctgagcatttgtttttccgaaaaagactgtatctttccttcatttatgaagcttagtttcgctggatacaaaattcttggccgataattgttttatttgaggctaaaggtaggtcctcaattccttctaacttgcagggtttctgctgagaaatctgctgttaatctgataggttttcatttataggttacctgatgtttttgcctcatagctcttaagatttttttcttcatcttgactttagataacctgccgactatgtgccgaggtgatgatctttttgtgatgtatttctcaggtgttctttgagtttcttgtatttggatgtctagatctctagcaaggccagggaaattttcctcgatgattccttcaaatatgttttccaaacttttagatttctcttccttaggaacaccaattattcttaggtttggtcgtttaacacaatcccaaacttgttggaggctttgttcattttttttaaattcttttttctttatctttgtcagattggggtaatttaaaagccctgtctttgagctctgaagttcttttttctacttgttcaaatctgttgttgagactttccatttctctaagtgtggccttcatttccagaggttgtgattgttttttatttatgctatctgtttcactggagatttttccagtcatatcctgcatcattttttggatttatttaagttagacttcacctttctctggtgcctcattgattagcttaataattgaccttctgaattctgtttctggcaattcagagatttcttcttgaattggatccattgtggtgacttagcatgatcttttggggtattaaagaaccttgttttgtcatattaccagaattgtttttctggttccttctcatttgggtagactatgtcagagggaagatctggggctcaagggcaactgtttagattctttcatcccatggagtactcccttgatttggtgttctcccccttcctctagggatggggcttactgagagccaaacggcagtgattgttatttccgttcttgatctagccaccccacagagataccagactctgggctggtcctggggagtgtctgcacaaagccctgtgatatgatccatcttcaggtctctcagctgtggataccagcacctgctttggtggaggtagcagggtagtgaagtagacttggagagggtccttggttgtatttttgttaagtgtgctggttttgttttggttggcctccagccaggaggtggcactttcaagagctcatcagctgctatagtatagggaggatgcaagcttgccctagggtcaggcagtaggtgtgaagccatagagctcccaagagatgtcctttgtcttgggctaccagggcaggtagacaaagactatcagctaggggcagagtcaggcatgtctgagctgagactctccttgggtgggacttgatgaggctgctgtggggatgggggtgcggttcccaggccaatggagttatgttcccagggggattatggctgcctctgctgcatcacacacatcaccagggaagtggggaaaagctggcagccacaggacttacccagcacccatgtagcctgcagcccaaaaggctggtctcactcccactgtgcacccccaacagcaccaagtttgttcccaagcagccagtgagcagggctgagaacttgcccccagctacaagcttcccagctgagaaagcaagctgactcacagtccctcagctgtcccatggagcctgcagcagcagtcttcctccttcaaaaagtgtggattctcttggctttcctgatatgttcatgtggtagttcttggagcaaaagttcatgtcacgcacgtccgtgtgaagagagttcaccaaacaggctttgtgtgagcaacaaggctgtttatttcacctgggtgcaggtgggctgagtccaaaaaaggagtcagcaaagggtggtgggattatcattagttctcataggtttgggataggcgtacaaagtacattcttaagggctggggggaatattacaaagtaccttcttaagggtgagggagaatatatcgtatcagttagggtggggcaggaacaaatcacaatagtggaatgtcatccgttaaggctattttcacttttgtgcatcttcagttgcttcaggccatctggatgtatacatgcaagtcacaggggatatgatggcttagcttgggctcagaggcctgacaattcacagtatgagtctccacgctgctccatccatctgagtaggagctgcaagttagtcctgcctcctatctgccattttcaacattggtattttgatagggattgcattgaatctatagattgctttgggcaatatggtcattttagttatattattccaatccagtggggcatgggatgttttctattttttttgtgtcaccttcaatttatttattttttttttgagatggagtttgtcacccagactggagtacagtggcacgatctcagctcactacaacctccaccttctgggttcaagcgattctcctgcctcagcctcctgagtagctgggattacagtcacccgccatcatgcccagttaattttttgtattttatgtagagacagggtctcaccatgttggccaggctggtcttgaactcctgacctcaggtgatcagcccacctcggcctcccagtgtgctcccaatgtgctgggattacaggcgttttgtttttcttatagagatctttcacctccttggttaaatttattcccgtgtattttatgtgtgtgtgtgtctgtgtgtctgtgtctgtgtgtgtgtgtatttttttgaggcagggtctcactctgctgcccaggctggagtgcagtggtatgatcatggctcactgcagccttgacttcctgtgctcacatgatccttccacctcatactcccgagtaactgggactgcaagcacgcaccaccacacctggctaacttttttgtgttttttgtagaggtggggtttcaccttgttgctcaggcaggtcttgaatgcctacctcagcctcccaaactgctaggattacaggtgtgagccaccgcacctggccctggtattttatgttttttatgactgttgtaaatgggattggcttttttctttctcatctagatattgttggtatatagaagtgctactgatttttgtacattgattttgtatcctgcaacttgactgaattcatttattaaaatttaagttttttgttagagtcttcagttttttgcagatataagatatgtcatcagcaaagaggaacaatttgacttcctcttttccaatttgtattccttttatttttttctcttgttgattgctctggccttgacttccagtactattttgaatagctgtgaagaaagagggcttcctcatcttgttccagttcttggaggaaagctttcagcttttcccttttcaatatgatgttagctggggaattggtgaggaaatactcatgacagttacagtctttgtttctgcagctggtcatgtagtcgtaactggtattgttgactgccctcttctgctacccattctgttttccctttgccttcagcaagcacctcagcaggttgtggtttttttcctggtggagtgacccaaaccttcattcctgaagggtctggaccatttgtagtcctgcctggattgggctgttgtagtttcccattgaccttaatcacagggcatggtaatactaagagtcgccctaatggattcgctgtattccgtacatactcttccctacctctgttatggagcagtagactgatttcatcttggtagtctgggtcagtcaccccagccaacactgtaactcccttagcctgttgacttaaaggtaggaggagcccaaagtgtccaggtggcaatcttaacttccagtttaattgaatcattgttgtgtctcctgataacagtgttcctccctctggaactaagacctctaggccagcagaacataatgtcgcaggaacaggaagcaaaaatgttgctagtggatcactaggagtgatggtgagtggtgccacttccacttccaccccttgattcctggacccctgaatcctggctatgggagaaacagtaccatatattggatgctgattcagagcatacacggccttctggagaactttgctccggccctgcaaagtgttgtcacctagttggcactgtaattgtaactcaaaaggccattccacccttctatcaatctagctgcttcaggatgatgggaacatggtaagaccagtgagttccatggtaagaccagtgagcccactgccacacgtctttagccataaagtgagtgccttggccagaggcagtgctgtgtggaatactgtgacagtggatgcatgagcccactgccacacttctttagtaagtgccttggtcagaggcagtactgtgtggaagatcttgagtccacagatggtagtcttggcagaagcactgcgtgcaggataggcaaacccatatccagagtaagtgtctgttccagtgaggataaacctctgcccttttcatgatgcaaaaatctgccaccaggtggctggctgatcaccccaaggaatggtgccatatcaagggctcagtgctggtctctgcggctggcaaattgggcactcagcagtggccatagccaggtcatccttggtgagtagaagtccatgttgctgagcccatgcgtaacctccatccttgccaccatggccactttgttcatgggcccattgggtaatgacaggggtggctggggaaagaggctgagtggtgtccacagaacagttcatcctatccacttgattattaaactcctcctctgctgagattacccgttggtgagcactcacatgggatacaaatatcttcacggtttttgaccactcagaggtccatccacatacttcttccccagatttctttgtcaccaattttccagtcatgcttcttccaagtccctgaccatccagccaaaccattggctacagcccatgaatcagtatataatcacacatctggccatttctctttccatgcaaagtgcacaaccagctgcactgcttgaagtgctgcccaccgggaagatttcacctcaccactgtccctcagggatgtcctagaaaggggctgtcgtgcttcagctgtctactttcgggtagtgcctgcatatcgtgcagaaccatctgtgaaccaggccctagtcttctcttcctctgtcaactggatcatagggaactccccatgaggccatcggtgcaggctggggaagagaaggcacagtggtaggagtggagaccatgggcatttgaggcacttcctcacataacttacttgtgccttcaggacctgctcaagcctgatcacgtatataccacttcaatttgatgatgcagtgctgctggtgcatgacccacttgatggctagatgggtcagaaagtacccagttcatgatacgcagttcaggtcgcatcgtgacttgatgacccatggtcaaatgttcagtttccaccaaagcccagtaacaagccaagagctgtctctcaaaaggagagtagttacctgcagattatggcagggccttgctccaaaatcctagatgcctccactgtgattcacctatgggggcctgccaaaggctccaaacagcatccccgtctgccactgacacctcaaataccattgaatctgctaggtcatatggaccaagtggcagagcagcttgtacagcagcctggacctgtgtccgttctggaccccactcaaaactggggtccagtggcctttagggtcacttgataaatgggccagagtaacacacctagataaggaatgtgatgcctccaaaatccacataagcccactaggcattgtgcctctcattgtaggaggggccaaatgcaacaacttatccttcaccttagaaggaatatctcaacagcccccacaccactggacccctagaaattttactggggtagaaggtcccttaattttagtcaggtttatttcccatcctctggcacacaaatatctcaccaataagtccagtgtgtttgctacttcttgctcactggatccaatcagcataatgtcatcagtgtgatggaccagtgtgatatcttgtggaagtgaaaagcaatcaaggtctcactgaataagatcatgacacaaagcaggagagttgatatgcccctggggtaggacagtaaaggtatgttgaaggcaaattgcttggtgggccttataggcaggagtggagaaaaaggaatttgccaagtcggtggttgcataccagataccaggagatgtgttaatatgctcaagcaatgaaaccacatctggtacagcagctacaattggagtcaccacttggttaaacttctgataatccactgtcattccccaagatccatgtgtcttctgcacaggccagatgggagagttgaatggggatgtggtgggaatcaccacccctgcgtctttcaagtccttgatggtggcactaatctctgtaatccctccagggatgtgatattgtttttgatttactatttttctagggagaggcagctctcatggcttccatttggcctttcccaccgtaatagccctcaccctaccagtcagggagccaatgtggggatcctgccagttgctaagtatgtctatgccaattatgcattctggcatcagggaaatgaccacaggatgagcccggagacccactggacccactgcaagtcagacctgagctaaaactccattaattacctgaccaccataaacccctattttaactggaggaccacaatgacattttgggtcccctggaatcatcaccagctcagagccagtgtccagtagtccccaaaatgtctgatcatttccctttccccagtgcaaagttaccctggtaaaaggccagaggtctctctggggaaggatgggagaaggattaacagcataaattgtcggttatgtagtggagtccttcctctagggtacccagcctccccttcattcaaggggttctgggtctataaactggctcaagtttggaaattgattgagggactgtgattctctgtttttgtaactcaaaattagtcttttatccattcgacctagaagttttctgcttatataaatttgaaaactcaggcaattccttttgagtgtagtgcatctcctcatgagtcacactctcatcctcacgtctagggactcgctgggactttagtctagttataggtctagaagcaaacaggggtgttgggggtgggtccagaagagaatcaacatcatcttgcctggcaactgcttcaggggaggccatcgttgttacctcaggcagcacaggctttatctcctcagacaaaagtggaaaggctgatggcaacatggttcagagaggggaagttgcccctactggggatggggaagctgttacttctggcaaaaaaggttcatcagagtttacaaactcagtgtccccagcttcatcagggtcctcccacacgtccccattccaagttgcggggtcccattcttttccaatcaatgtcctccctttaacagtagacacctgttgaggctacgcatgcacctttccttgcgggtcagccattcgcatgataacagcttgtgtctgtttttccacaatttcagctctttccctgcaggagataagactctcactcagggcagtcttagcagatttgagactcagtatctgcttctgaagccaggagatagaatccctgagttcatcattttctttcattactttgtccactgaacttaggagcaaccaaccagcttcattatgttccttggttctccacatatggccaaaggtattatgtatagagtcactaaactcattgtctgtcatgaaagaagaatcaggaatgtcaaatgcatttattttacataactctccagtttatgccaaggactatcagtgttctccatactacaggtagagtccttagcattttggggtctaatcatattaagcagccacctccagaaaccccaaaaccaatgaaagaactccatcttaatattctgttcctctagagccactcttggtaccaaaatctgtattagtcagggttctctagagggacagaattaatagaataaatacatatatataaaggggagtttcttaagcattaactcacacaatcacaaggtcccacaataggccatgggacctgcaggctgaggagcaaggagagccagtctgagttccaaaactgaagaacttggagtccgatgttcaaggacaggaagcatccagcacgggagaggctaggccagtcttgccatttcacatttttctacctgctttatattcgcaggcagctgactagattgtgcccacccagattaagggtgggtctgccttccccagcccactgactcaaatgttaatctcctttggtaacaccctcacagacacacccaggatcaatactttgtatccttcaatccaatcaagttgacactcagtattaaccttcacaatgtttattcatttttcatgtgtaggcatggctagccgacccattttcattttaaaaacatactatacatgtaatgcagaaggccacatctttcttctgctttttctcaacactataaagaaggtagaaaattaatttttctcattctaaacgtcagtgtcttccgctagaatgtttggatacagtaccgaatttaatccttttagctatattacttatcacttttgttttcatgattttaatgttttcaaatattttcttagttttagaatggaatgtattaatatcattgaaaatattattttcaaatttaattcttcttaaaagaagaatttacaaatgattcttctcattctcaggaaggagccatgaggggaaactatcatttcctttcgctttgccccccacttcccattccatcactgaaaaatgaaaagaaattcagaattgcggcttggaatactccatctgttctgaggtcactaagttgtgtttctctcaagggttctaaatcatactccattagtctgcttccaaatatcagccctgagactggagaccccaaaatgggtaataccactgagaaagtaattgcagataagtgatttattttttcctggtctaataaaaccgtgaaggttgaacactaaaattcttaaagcactaaaccaaagctgcataataactaaatgaatagtaggcagtttataaaagagcaagaactagagaagcataagtgatgcatgaagttaaagctgaaaaggactttaaacataatctggtaacaaaattttacagattaagtaaactgagtcttaaagctaaagtgacacaatcagaaatattcagctatttaaggcatttcgagagttgttcgaggttctcccacaatacccactggccctctcagtggatttagtcctgtattaaagtttgttcttctgtgagcactggtcccataaacatgctctaaaccctaaaaagttctgtgattcaacgagtttggggcacatagcatgtagccccttcgagatccactgtgcacactggcattttaaagtccccgaggattattccagcaagacaagctctgttgctttgctcagtccagtgtttgccaaacttacttgagttctggaccgttcttccttgcagcacctatgaatacctatgaaggtgttctggaaaaccttctgggttagggtagatcttgcagcatgtggaaggtaagtgaggtagaatatgagatatgaacatgggaataactacagttttattcagaaagaggaaagatgaagatgcaagactagagacttattaatgtcactagcaaaatagtattattagacaaaaatatcttgttctttaaaacgaatgccaaaagagattggtggttgttacactgatttcctactgctattgttaccaacatcaactttattaaacccagaatgcttaattaaatcattttaccctctgtttgttttccaggacactgtaatttatgatcgactggcagagacgtcaaaatacaaagaaattaccctaaaacatttagagcagtttgctacagaaggtaagtgtaatttggcaataaagcatgattaaaatacaaagaaatcatatacttctgataccttgcaggatccttattattattagacttagagattcctaaagtaagatatcagctgttggcaatttagattttactatatgctgttcccagcctgtgtttttattttactttcctaaaactatatttattaaaattttgagcaactttgtccccacgttttagatggtagggcctataaatgttttacttttagagtggatcatatttaccatttagatacttcactttgtatctcgagcaattcattaggaaaagaagcaagactcaaaaaaaaaaaacagatattctaatctgaataagaaagaagaaataaacctaaactgttaaaatagctattaaatttagtttcaactcaggactttctattaaaaacttacgtaactattaaaattgttattcaatttattacaactcaagacttttttagagagcccctaccacacgccaggctctgtgtgaggcctgagaatccaaaataggataaacaagctttgctctgtctctctgtcctcctgaaatatattatgtgcaaggcaaagcagtacatagtctagagagaggatctaggttagatgaaaggcagcgagggttgttaaacatgagagtcagttactacaagaatttgtagtcttatctcgtacttaacaatggtagttatagctgaatctaaatctccagtctcagttttcactcctatctgtttcagctggaactgttgccagtggcaccaaactgacctaatcaaatactttttcccgttaattcaggcagagaaaagataggaatgttttttaaaacactaggcaaaaacaaaagccaaaacaaaaaaaaagatggcttttgaaaaacctctgtgcagttcttcaaaatgtaaaagcatggaaacatatatattcataggattcagattccataaagcccagcctcagtccttggcaggtgcaacctacccagcatacaacacaggttctttttgttttggaggagagctgagggcatctttctcctctctagatgtgatgttaaagatactcaactcatagattttaatggtttggcccccacctctaccctattctttctgtccctgggctggatgacacttctccccatgactaccctccagtaagttttccagccaagtttccaagagagaaaaacatgtcctaagatggcctcagggatttaagttccactctcagtgatctggcaatacaccaccctttcttggaaggtagagttctctgggaactttgtatgttccttgcttcttacttctgatgtgttcccttaaacacattttgtcttgagatcactaagcctagcatctggtcctagtcattctaagagttaaatgacctggagtgagggcgttgtcttcttgtgaacctagatatctaactgcttccttgggtagctgacaagtgttttggcctctcctttcttccaatgcatctactcttttctggctgagagagatgtgagttacgaaattggcaggcaccagacacagggtgggtcactttacatatcagctttgattgttttcccggggtatatctgctggcagttcttttttgccactatccctcaactatacttagacttttaaactacagatttatgatgacaaagaatagtaataaatgcagtcatatatcctagtaagaggaaggtggctttcccagtagaccccaccagggtctctcttcctttgtaaacatctgtgaggcctctataataagtcagccactatgcttggtactgaagaactctgggtccctgctttccaagtgctttaatagaggagacacacaagaaaaactgtaaaacattgtcactcacgctgtaggagtgttactgcctttggtatctaggtgagaggagggtgcatcaaagagctgattttcagagctgagtcttaaactgcttgcaaggcagacagtgggcagtcgttgggaaaagcagaatggagaaaaagttaccagcatgtgcaaagacccccctatgtgggaagtgaatggcagggaatgagagtgaaggcacctgatgaaacatgtataagccgtgctttggggcttaaattttgtcctggggaaaaattggaagattcgaagcaaagaactgcttgataagattcagattttagaaacgccacactatgcatggaagatggattaaaagggttgggaattagaagcagggtaccaattttaaagaccaggggaacattaatctacattttatactaagtttttgtcataatttaattggacttcatcatattgtttgtatggaatcacttttttcaaaatgggactttgtgaaataaaaacagaaacctcagacttctgaagaaaatctttggtgtgttggggtgatgtatgctatctttttcagggttaagaactttatgttttgctgtggctgagatttcagagagcgactttcaggagtggcgagcagtctatcagcgagcatctacatctgtgcagaacaggctactcaaactcgaagagagttatgagttgattgaaaaggtacgtggatgattctgttgatcatacagagggtttggtttccagatagttttgatctttattcaaggaaccaatggaataaaaatcaaaatatcttgacataccattcactattgaataccctctcatcatctaagcattaacaagtattaatatgcattaaaatattgctgagaagcctttggggttagacattactttgtatagatcttcactcttttcacaattttggatcaaggtttggccagtctggcaatctccttgccaatgtatttcagtttctggatctctgaggatatggaacatgcccctacacacacgcacacattacatacatgacatgtgtgctttgagttaataactataatatgcaatgcaatataaaatagtactgtaatcacacagcttgcatagctgataatatatatgagagtaatccagtgcttacacttgtccagtcattgtgacaaacatatacctgtattatttctgtcgcagctgtaaatgttctcattttacagataaagaaaccattgtgacaaacatatacctgtattatttctgtcacagctgtaaatgtcctcattttacagataaagaaaccaaggctattaagccagaaagtgatggatacattatgatcgatgctgtataaatagcaagaatcttgcttccttaattaagaaaacatttttgtgtagctcttgccgtgtgccaggtgctgttcatagcactttcatctattaatctagtcctcacaacatccctttgaggtgctaattattcctgtcttatagatgaagaatccaaggtaacagagagggtaagtaatttggctgagagtacacagcttctaatagggggagccagaatcctcactcttcctccagtattcatgctctaaatcattcaagtgacttcattctaacctctagcttgccattagataactcttcaatagcactcatgtttgtattgcatagaatcaaactagcctgtccgctgcggtttacttgatcttttctccaggtaagtaaaggctgatactttgttcttctttcctctctatcgaactgtgtacttcgtcgtgcctctgtcttgaaaggtggctggtgccaccagtacctccctggactatttcccccctctgctcctcacgtcccctccctttatgtaatgtggggatgccatgttctagctgcagatggttttctttattgcacaaggttaccatatgcaactcgagatattggtgtcctgtctcctcaacagattatcactttttatggaaggtgattgtttctcatatagcctttgtattttgtaaggggaagatacctaaatataaatataagctcacatatatcatacctgtatatatagagatagatatgtagatatatctagatatctcctccttatatttgaactttttattctgcttacttatgaaaagacatgggatagcatgtatggtgtcttccagcatgatactcccaccctaaatgttataggtatacacacaccaggagacttgttatcagttgacttatttcaatgtctctcttgcctatcttccccacttcttccctccccactccctccaccttctcgctctccatttcctaacatatttatatatgattatgtctttggggcatttatgtagtaaaataaaataatctgaggccataatcacaatctcttttaatctgcccaactaaagtcacatatcttaaagcattagtgctattgatttttaatctttgcttctgttactcttttaagaattaaaaaaaaaaaatccagtttggaaatgatgtttttcctgtctctgaatataaggcagccttgccttgccttataatcctcatgagacagaattaatatgtaatgtcagaataaaaaaatctatttgaaaatggattctaaacatattaaattgtttccacttgaagtacaacttcagttctagagtagaatgtttaatgtacctaatatccttactctctggatgccctagagttttttatagattagattttctaggtttaacagttttgtttcttgttcttttaataactgattaaaagccttgcaacctccagcttttaactgaactagatgttcaacgttttcccagcagatggcgatcatgagctacattaaaatttaagttgactgaggcactccattaaaagtggggagagtgtgtgtatacacatatacacatgcatctatatatgtgtctatatgcatccatgtaaactacatatagtttacagatgacagaaacctcccttatgactgttttttacctaaaataaatgaaaacgggaatttataactaatttgtcttcacttcatagtaagccatgctctctgttgttgaaaatctaagatccggaaagattaagagattgggtcatttactcagccagcctgctccaaatgaagactgattctgtgtccatctctactcctgaaactggagcttcatttggtgatctatttaaataactttcatcaagcagttcatgtttacatgctcatgcacaagcaaatgagactgtggccctctgggtaccacggtctgagcaaattccctaaatgaagaaatcttaaggaacccaaaaaggtggcccacaaatttgacctgaaggaagcttttggagaggtggtaatttttgaaatgggcctccaaggattattttaccagttggaggagagcagacatcattgtagggaaaaagaatagacaaaatagaacagatgtgatggctcacacctgtaatcccagtattttgggagaccaaggtgggaggatcattgagcccaggagtttgagaccagcctgggggaacatagggggagactccatctctgtaaataatttttaaaaattagctggatgtggtagcatgcacctgtggtcccagctactcaggaggcctaaggcagggagaattgcctgagcccaggagactgaggctgctgtgagctgtgaaagtaccactgcactccagcctgggtgacagagtgagaccctgtctcaaggtaaaaataaataaatatataaataacacagggatctttgtgaccaagctgtttttctgaagtgtttccattaactgtgatcataggaggactgtaggatttttaatatagagagccagggttatatcacttctttcttgatctcagattctattctttgttaaaatcagctgggattagggttcagaagttgtgatttactgccattaaaaccactctagtgaggcaagtttcagcgtgtcagaccacagattcttccagaatgttaccctggctttaaattgagcaaatacagtcctagggttcatccattgtcttcttccttacctgctttaactgagacatgctgtttatgcaatctattttttatgtgattggaatctatttttacgtagaccataatattggacttagcatgtcattattggacttagcatgtcagacagtgaatctttaaactgtgagggtcgttttcacatcttttattttttaagaacagaattttccaagcaaacattgcctgaatcataatatatataattgacgaaagcaggactgctttggctggagtaagagtagagaggagatccaaactggctttcccctcagcctccaccttgccctcgtgggtgctccaggcagggcttgttgtgactctgaggatccactaagcacagtttgaaaaccatgtattacatttgtatgtggacttttagaaaacaaattcctcaaaagatcagtacatcattgtgcccgtatgcaagatgtttctgaacatatttgaattgatatgtcattgccacattaatggtagtattatattcacaacattcaaaatgtaaaagatttgtaaagtttttcctaaaataataatttagtacaaaataagaggaaatgttataataggattaaggttatacttttaaatgctgctctctgcctcttgttcctccaatgtttgttcaaactggtaattcagtttttaaaactaagttgaatccttattcctttgggtagtgtaactcctagcataagctgaaaaaaatatccaaatagaccaaaaatatacaacaaggcatttatcctttggttgtgatgcttagttactcaggtatgttactacccagcacactgagcactagaatgtgctgccttcactcttggggaacactatgggaaggaggatatggaaagtgaaaaagcccaccggctattgttatccctattgacagtcatctcgagatgagaggatttaggacttttaaatctatctataaaatataattatcagctctgttccaaaactgtactgtttgagctccaatacttgcattcatatggtaagcttttcaggacatttctaaaaattttaacactgagagttgtttcacgaatcagttgccgacacatctattttgtttattttttcttttgctgttactaaataaatcaagaggtgacattgattagtaggaaggcctaacttgttcaggaataagaaagctcacatggttagaatgcagatgggattatcatatgggatatttcagttgtcttgactcactttgcgaagaattgcaggttcacattgggcattgtggacagtaacacctcttagtctctttttgtcaccacttgagagaatttacagtggtctcattctttagacaacaaacttgacctgttttatctcaccctcgttcttttgaaaggtagtcaacatattaggactcataattttagattgggaaaccacttatagtgtcagcctatattttttaaatcagaatttgttttttttttttttttttgagacggagtctcactctgttgccaggctaaagtgcagtgtcggctcagtgcaacctccgcctcctgggttcaagcgattctcctccctcagcctcctgaatagctgggactacaggcgcccgccaccacacccagccaaatttttgtatttttagtagagacggggtttcaccatgttggccaggatggtctcgatctcctgacctcgtgatccacccccccttggcctcccaaagtgctgggattacaggcctgagccaccgtgcctggcctaaatcaggtttttaaattaaaattttgtatttcctcaagaagaattgtaaataacagaataattatgaagttccttgtttcattggcaggggtttctctgaaatttctcacctttgatctgtcactttaatatatcaggagccagggtgatatcacttctttttggtctgagcttctattctttgttaaaatttgtttacttttattctaacttatttctaagacacataaattatgttttgtctcatattcatactatgctactagattcctttgaaaattaatagtatagaagtctctggtctttcttccttattttataattaaaccattgtttgaaatatgaaggcgtgccttcgtggaatacataattttttgaaaatgtttaatatttatttgcttcaatagaaaaatacaattatgtctttagtactgcatagattacctactaataatttctgtgtttctgaaagtaaatcatttatcttgagaattacagaaaacagcgtaagctataatacctgcctagattcatcactgattaaagcagtatttccctggtgataagatttttatttttctcttattatgatgcgtggattgggaaacttttttttttaatggaaacttatccaatgcttttatctgttcaagtttttctaaaataggttatgggttagaggatcatttctgagcttaagagtaaactcagaacactgtaactctgctgtcaagccttttttgatcagatagcaatgttgtgttttatgtgcattttgtagtttgtgattgatgtatgtcatccactagattgaagtttcacgaaagcagggactgtgtttatcatatttatcactgtgtctccagcgcttgactgactagcctatgttaaccactcaataaatatttgatgaataaatgaattattcatttaaataattaattcagaagttggagcttaataagtacttgcttaatgaaagcctgccccctattaacaaatctagttcatgctttccatgcattgaaggcactggtatcaaatgtgctatcactaaggattaatttaggggtatgttagaaaagaagccaataattttacagaaggcattctttagaagtttagattcgttcatttataaaacctgtcttcaaagttacttgatatataaatgtgagaaaatcatgggttggaaagattcagcaacaaatatctgagcaccgctgcgtggcaggttctgttctaggctctagggctcagcagggagaggatagaagaatttctgccttttgtttcagtggtgggagataggtagtgaacttgtaaactaaaacaatgtcattccagagaggctttagtgccctgggcactgagataaggcactaagataggacagtgaggtagtgatccttttttacattatttcctttacccctccccaaaacgtggttgacatttgggggatggttaaagagtcccttgatgtggcgtaatatagatcaaccattacactcagtgtgactaaacaacaatttagtgccctttgcaacatatggcaacaaatggtttagaggattcctagagaaatataaaacttaatggaaaacaggacttttcttgagcattcatgactgccaagttcacagtaacttctgtattagaatggaatgcttcttcagataaaactaccacatctattcttagtagctgcacatatcactttcatttgtgctaaaaatgaaatgaaaatttacatgatgtatgggtgatttcgtggtttaaaattccagtagtttcctgttctatttgcttaagaacatttatagttagctcatttaattagacctgccactttctgagcatttactaagctccgcaattttcactctttaccctgattatttagttggagggcctctaaagtgagacacaacgtgatccattggggtaagcaagaaaatattagaacttctatttgttttatttcatcttttttagtttttgcattttataatgtgaataatttattaattttaacaatgttttacaaaaatataactgtgtcataagtacgtattcaacattttttcctagtatactcaaaaatgtttgtgagataactggtgtaatttcatctgcagaacatccttattaaatctacgttattaggtttatcttgctgttgtgaaagttgattcttaggtaagttaagttacttgctcagggacccatatccagtggttggcagagcagggatgcaaatccctgttctgtcttaattccagatcccatgctaataatctgtaagttacgttgccaacttgcttttgaagaaagcaagaatgtgtataaaatattggagacttgaaaaataaaatgaaatcaattgtgcagttgcataatcactagatcactcagggtgagaagtggggctcatcagcctgtttgagactcagctacttagtgaggcagcctctatgtactctatgtactgtattccattttccttgaaaacaagatggaaatatgtttttcatgattttccctcaactggccgttagaatcttcttatttaaagtacttaagatttccttagatctctaatcacatgctcctcctttctggtaggataggttccttcttatgaatgcttcgtggtagattttccaccctgggtattgctgtcttctcactcagataagatggatgcgttgtttttgcaagctacacccaatcacctctcacatcctgattcctttcagctgggtgtgtgaattctggccttataactaagcccttggctttgtgagttcaaatgtgatttctatggtttgaaaagcaccaagttaaaatctatttcttggccttagaaaaattaaccagttgaatgatttctccagaagtaggcaaatgagccattccaatggtttaaggacttaatgctcttagtcttagtactgtaggccagaataaagggaaaggaaagaaggtgttaggtctctttaaaacaaggatgatacccagtggaatgcagaacacagaggagcccagcaacctctgagaaccagtgttgtagaatgcctctgagaatcccacagcacatcccaattccagagttaacgtattttaaacctcaagagaatggtgactgcagtagcctcttaatttgtcatgcaggcttcttttgtcctaatccagccccatacagctactagtgacctttctgaaatgtaaatctgatcctgtctctcctcttctaaaattcgccaggtgtcccttgcctttgggattgtcagcataacacacagacctttccatttccattccctgctggcttttccagcctcatcttcctcactgccacacgtcacttcatctatcatttccatactgactgaatggcagcttctcaaacattatgtgtcttttcacacatctgtctttgtacatgtaatttcttctcatttggaatcacctcccttatccttccccacctctccccatttcttggctaaaccttaattcattgtttagtatttaaagtcaagtgtcagctcatgttggatagattttctttgagccatcgagactaagatgatacctcattcctgtgtttatcctttgtactcacataagagtacatgtatagcatgtaacatacaatgtgtataacattttttaagatagggtataacatataacgtgattcttccaggggagcactgtttctctaataatgataatcctgtattacagtttaaaggctttgtagtttgaaactgcaaggaaaagaaagagaattggtacctgagggtctaaggccaggctaagggagaatggtaggagttggacatggggatgtctacggtgatcagacaagatggagccaggtgcaaagatgggatgctcacaagcattctacatcaggagttgcaaactccagttcaagggctaaatccacccactgcctatttgtaaataaagctttactggaacacagctacatccatttgtttacatgttgtctgtaactgttttcatgctaccacagcataattaagttgttgcaacagagaatatatggccctcaaactttacagtattcaccatctgtccttttacagagaaagctagtcagccctgctctagatcagcagttctcatagttacgttctcagaccagcagctttgcaaccactgcacatttccaggcttcaccgtagacctattcaatgaggaattctgggtgtagggcccagcattctgtgttaataagctcctcgggtgattctgaaaattaaagtttgaaaagcaccatctagatttctggcctggtggctaattaattacttgggacttgatgacaaccaggcagtcagggtttaggagaaacaccagtaaggcaaggaggtacagttagaaaacgaggcagccaggaatccaaggagagtttctaatgaagctttctgaaatataaatttcatgcaggaaggaactcactattgtatccccggcacaagtacctgcccagaagcacctgcttggagtatatttgtgaatgaatgcaggcatgcatgtgtgcttgtaaaggagctaatcctgaaatgtgaccctgaggcctgcaggtaggaatagggaaataggtacacctgacgggtgactcaggcctgaggctgaaaccctctcatagaaatgaagtattattgaagaccaagaacagacacaaaagtttaaaaacctgatgatttgaacaaaattctaattttcatctaatctcagttttacatcccatttgcttccttgggtatgtattagttcttggtgttttgtccttacggtcatagcttagctgcacctctagttgaccttagacaatttactcaacctccccaaagctattaactgaattactaaatgtaaagcacttagcagtgcctggtacaatttttctatccgtgaaatgctggtttcctcttcaacatcttcctagtcataatcttatttcatatggaaataaatcctactagtatttatccacatttactccagtggtacaatttggtttaataatattactttgtctttaaggaaatttctgccaaatagcccatgttgtaatctgaagcctaggttgatacgagtttgattattatatctttctcatttagaagcatatcacaaactttaaaaaaaaatgacatcatctaagcactgacataatgtttgctaatatggaaataggtcactttgaggttccattatttagcaaaatatacatgtattggggaaaaatcataatttctaaagctatcataatacattttaccaaactacatgaagctttctgtcctcacttacagtagaaatgttacatttatgtgcctttttaaaaattctgcatacattaggaacatctgaaagagaaaacattactggaggctttactaggtgaataaacattattttatgattttttcagtgataactaaatctatattatgtcaaagagtcatcaacctcaagcctttataacatttagcttggtgacatttagaaagtaaaattagtgtttggagtttttttttgaattccataaatgccatgggaattttatcgcatttcaacacttgctgaatatgtaattcccctagtgcccattagtggccatctgtgtaaggtaatacatatttgggatgaaattgattatagcctaaacactcttgtgttatgatcaggaaaagcacgcaaagttcaaatctttttttctagtgatcattatatagctaacaatattaatttccaaaagcagaacagcccatcactcaagattctgatctcaccataaatgataccagggcaaaaggaaaggagtctgcagaaccttctgctaaaattaaccagtgctgttctcaaggagctcctgggataaagggaaaattaacacgcttatggagtacagtgtttccttcataggcatcaaagtagacccattacaattttgctgaatattccgaaatgttttattattcttcttaaggatttgtgttaaagccaccacaacactccatgttaacctacttgtgtgacttttctcagcataccttgctggccctacatctttgatcctttatgttatttgtgcctgctttgaaaatgtttctcttttacctgtgcaaaactagatgctttccttctttcaaatatgatttcaatgtgatctctccagtgaagtcattttatttttataggtatgtgagtggtaatgtattttatattggtggactttctgagctcatttttccccttagagtagagacagaaaatatacaaaatatttgtttatatgtttctaatgaatgtgttcgtatcttggctcccacattatctagttaccccagtgttttgggaaacatattgcaaaaaaatatttttgcaggaaattttgagggcttgtattaataagctgtccccatgatcactaaaaaaaaaaaccttatgccttgggtaaaatgcttaaaatttgaacacagctatatcctgatcttcactgggatgtgagccagaatgatttaactgcaaatgccctaaaagtagctgaagatttggaagaatcattgtgtaaacatttaaattcaacagttgtggtgctggcatcactgatgctgaattgttcttcctttccttgcttgaacttcttgatgataattgttcatcaggttatggtagatttcaaatctgcttcccattaaaggaaataaaataatgctatcttcttgaaagaaatttaccttcctgtattatatattatacactaagaagtcatgcatcaagtgtgtctaataaccatccatattatttggaatatattgaaaagaaaatggtctagattgcagcagtatttttgtaatttctggattttggtcttgtcattagctcacttagcaaacatactaaatgctgacattcaatgctgtggagtcattaagatgagcaagacgtggtccctaattttgagcaaacctaccatactcatgcatttacacttctcttaatgtacatgaagatgagcaaaattctgtaggagaacagcagaggggaaattttattttaagaaataaaggaaagcttaaaagaaacaataacttttttttttttttttttttttttgagactgtctcgctctgttgcccaggctggagtgcagtggcttgatctcggcttaccgcaagctccgcttcctgggttcatgccattctcctgcctcagcctcccgagtagctgggactacaggtgcctgccaccatgcccggctaattttttgtatttttagtagagacgaggtttcaccgtgttagccaggatggtctcgatctcgtgatccacccgcctaggcctcccaaagtgttgggattacaggcatgagccaccgcgcctggccaagaaacaataacttttgagtttggttttagaggatgaaccaagtttcaccaggcaaggcagtgggggacatgtgtgtgtatctacttagacatacatactcatgtatacaaagacaaatactatgcatgtgcgtgcccatcctgtatggccgctatagcggggactgttgcctggccaatttagcactcattcccatcccccttcttcctcaacagctctactatggagcctggaaaagctaaatacaaatagttggggttagccatgtaaaactatctggccgagtatttggaaatatgctgagggcttttcaaaacactttgcttttcatgtaagagatagatacagttggtatttttgtcttctatatggcctttataattataccttgggacattgggagaggtcaggagaatgagttgaggtatggtcgagctacaaatttaatgtccacaactgcccagttcagtactacgtaagtgaggaaaattaatttatttaagccattgttagatttttctattacttgcagccaaaaagcattccaaactaatgcaggtataaattacatgcatgcatatacacacactttctctctcacttgcatgtttgtatatatagttaactttattgttcatgcctaagcaaagcttgagactaattttagacttcaattttggtgaacaataaggaaaagtagaaaatggctttctttgttatcaccaattctggcttactttcccttgcattcattcccttgcatccattctgccctcacctatattttaaatggaaaaaaaatgaaggcaagagaggagaaaatgattgagaagaaagataaatgctgacgaggatcatgctggaggttgaaacagggcaagactgagaatcagttggttgtggcctgcagagcactgttaagaagggtacccagctagcaacagtgcctagtcatgtgatggaaataaaattttatatcttaatccatcactacattcttatgtatttaggaccaagaacaacattatctgtgtccatttggcaaaccaggtttccctaacagccaagagattgttctctcccgcttaccatctccgtttaggaagatgagagtagaaaccattctttctcatgagagattaaaacagctttggctgggtgtggtgactcatgcctttaatcacaatactttgggaggtcaaggtgggcagatcacttgaggccagcagttcgagaccagcctggctaacatggtgaaaccccgtcttatacgcaaattagcccagtgtggtggcacgtacctataatccaagctactctggaggctgaggcaggagaatcacttggacctgggaggcggaggttatggtgagccaagatggcaccactgtacttcagcctgagcaacagagcaagactccatctcaaaataaataaataataaaaataataacagctttccccagagcccattggttgtgtttggtcttatggtacaagacaatatctaatgagcaagagatctttgagtctgatcttcccctacacaaatgtggaactatgtgaaaaacattcaacttgttcttccttgcagagactaatactatcactttgttgttcttttcctcttggtttctaattgtgtatacatttcctgacactgcttcaaattacaatttaatagtgttaacatgtaacctcactgtttttaaacaggtcagcaagattgcatcttcactatggtagtctcccatagctgtttgtatgtttttttttttttttttttttttttttttagaatgcctgtcctttttaactgacttttttttttttttttttttttttttgagatggagtctcgctctcttgcccaggctggagtgcagtggcacgatctcagctcacctgcaacccctgcctccccagttcaagaggttctcctgcctcagcctcccgagtagctagaattacaggcacacaccaccatgcccagctgctttcttgtatttttagtggagacgtggtttcaccatattggccaggctggtcttgagctcctgaccttaagtgatccgccagccttggcctcccaaagtgctgggattacaggcgtgagccaccgtgcccaggctgtttttaactgactttggattttactccccttctatgcaaatttattttagaatctgttccttaccttaggggttgggttagacagtttcagggagcctcagtgtaatgcctaaagactgcatgaaagtcaaggatatttcagaaaactcaatgggatagttggaatttacaccaaagtccatgaattatcatttagtctctgattttaaaacatatacacacttcaattttttgtttttaaagaatatgaacggatttttaaaacatttctaccactaatttttttcagaatcttcagctacttggagcaacagccattgaggataaattacaagatcaagtgcctgaaaccatagaaacgctaatgaaagcagacatcaaaatctggatccttacaggggacaagcaagaaactgccattaacatcggtaattcacctagttcacattttacatgttggtgctttttaataagttaatgtagttcagaagatggatttgagacatttcaagatctaaaagatttgatatgtcaagattggaatattccaatcttttttcaccattgcatctctgcctcccatccataagtggcacatgtggataacatttctgcagttgtctggagattgggcttatggaagatttatgtattgatacttgattatgtgaccaaaggttattttaagataataggaaagaagaaggttgctaatttgcattcatactatgttaatccccatgttttggaaagagtttataatagctcgggcttccataagagcgtaccacacactgggtggcttaggcaacagaaatttattttcacacagttctagaagctggaagttcaagatcggctgtcctcacgtggctcctcttctgtgtactactccttatgtctcttcctcctaaaacatcagtcctattgcattacagtgctgtcttagtccgttctggctaccataacaaaataccacgagctgggtggcttataaacaacaaatttatatctcatcgttctgaaggctgagaagcccaaggttaaggcaccagcagatttggtgtctgatgaccactggccttctggttcatagatagcaccttcttaactgtgttctcacatggtagaaggggcaaggcagccctctgaggcctcttttataagggcaccagtcctattcatgagctctctgctctcatgacctaatcatctcccaaagaccccacctcctactgtcaccatactagtgactgggtttcagcatatgaatttggggggaacacaaacattcagaccatagcaggcctcacccttatggtctcattgaaacctaattacctccttaaagactatgtccaaatgtagtgtcactggcggttaggagttcagcataggaattgggatgagtggtggtagggagatcaattgagtccctaacagagatcttacacagggaaagttgtttggcattggaagcctgtagtaccagcaatatgccaaaaaagaaaaaaaaagttttttcaccaaatttagtaaaagtaggtagcttgagcactataaaccctgacatggatttatcctcttgatagtaatcatatatattacatacaaaactccacccaagttgaaggaagtattttagaggagttcacagcatgaaaccacattttttagaaagccattttaaaatattgtgtattttttaaaatttagctaacatttattttagaagtattagcagtcagcctaacatatcctgtaaatataaaactctacttcaaatttatagcaaattgatgttattaatagaaaattcagtttattttttaaaaactagtagaactttacaaaccacacaagttgttaattttgattgtaaaaattatcgctgctattagagagaaaatggaaagaatatatatgagaaggaaaataatggtgaaatgcagaacatattgaaattgggagacctaaaaacacaaatatgataaaacagactacaaatagaaaatatatggcaataaagggcagtaaatgtggaaaataggaaaatgtcaagttcaggatatgttcaccattatgaatgttcctatgaaaaaagagtatagtagtggtttctggtaacatttaacatttagaatcttgagccatgattgattcctagaaaaacttagggaagattcacccattcagcataattgtggtatatacagtgccaggtactggttaagtgcaaggaacagagcagggaacgaaagaacccaaaatctctgcccttgtggagctcagatactagtcagagaaacgcacagtaaagtaaattagaaaagcacatagtataatagctatcaatgattgctataaagaaaactaaaatgggagggaaacacagggcattgcacagagggattcagttttaaatagcacagtcaggaagaacttattgagaaggtgacatctgaggaacaacctaaaagaggagagggagcttgtcgcatgatgattagagaaaagctgtcttctgttacagagagaaacagcacaaaaataaaagaaagaatagtagcagaagagatcttcagcatagcagtgtccagggtggacggggcctcccaggccactgtcaggactctgcatttactgcaagtaaacagggacatcacttgatggttctcagcagaggaaagacatgctctgactttcctgtaaaaacagtcactctggctgctaggctgaaaatggactcagagggaagcaagtgtagaatcagggagaccagtgaataggcttattgcattaatccaggggaaatatgatggagacttggaccaaggtggtaacaagggaaagggtaagaagtggttggcttcttgatgtgttttaatggtaagaagttgttaggttcttgatgtgttttaaaggtagagacaacaagattgactgatagatgtagagtatgagagaaagaaatagatcaggtaacttcgaggtttttggccttagcatccgaaggatggaattaccattaacccaaatgatgaaaactgaagggaaagtaggttttcttgatgggggctggaggagtgtggtcaggagcctggtttttgagtaggctgactttgagatgatggaaatgcctacttcctatgtaagtgtctgcggttaagtaagtacttggatatgagagtctggagttcaggaaggagggctgagttgaacataggagtttcaaaatggtcaacatttagatgatacatgaaatcatgagacggaatgagatcacaaaggcagtgtactcacatagtggaattattttaaataggatggtatttttaaaatgtgacatcagcagagttgcctctttagacacagtcggctgtagcaaacaggtacagagtaggccaagttgaattgaacaaagggaggatttttgccctgcagtaagtgcaacaaagcaagagagggtaggaaggtagaggatgtactgattctcccaggaagggagatggtgatgggatcagcggatccaagagacagccacctgcaccttccctaggtgtctagagaagggttctgttattctattttctagaaacaatcgttggcctgtcttttgctcttcatgttggttatcatgaagtgtattacaaatccatttgtcagcttcaggacatcgagaatccttaccaccatctttttccagatgtctttgtagccttaacaggccagatgtacttgttgcatatccctcctatggcaagcaagagcatttcatgtttaacttcctacaaacctggaaaacaactggttgccctcagtcattataaaatcatctttagatattttcatagtacatatcattgttttaacatctttacatattctctggagaaattaattttaatatactctgtgtttggatacaggacactcctgcaaactgttgaagaagaacatgggaatgattgttataaatgaaggctctcttgatgtaagtaaaattatgtatttttaaaactcctttaataatatattcatgctatagtattttatattcagatagctatggaaatattttatctttctgtggttcaaggtaccttatcactgttgttctgttttaacataatgtactctgttttgagtcacattgatgtaaattgattcaagctttacatctgtgacagctaaaagaaattgcaaaatgatttgcgtaatattgtgagacagaaaagttgttttacaaaagcattatgtcaagaggttgctgagtgactgcaacttgctcatatccaagtattctgtatgttaaacattttacatctgctttaacttccagtattcatatatattttacctcttctaaaaaaatgtgaaagctattgaacaacacaaaacaaccattcctagtaggacggactttctttaatgtcctaacatctggaatgaaatgtaaatccctaggatgtcttttttcatggctgtgatcacttgatgttttatttgggaaatgaggaaagatttgttaggaatacagtgtaaaatagttagcaaaataatatgtaggtcaagtgacctgttaatattaaagtaaaggagactatttgttattttaggtggaagacagagccgtagaggtgattatacaacttcttaaaatagtcattatgacgcaaagaacagagaaaaccttggtaattagggatgttgacgaagctgagaggccacatgcgtggaagggatggtgaagaaatgactgcagaagggatggtgttgatgtctttgtcagtaacatgggttacaggtggtgcacagtttttcttaatacctgaaggaaatcagagctgtctctgtgatgcagaagcaaaagcagggcaagccacgcgtcatttgatctggtatcctttctgtctggctttgggcatttaccttccgtagcgtatggtagccttgcttcttttgtcttattcttgccatcatctttctccagttcttggataagcatgttctttaaatgttttaagtatcaagcagagaatagtaatctcaagaaagagaagtgaaatatcaaaaatattcattgtgttgtaccagtgtattgttaagacactggcatttattttcatttttgaggtttctaagatggtaactcaaaattaataaacacttcaaaggtacttggactgcctgtttctaccagagcaaacattggtaggagtctcaagttgaatactaaatttcagtaaaagcaggaactatgtctgtcttttctggtttatcattctttttcagtgccctgcaaatggcctagcacatagtaagtacactataaatatttgagaagtgagtcactgagtaatttttaattaagggcttcttttttgaaaaaaaaaaagtatatcagttttaaatttggttgttgttgatcatatctgatattttttaagtaaagtggctaaaagtctccttagcagttcgagtagcagtttaaagatcacaggcaaacactgtggctgaatggattaacactaatttgtccagctccagactgccaggcattctaacactgctgtctggggaaggcttttctcccagggagttaagtggtgactttacaaatctgactgtttagggtcagacctgctgcagtgtactcatttgtttctcagcaggaaaggaaacatcacttcgcgtagctccttccgatcttgtgtcataaaacccatggctgagatttcaggcaaatcattagatgtgctagagtgcctgtaggtaaatcattattttttcgttgatatggaaatggaacgcatccaatctgtgttcaaattgtactgatcagtagtgaatagaattattttatcagcacaaagaataattagcatttaagtaatgaacttaggaatataatgtcttaggaaatgtgaatgtgtgttttgtcaagtgacaattttaatgagtgcactcaaatcattctgtgaaatagcacagggtgaagagcacagttctgtcccaatctgactgtgggaccgtcagcaaattaaaatcagcttctctgagccagttctgctgcctacaaagtaaggagaatgtaacctttggcataggattagcatagttagcacagtacatggcacatgtaaaaaatgagatgttataaaattttgtagagagaatattatttcagtagcttgtaagttgttttgcatagtgatcatttttgttataagaaaatactatttcctcatcttttacttttttccctaaggtggcaagttacaactgtaggttctctttcacataagtgatacatattgagcatttttctgttcagattttctactaaaatattgttcctaaagctgataaaatccaaaagctgaatctttttcttgtgttgaacttctataatgtatcatatttgaagctcttaaaatttcagatagaaaaccctttctcctagtgattatgataatagaaatctttgtcttccataatctagatcaccaccgaagaaattccactgggctttctaattttttctttttgagtttcaatatgagtatccttcttaaaaaaaataactcttcagcatttttaataaaaacatttaaataaatacataagaccaaactacagttgaaaatacaatcataatggaagtctcactctacagacctgatagggaaacctgacaggtctttctgccttggttcattcttgactcctttcatagcaagagcagcagccccggctagaatgtcgtccaaaagcaaagccaggtgttctcacccagttacccaccaggctcttgtaaaattgccaggatcagcagaaagcttgattttttttttctttttagaaaaaaatttcatggataaatgtaattaagaatcatgtaaagttgatcaaaacctattaggtatttctgataaataattttttaaatttgaataactttctatagtgctgctgtgaactactttactaggagttctgattgtgttctcaatatgagatttctgtttttgttttgttttgttttgttttgttttgttttgttttgttttgtttttgagaccgagtctcgctgtgtcacccaggctggagtgcagtggcacgatctcggctcaccgcaacctccgccttctgggttcaagcgattctcctgactcagcctcccgagtagctgggatcacaggcattcaccaccacacccagctaatttttgtatttttagtagagatggggtttcaccatgttggccaggctggtcttgaactcctgacctcaactgatccacccagctcggcctcccaaagtgttgggattacaggcatgagccactgcgcccagccaagacatttctttaagcatctgcaaaggcagaaatttcaaaatactgatttgaaaggggaatattttacttctctaactccacagcaatgcccaggaaatgtcccacagacttctaattaatgataaacccttatacctagtgatacttttgcatctcttttatatcgtttagtttgttttaattttttaaagtctgtctgttaaatctggaaacatctagaatgtgagctaagcactagagaatctcatactgtggcccatctttggctcccagtttctaattaaactctttcgaaatgcactgaaacagttctggaaggattgggtttatgcgatattatttatatcctccatggcacatcaactccaaatctctggaaatactttcaggcaacctaacatattatatttttgtataggtttggtctaagtttcctcttgtgggagaaaaattttgaagacatgtttcattgagatagctcaggatttcaccacaatttcatctaaatctagagtgggtgggaggggccatcattttttaagccattaactgtgtgacttaaacagattttttagaggtatcaaaattgactgtcttgagtctctcgtgatatacccttaaccttgatctctccttctggcatctcttttatgtgaggagttgtgggatctgtccccagaggtagagctacatctcaaatccattttttctatttttcatcctcctttctgtactgccaggctttcctagaaaacaaaagtggggtagaaagggaaaatatacactatacatttattaaatcaacaggcatgatgtttggagacataaatttcctaccctcaaaagcttgcagtcagtgttcccaagcttaactcctgagaagccctgccacctctccttctgatcatcctggcagtttttctagattgtctctgctgttgttgatgttcaccttcagcctgatcaggagccaccacctaatgtatgagaagtagtgtttggatcctgcaggaaaatgcagctttctgtgtattttgtaccaggtactagattgaggactttatagggacaatcacatttatacctgaaactattaatttatatgttataagtagatactagtatgcccattttacagataaagaatctagaaggataactggaccaagctcaggtagctcggcggcactgggggatacatctaaggaatttgattccagagtgtgggaagcaaataggtttttctagccttcatctactacatttgtaaaacaagaataatgaaaatgtccatctcatttaggggtggagttgtgaggattaaatacaacaatacctgttaagtacttagaaacaatgctggacatcatcatcatttttttttttagtattattatttctagaggagagttcttcactgctgtccgatgtaacagatgactttgaacagccattctactcttaaattacttaaagttctctacttaatttgagaatatgaccccaaaccagctgtaggtttgattatggataccagtgtttcacttcacttacatattttacagaaaatgaattgttagccacattggatattaagttaacaagcattagaatatatatttttcaacactgtggtaaaagaaaacccttcatggaattgctaacttttttctagctgaatttgacattctaacaccatgtaagttttgactataacttataggacattcaggacataaaggctgaagttgtcatctgtacccttttaagctcaacttacatgtattatgcggacagacctcactgttttgggaacgggccactgttgaatggcttctgaaagaaatccagaataagcaagttattgactcaactccagaaaagaagggaaaaaagagaatttgggctacttcaggttttgttttgatatgtcccatgagtctcatacaatatattttgtattgctttgaaaatagtttaggcaagttttaaaccacactgagttttcctccactgccagcattggtgcttcagtactgtgaattttcttttaccattagcaaagctgtttcagctttttggcttgaaattttaagatcaaagtttaactttgaaggtgttaatgtatccctatcagaagcaaagatatttttttataatgtcctaatgcaaaaagattgttcgaatattgtctggcacactgcttactccaagtagctctcagtaaagaaagccaactttgttacatttgaaataaatgggttagtaaaaagtgtaaacattaccaaaaaatgaaaataacatatgaacaaataatctgttctccttttcctggatttaagacagtgtctgctgcaagccaaagtacgtggttgaaaaagttccatcaaacccattgtctgggctcatagaattaaatgtgtcctttttttttaaacaaaattcagcgaggctggcttgtgctgagaaccttaagtgaggttgttcacaaatttatagtgtgtctgttttgagaagttcttccacccctcaaccctgaatattctttgcctcatttttggctaaatttctgaactcttccaagagctccctgagacctagaattgcagataaatgctttctaactagtctgcccccttgccattctcccccacaagtttgttgacatttctgagaggcgcacgccatgcctcgtgccctctttgcatctctgccaccaataccttctgatgagtcagcacacgcataaaatgacagtttttaggaaacctactatgtgccagtacgcctggtgtatctgtaatctgtgctcctttagagctggtggtgtttgtctcagttccagatagagactttgagttcccatgtctagcaagtgctggaatcttaaatgtgaaccttgattgcttgaagtcccaaactgtttttgtttgattttggttttaaataaccgtaccttctccagtggcagcagtaactcatttgcagaaagaaatattccagcagctatctcccaaacttattaacttgtttcattttcattctccatccaacacttatccccctttcccattttcctacctcctttaccactcaccaccaggaccacagaacccctgaaagagggagactcttctggaatatgacaatgcccaaatcttgtgattatggaattctgaaaagacctcatatttaattttgctaatacaactgtacataagatgttattgactgtgtgtgtgtgtatatatatgtacgtatatatgtgtgggggggggtatatgtgcatatatgtgtatgtgtatatatgtgcgtatatatatgtgtgtatatgtgtgtatatatctatataaaataatggaaattgtgtgcgtttgggatttgcactgagaaaatatggcagatcatgattcttctattttcttacattaattaatttaaattatttagaaaatgggcccaacattagctttctctgtggttctgggtaacaatttctcacaggccctagttgttaccttctccaaactgttgatttgtaatttgcttattttgagaaagccagttgtgtattctgagcagcctcttcctggctgaattgaaggtaatgagagagactggatgtctgcctacccagttcctccccgcgtgctttgcttctgcattcactgctgccactggagaatatttaataccaaagtcaaaataagtgtttaggaggctttcagtggtggtttaaaataattaccatgggggctttggtaaaagcctttatccagaaaactctttaaattatataattatatcccttatcccactcttccttcctttccctggatttgtctgtctttgctacatgtccccacccccgtgctgaaacacagactggacacagattcagcactttgctgcctctctctgcattgtaccctaagtgagactagatgcctcgcaagcacttatttgcctgatggaacctatcataatcccaaatctcaaacctctgttgaggggccaagagcaatttacccagcactacaacttcctcttcctacctgcctccattttgtgacccttgacctttgtcagatggcatgacccttctgggagattggaccacttcctcaattacagtattccatatctacccccgtcctgggaaacctatatttgtgtattagcaaagcatggaattttttttctcttttcctctccccattatctttagcaatatatattgattaaatgcgttcgttgggccgccttcctctaagctgtttggaggacctctttgaccatgtgtttttaatgacttcaccttctgtctgccttacccgttttggaaaaattactttatattggtttgattctatacacatatgtttttcaacattatgttctagtacaggctacgagtttggaaacaccaaagctttttgatcaaaaactacatcaaaaaaaaaaaaccaataaatacaattttttaaaataagttttgattttataatgtgtcagggggttgcaggggaaccacgtcaaagagagctagtgatcctgactgggatgaatactaaatgggccagttgtacataaatgtagtttctccctactctcaggcatacgttcttttactaccacctgcagtagctggaggagtattgatatatgtgttgcgtaggagtatatggaatgcccagtgttccactgaatcaataacacattgtagaaaagcaagtaatacccaatggtttatccatatgttattatgggagccataactcactctttaagaacgtgctaacattgtccatacttgatatggtcataatgtattattaagaatgtttctagaatgttccgttaattcataattttaaagtgtgaacatttggagagtgtaagagtagagacagaatgaaacatgatttgaccataaatttgtaaatacctcacgtcttaaatgatgatgaggtggagcctcaaaccaccaaaacagctaataaaatatgtgttagtttaagattcttatatatatcctcttatttgacattttaaattaatttatagtagattttaaaaggtagagccttagcaaactaaagtaaggtgctggtggtgtttttgttttttactcccagtaaacatttatttctctgctttaaaaacaaaacctaagaatgaactcagtggtgttgtgtctgaagaacatgtcagcaaaacaaaccctgggtgtcgtctttataattaattattttaaaccaaatacatacattgatgtggtcacctatgcagaactatacagataataaaagagaaatgccacatcagtttataactttccaattattttcagttaagaattctatcaggttggagacagaaattaagagagaaaatcagtggttagttatataaatatttgtcctcctaccatgtaccaagagctatatgtcacatgagactagataatgccatctttcctagattgagaagacaggtttccagaagtagctgatagtattgaatgttggcagtcaaaaggtaaattgaaataaaattgccattgggagatttcataagaaaacttaaaattatcccagtcacatgagatggagtctcactctgtcgcccagtctggagtgcagtggcgtgatctcggctcactgcaaccttcacctcccaggttcaagcgattctcgtgccttagcttcccaagtagctgggattacaggcacctgtcatgtcatatccagttaatttttgtatttttagtacagacagagtttcaccatattggccaggctggtgtcgaactcctgacctcaggtgatccacccgcctcggcctcccaaagtgctgggattacagacatgagccaccaagcctgacctcttttttttttttttttttttttttttgtggcatgatcttggctcactgcaacctctgcctcctgggttcaagaaattctcctgcctcagcctcctgagtagctgggattacagacatgtgccaccacacccggctaatttttttgttttagtagagaaggggtttcaccatgttggccaggctggtctcaaactcctgacctcaagtgatctgccttcctcggcctcccaaagtattgggattacaggtgggagccaccggacctggcgcgtttcgtgttagtacctttgttagacctgataccagaggaagggcagaactaacctttcctggatgtcacttcatgccaggcactggacagggcactttattcacaaataaaggagttagcacatcttatcactataatctctctacaaaatagatagtaacccaatcttatgaatgagaaaaatgtgattcagagaagttaagtcacctgcctgaggaaagacagccagtacgcggcagagcaaggattcggaggaaacctttccaataccacacagttggccttctagagtcagtcaaaccaaaaaaattacattaaatcatgaggaggtacattgaaatacatacataactctggcgaagagtttatgataggccatgaaatgaatttacccataatactttttgatatgtgtgatataatcctttgtagaactctaagctcacgtagctgcccaagatccaaaagggttttggagttcttgctgtcttaagtaagtggttgaaactatttattatttcctgtttaacttttatcattcattagggaatttttttcaaaataacatttaattttcccttttccaagaaggtgaataatgtttgattagtttatctttaccatactgtacatccacctgaagttgacgaaaacctggagttctgagccatagggtatgtttcgacctttggaacttagttctttacagtgtgacgtcattttattttcaaatgttatcagtgtccagagccattgtatgcaccctcacgggccagcctggactttctcacatctcacttttttatgactgcacgtttgtatgatacaggcagaccactgctttctctacactctggtaattcgcatgtgtctgctgaccagctatgaagagttgtgtcacagtggctctgcctccagttacctcgtttcagtagagtcaccatctttgttcagcaagatttctgaaggtgttttaataacattctgttgcattttttcctttctaaggaagggaagtaaaaacagaaacttgtgttgctgatactgtagagggaagcacaggcttcctgaacttatgttcattctgacaaaggtgaaagttgtatatcttccaaaagtgatttgttgttagttccgatcatatgcttatttgtttaactggtggtgaactcatgaagaaaaataacaaatccaagaataacgaaattgtcttagttcattcaggctaacaaaagtaccatagactgtggggcttaaacaccaagtctgtttcccacatttctggagaccaaggaattcaagatcaaggtggcagcagatttggtgtctcttgagagccttcttcctggttcatagacagtgtcttcttgtgtctgtgcatgatggaagaagaagggagccctccagaaatgctttaaggaccctaatcccattcatgaggtctccaccctcacgacctaatcacttccaaagaccctacctcttaacgccatcaaaataggagttaggatttcaacatatgaattttggtgggatacagaccctcattccataatagaaatacattattaaatgatgtatctgaaactcaaagtataatgcagaattttgatttttttttcctttctgggaatagaatcctccttgtaacataagtttatcatttgacctgcacacatttaacagattcctaagaataagtatagatgctggatacttgtttttgtttggacctaaatgccaaagtatactttagataagtatagacaggctttttccttttacttttttgtttggggttagtcttactgatagacaccctctgggacatatatgagagagcacatgttatttactgaagccacaaataagtaattgcagcctcagagcaagatctggaagccactaccattagctgcttcatgtcggactatttacccataattttcacctcgtctctgctctgtgaacccctggctaacgagtcatggagtcaaattctagaggctatgcttttcctttccttagggatgtttccacattctctactagggtgttgcttggatttgttcctgagtaatactgtctttcctgtaaacctcggctagaaagctgaaaaggaccatttttatgcaggtgctttctgcagcattactttaggggccatcaaaaacacagtccttaggtggcctcacatgttctttgcacatctggcctgtgggttcgttagcttgttccaagcagagttttgccaaaatgaaaatgacaacttgcatgctatgatactttccaaacaaatcagggcttttaatttatttcactatgaaactgtgtcagatttcattgtctagggcaccctcacatctcacttttttatgactgcacgtttatgatataggcctgtttttttatcaagggtttttatcaagggtttcctcaatattaatgaaaaagattgccataaagctgctagtctctaatttctcaaagattgctgttacattattttattagagtttattatatgaacatattacctgtttgggaaggttatatcttaatgattcaaagtgaggaattctacttggcctcattatctgccaagcatgtttctttatttttatttcccaagcatgtttcttgtaaaccaaataaatattatttctccttggcccactgttttacaaccaaggttgatgactaagtagctgatctaaatatacattgtattacattcactagacaatttaaaatatttgaggccaaagtagatactagatcatgactacctctttttcattttctctatgagataagcacattagcattttctttattctaaatcagagtatttaagagtatacaggagttttacaggcagcagacaacaatccttaaaatggtcacacaagaaaaccactttaacttcctataagatattctccaatcattaataatttggttattctgttattaccttttcatcaaagacctctgttccaaagggaatatagacatataaatagataagctactcaacatcatgctaccttgtataagtatactgtaaatgaagtatttcagggatccaaaagatagaggtattgatgtcacctggaggactcagggaaagtagggtcaagggaatgtgtcttggtttatttgttcattatttttagaataagaaaattgtgaccttttaggtaggcttaaaggaaaaggaaatagtgccaatggggagaatgaagatgcaaagagaagtgaaagaaacaaaaggtgagaaggcaggtgttaccccagctcaagaactagaggggattaggtaaagggaagttttgaggttaaggaaggaaagttgagggaattctttctgctataaatgtataaatgttctcagtaaaacaggccgatgtttgccgaagtgacaggggccaaatttggactcttgaggagagaagaaaaggtctggagtagcctctgggaaacatggaatccactagacatggataaaagactagaccagcagtgatgagcagccacataagaagagggagctggagtagatcctgccctcgcagtgaggtggctttttcctttctgtgttaacgagacagaacctagaggttgtgttgggtgtggcctaaatggtgaatttgcaaggcaagaaagcatagtaggaggttcaggctaagggcttccagtgagcactgggctctgtctgtgtggtgctgtgggtatgggaagagcagagcagaatggttgtccagaatgaccacacaggctgcaggtcagggaaggggcacgagaatctcactttccactgtggctccctcccttgcctggctgagtgtttgaaccccagcctttcctcttacctgtccatctccccagattgcctttaccttgcaatgtctctgatgctcctggactttcagcccacgagtgaaaatatgcagaacaaggaaatagagatcttttatttcattgagcctgtggtctttgatcctttttctgatttagcttctcattgctatattttcacttttacaagtcactaagtttcaatatttaaaaatttcccccttcagtagccaaaaaaacaaaacaacagctaatatagtaataaatttatccttagctacaggagataagcttcaatgcaatgcagccataaagtatggctcctggacttaggggagaagcaataaagtttcataaataaaagaatttgaaaatactcccggcagtaaataaggataaaatataacttgtaactggcagcacacagctaacaacagagcttacaaaagaaaactataaactaaaatgagaaaatgtttgcagctttttttgttgttgttaccttgcaccctaggtgggctgacgagtgaattcactgtgagaagtttttgactcaccttctgaaatgttatttctatcacatctcttgacaccttctgatttgccagagatctgtgatagtcaccaacaaaacctagggatactgatgtcacgaatttagagaattttcaataaattttaaggtgttagagaatgccttataaaggagggagagcggggaccacaggactgcataccctatgttggttcatgagggcgtttcacagttctggggtttacttgactttcggtcttgttttgcagctgagctttcaagaaattcgaagtcctcctgaggtccgtctcaggtttcatttcaggttttcagctcagaaatcacttgggcaatagcttaaaagaaaatacagaggctttttagtgagcaatgcctttgtttgaaagtctgttaaagtaatggattatttgttccctggaaaattagggagcaaagagaagacctctctctgtgtgtgtctctctcttactctctctctttctctaatcagaagtgataataaagggggaaatggagcattgccaacgggatgaaatcagaatttatcaatgctctcattcaataaatatgtatttcatgagcatctgtaattgcagacactgcctttgttgctgggaaacaggtttaacgcggtctttcctgtcaagaaactcagggttttgctgcagtagaatgagttacacttggtagcgtggactgaacctgggagggcttacagggtaagcttggtttttgaaggcagcagatgatcctctggagaggaggacattccaggaagagggaaacaaaagaaaccaagattgtgaagggcactgggaaggaaagttaggctcagaatgtaggaagccttacatgccattttaaggagtttagactttattgtgtcagctgtagaaagccctagaaaatttttaaagcaagaagagacaagatttgtgttttaaatttgttttataaagagatgtctctgttggtggtaaagacaagatgagagacagatgatgagggctcaagggaagcaacagagggactggtgtgggcattccatttctaacttgctgcgcctggtactgtctgaagtttggtttgttgtttttttttttgctggattgcatagaaaaagacaggctaccgcagaaatttcattctcactttgatgtcactacttaatagccacatatttttaagcaaggaactgaaacactctcatctgcagaatggagataacagtagtgcctcctgctcaggatggtagcaagtgttaacttaaatgctgcatctctgtgttgcatctcagaactgtgcttagtgtgtagtatgtgctaaatattttgtatcagttcattgacttatttgttcatttaatctatatgaatttgctgttaagataatccaggggatatctattatagattgtcattagtaaattttgcttgtggaatttattaccaacatttttcacttctttaagtcctcttgggccaaaaatttccagcaggaaacaggagggtgaggcttgtaaattaaaacagctactctccccccatccctgatgtaaagtgtgaacagaaaattttgcaaagaatgctgctatatggtggtcctttgtgtcactgtgtgtaatggggaacagggcaactgttaagtgaagcttcagcattaggaaagttgggcagtctttctttatagtacaacttggttctattattttggtaaaaggattctgatattccagaacatagtgtgaaccgcatttgcatacaaatgtaaaaacactttcaaaaatccccaacataaaattttaattacctatgcctttgcttctctgtgaaataactacaaaatgaccatatatatataaaacgacatgcttaaattggaacaataattgtaaatcccatgaacataataaaaattgttatataagtgtactgtatttttattgtaggtatattttattatataaatatgtatatttgtatttattttataaataactgtaggcttagcactcagaacagaaatctgataggaggggaattactcattatatttccttgtgccaggccagtgttgtgtttcttcaccacggtagggctcttgtgaaataggaaattggctccattaggttataggaagaatctataggatgtggggagaaaaactaaatgtattgaaactttatccctttgaagagctgggaaagcagttcttgacaaagggagacaaatagttgaggtgaacaaagctgtcttgacactaaaggcttttattgtccctgaaagtgaactcttcattgatagaaggcgttcttttatttgatccatcaagattaccaagtcacaggtcaccatccccaactaaatacaacatcatgaaatcatgattaaaattacaaaagccagttcataaaagaggcaagagtttacagattgtgcatttcctcctcttagttactaggagttaaattcaatagcattgaggatttttgaaagaatgcctgtaaattatttaaattacagtttgcttaatgaaatgatacattctgagaaacatgacattaggcaattttgtcattgtatgaacatcatagagggtacttgcacaaacctagatggcatagcctattccagactcaggctacacaagatagcctattgctcctaggctacaagcccttatagcctgttattgtactgaatactgtaggcggttgtaacacagtggtatttgtatatctaaacacagaaaaggcacagtaaaaatatggtctcacaatcttatgggcccaccatgggatattcagtctgttgaccaaaacatagttaagtgatgcatatattccccaacttcttcccttcattcatggagtagcaactttgactagctcataaattaacacgatttttaacaaaagaatttactgaaaatatgtttgccgtattgtgattgcatggtcgtgtaaaaagtaaagtagaggttcctcttcaaagactttcctccccgtctaattaggaataaatagtaatttctcttaaaagcaaaatttattcaaagacctgtgctagccataataaagaaatcaatgtactttatgttcctagctcccacaatttagcctaaatatttgccccgacatgcttatactggtccaagcaagattaggtcatagcctgttcctcttccttatttaaaagtgtttttacctttctcagcattccacaagttacttccgccttcctttgttctcctttacctttgcctcttttaaaaggttctaagttgctagccaatcgggacaaatacagaatgtgaggtcccattccagccaatggaaaccggacacagcggtggggtgaacgcgtcaggttataaatgaccctgtctcctttgttcagtgtactctcgtggcaaaactgctggcgagtgtaccctttctgcaaaaagtaaaaatggccttactaaataaattaaatttatgttcaagtgctatttctttacagcaccggggaacaagcatttcaaacaatgatggttagaataatgagcaaagactacagaatcacctgagaaacaggtgacttatagtctagtcccaaccctgctaggaacagatgtgtgacttcaatcaagtaactaactttttctgataacaattgtgcaggctcctgaggggctagtaagaatcaaatgactgaaagtatgtgaaagcaatttgaaacataaaaagcactaaaaataactaaatgtagttgccaaatatccttaaggcatcctagtagaacaaatgggagtaaatgttgatggcatttttgcttgtttaatattccagggaacaagggaaactctcagtcgtcactgtactacccttggtgatgctctccggaaagagaatgattttgctcttataattgatgggaaaaccctcaaatatgccttaacctttggagtacgacagtatttcctggacttagctttgtcatgcaaagctgtcatttgctgtcggtaagttctccttatcattgtcagattttagtaaagaatgacttgatctaagttcttgatttataaacgtcaatgaaagtaatccagagtttacaaaagttaggttacttactaatgtgttcactcaagacttgaggttcacaaactgggatggaatttgttagttttaaaaagtgagtcctaacaatcattaacaagtatttttcctcatttgaatcgacaggtttcttgccattatctttgtttaaaattcattatctacctgcatttccacctaggtcctttctttaaaggtcctgttgtctatatttaaatctttgatccagctgctaagacttattttgggggaatagcatgatgaaagatgcaaactgaatcattttccaaatagctgggcatttttctgagaggtatttattgactatacattcctttgccctctaatttataaaattgcctatatcctaaattaaaatctcttttgagttatcaaggcctaattcatagaaaggcatttttgtaaacgacatagctccagtccttcctgagtttcttgtcaaggaatcttccccatatttacgtataaattgtttaaactccgtcttcctaagacctaaagtaggttcatgaatatgatgaatatgcccagtctcctcttttgtgatcaccatgaaaactaaggatttcccctttgtcattcactattgaatcttaggagttgatcagtctagatcctgggtagcaatttctcaaattgccttctcttcctgggacataaaatgttagcagagattctgaaagatttctcagtatctgtgcttttggtattatctttaaaactattctatgtgcttttatcgttttctttaaaaagacatttactaataaagttatgctttttatacctcttttgtctgggtttattcacttaaatattttgtatatggtattatttatgaattataagctataccttatagacatttcctaaatttcagttgagacatactttctgaaatataatttaaactattctcaatatcctttataagcatcattttagcctataaaattataccatattcagagaattaagagttgcttatctttcccaggagtctaattattttagtcatataatttctttttcttttctgtggtatgtattaacaaataatattactataaagttcttggacaatatattgtacagatgtttaatattagtcatccggctctttgcttaatcataaagagactggaaattattttgactcatttttactttggtattctcatgctttttaaaatttacttttacagtgattttgctggattccttgcaaatgtcttgactaagtgtgactaatgttcaactttgacacttttcatcagaataatgtggcagatttggtcacttaatcactttaactaatgggatcataaggatcaacaaaagattgctcaaaagcacaagtgttatgattgctggctcctagttggaaacaacatgaaacagaatacagaagtattaagataaaatggccagttccctagagtcatctgttatgtgcctactttgtgtgtgctgggcgcagtgcgacacataaaagatgagtaacacttgatacctgctctccttcatgtatctttctttctaagtcaaatcacagtttggttggaaagatgtgggaggccaattttcatattgcagtgattgcagctgagcctcattcttaaagcattgcttaacacagtacctcccaccattcttcaaaaagtcgaaccacaaaattaaacaatagcagagggagagaaaaaactagaaagcagagtcaagggagaaaaaatatgttctgtgcttgtgaaattccctcccgaaatccttgttctggatgctcacaagtcacatggacctctgggcttctccaggcaccaggtccctagaagggaatcacaccctgccgtgcacgtgcggctcagctctgaaactgagcttataaagatgtgtgtggccccttcctccctcggttctgttttatgcatgtttcaagaccatgaggtccctacgcagacactgagttttatttccagttttaaggttttttttttttttttcttaagtcacatatctttcctcagcttttttcttctaactaccttcatactctctcttttcccataaggactgtggttcagcttctggcatgtttgagaattggtctaagcccataattacatcagtgccactgccggatttatgtctgtgcaccttcttggcctggtgcctcttggcatttaaactattggcacagaccatcttcttgtcattttgcttactgacctcagaatataatttccatgataatgcttctatccctggataggaataggtgggccattctgtgtatcattctttccaattaaacccaagtgtcactcctcgtttctcagatgattacaatctcccggcctcaggaaattctctattttactccattagaagatagacgctccagataaatactgattattatttctaaatacagtttggtactgtttcccaaattcgtttatgttcatactggctttatgggcttttctctcaaatttaaactattttccaatctactgcttgtcattccacacacatgcagataattcagaatctgatcttcctctgcagtcttctctttagccctaggtggagtggaagtagaggggaaagccttcctataacagataatgagtctccatgttagttccatcatcaggattgcatcagccactttcttcccagatactatcagcatacagggcagaatgaggcagattttagtgtttgcctcattgacacagttataaagatgagtgttgtccctccagagtcttcagctgaattgaaagaaacagttgttcccaggcagcagacattatgtctctctcaccactgttttctgaaggaaattttcagagacagaactaatccccccaccccaaatttattcagggctctggagtcctggtggttttggtttctaaagtataggttgaatgttgtgcctcaaatatttttcttaagtatataaaacccaagaagtggaatgaaacctgtttgtatcagtctaacagcactgtattttcttttcttttttttttttgtttgtttgtttgtttgtttttttgtttttggagacagaatctcactctgtcacccagggtggagagtgcagtggcgcgatctcagctcactgcaacccccacctcctgggttcaagcgattcttgtgcctcagctcccgagtagctggaattacaggcatgtaccaccatgcccagctaattttttgtatttttagtagagcctggcttttgccacgttgcccaggttgatctcaaactcctgagttcaggcagtccacacactcggcctcccaaagtgctgggattacagacatgagccaccgcacctggccaactactgttctttcatagatactgtgcagcttctgtttttaacattgtgagtatttacctgcataacctgaatgcatctaatttatagatagtttctgattcattttcccagttataaactgctcctttatggttcttcttcccctctactccctcacacaagtccactgattctcatgatttggtgtgatcacggatacttttggagaataaatgaaagttatagaccattccttccagaagaagtacacatgcacacaaacatgtaaaatttcatgaagcccttcaggggttttacagactcactgaaactccttggagaggtagacgtagggaaaaaagcttgttctaagactcatggagatttatggatacagctgaaatcaagcactatcccagggagtaactgtactaaataagtaattcttagtctcagggaccagtgctttatgccccctggtcctacagtctgtataattggtataaaagcattttatctagagattcacagaatgcttgttctagctctactgatttggcagtttgggtatctgatggaatctctctggccttggttttgtgacctacaaaatgaagagattggaatatcagtgattcctatcttccagggaacccagatataggaagcaaataaaagtggaccagcttcgtcatagcagggtgggaaatacacacatgcccccttcctgggttatcttgtcctggttggaaagctgctgggccagaggacctctcatagcccttttaggttgtggatggaccttccttctgttggccactctgctgggaacagtctttctactgctgggatcagcttaatttggggaagcatctgttctacctcttttaatattccctccagaagagagtgggaatgttgcagtgaagtattactgtgtgttaaatagcatgtggtttctgaggtcctcatcagttcacataacccagcctttcaaagaattttacatttttctgtagttgtcagtttagtttaaacatattttgaaacttatgttctgtgacagttggttgaaaattggcttagagcctccagcttttagactgtctagtaatcatcgttctacataatttatgtactcatgtcttctgaaaagcaaaagttaaattgaagtaagcattttttcctacttgcaacatctctaatcaaagtttaacccccttttaggccattttcctcatagtgtataaaaaaacacttgacttcagtgagtgttgtcatttgggagtggcattccaggcaaaacctttcaccttactcctatcaaggggtcctgcaagaagtctaaagggacactgaatatttgctgtcatagcatgagtgcattaaataaaggcacatctacttcttaaatctttagagattgtctttagctttaagaatttctctaaatatatgttctacttaaaaagtagtcataaagcacaaatgaagctaataaatgctcaacagacattcctttaaggaaaaaaatttgtgaacaccattggatgccaagcagatgtttggctttgaaaagacttttacaaactgttaatgaatgtcaaccctatatttgcttccaagaaaatatgaataaatgttggaaatgttgagagaatatttctttcatacgtgtacagctaaaagaggacacactgaatacactttataacttcataaaatgccaatagtttgctttaacataataatcatctgctcagccctgtccatctcctttgctattccaccttgactgagtagtattaaaggaactgcaatggctatattacagcctattagccaattatgatgaccaccaccaggtaagtctatatttgacaataaaatgtctaaaaatatataagaaatctaaatgctacagaagcctactgtaattcaacattttacagttttaggtgtgactccttttaggtaaaccatcatcaccattgccaccatcaccagtacacacacacacacacacacacacacacacacacaagcagaactgcagattacataattctaatgaggtaggtaacacgtaatggagagtacataaagtataaatgcacccgcttgggattttcgcaaagtgcacacactcctgtgacaagcacccaagcaggaccagcccccaagaagcccctcatgctccctttagttgaggagcctcccaaagataactgctaccttgatttccatcaccatccctcttattcattttactgttttgtttcatactaactttgaataaacatatataccttccacaaccacatccaaattcttgatgactcttttctgttccacaaattttaaatgcagtgctctgtagctttctactgaaggcctccccaaagctttacaaaatcagtcatcagtacatcagcactctcctctgttcttcagtgaaatacaaatctgcctaatggattgcttacggttctctgacagttctgatttgctaagaacatgatgtgtggaacctatggcatttctctgacctgtcagcctactgacctcattgtgtgggaaagggaagcagagttagctttgtgtaactggttctccctgaacccatgatggtttccagtgattacttccttttcagtaaacggatctgagccattttgacttaggacaagttaaagaagggcttggtgttttgagcaaggtggggcatatattttctgtgcagggacagatagtaagtatctgtaggctttgcaggccatgcagctttctcccttacagctactcaactctgcagttgtagcatgaaagcagctctagatgatttgtgaatgaatgggtgtggccatgttccaataagactataagtaacaaaaaccactgctgcttaaatttagccctggggccataataaagtgtctgtagctcatgaatgaacatggaaggaggtagttaaaacagaactttcctgcaatactgatggaattcatgctaagctctcctagtctctccaaggagagtaatttctagactgttcctttcttttctcaaaaattgaaacatttcctcatctctcctcactggctttctccacaattccttgaaaaaatggacattctttttatggtgccagctgcacaatctggtggctccattaaacttatccatgccatcagaaccaagaaaatccctaaaaataaggacatgaatttgttttacaatgaggtgtcaatacatacttacacatagcagcaggacagaaaggaagaacccagggccataaatatctgaccctgctcggtcactgcggtgccttccctctgttctaggaaaacccccagcaaggtgctagaggacatgctagcaaaagaatgaggaagatttgcaagctagccatctccctagagtcttgaactaaagcaagtggctctttgatttttttatgtggttttttttttgtgtgtgtattccccttatccccagtcccattctatttcaccttagaaaaaatattctcaagtgtttcatatgttcccatccatttgctgtactttagttgtatatatgtgattctgtgaaaaatatctatcatatgtgtattgaattgaagaaaagctttgtgtttataatgacactccagtaaataattttttttgagatggagtctctgtcacccaggctggactgcagtggtgcagtcttggctcactgcaacctctacgtacgccatcccccagccccagactcaagtgatcctcctacctcagcctcccaagtagctgggaccacagatgcgtgccaccacacccagctaagtttttgtattttcagtagagatggggttttatcatgttgcccaggctggtctcaaactcctgagctcaagggatccacctgcctcagtctcccaaagggctgggattacaggcatgagccgcccgccaaaaaaattttttacctttatttttctacatgtttttgagacatatccatgtcactatatgtagaacgaatttattttttgtttgtttttgtttttgagaaggtagagtcttgctctgttgcccaggctggagtgcagcctgatcttagctcaccgaagcttcgacctccaaggctcaagctgtcctctcacatcagcctcctgagtagctgggataacaggcctgcgccactactcccagctaatttttaaacttttttttttttttttttagagacagggtctgcctttgttgcccaggctgttctcaaactcctgggctcaagtgatcctcccacctagacctcccaaagtgcagtgattacaggcgtgagccactgcgcctagccaagtttgtttattcttatcactgcttgttattacactaatgcatatacatcattttatttatctcttctcatagggataccacagaggtttcctccaaatctttgctacaatgaaaagtactgcaatctatatcctctgtatgcccccaggcaagagtttttctaggagaaaactcttacatggggagagagagaaagagagggggatgggtatgggattgcttggctgtggcgtatatgtataattctttcccatcagaattgccacattattccaaaacaactctactagtgtgccatcccagatccatggaatagagttgctgtttccctaccttaataacaatacatagtattactgaatttataacttggccaatttgatggttgtgaaatgacgccttgttgttttgattttaatttctctgattactagagaggttgaacatctcacaggagtatttacctttctcagtttctgcttttgaaatttattcattcacttattcattcagcaagtgttttttgagtgctccctgtgtgccagtaaccttaataagtactagaaatagagcggtgaacaatgggaaaaaaataatcccagccttcacatcatagctgttgttcaataacatcagtaaatatacacacaaatattcaaaagacaataattgctgtgtgtgtgcttgtgtatgtgtgaatggtaataattgatatatatcaaacagacatatataaaatcagtggtaatattgctatgaagaaaagtagtacgctgaagaagggaaagggatactgaaatttctgttgggtttcttctcttttttcctgcttgtatatgagaactctttgtgtattctggacattgattttttgttgttgttgattattgatgtagcaggtgtcttctaggctggctcccttcttaattttgcctgtgatacccttccttaaacagaaatcattggctttgacatagtcaaactccactaattttttccttttatggtttgcacttttgggatataaaggacttcccactcctgcatgttcttctgttaactttttttttttttttaatctcaccctgtggcccaggctggagtgcgatggcacgatctcagctgactgcaacctctgcctcccaggttcaagcaattcttctgcctcagcctcccgagtagctgggactacaggcatccaccaccacgcatggctaatttttgtatttttagtaaagatagggtttcaccatattggccaggctggtctcaaactcctgacctcaagagatccgcccgactcagcctcagcctcccaaagtgctgggatgacaggcatgacccactgcaccccgcctcttctgttaactttacagctttagttttttcatgtaggtcttttacacatatggagtttatttttgtatatgctaggaaggaggggggatcctttgttattcatttctgcatcatgagcaaattctttcaatagcatttactaaacaatccactcttcttccctctgctggtatgccctgtgctgtagtgctcaggaactgaggccagactttccagagcctagactctacctcttagtagctgaacaacaggttacttctctggttttagtattttaatctttttttttgagatggagtctcactctgtcgcccaggctggggtgcaatggtgtgatctcagctcactgcaacctctgcctccccgggttcaagtgattctcctgcctcaccctcccgagtagctgggattacaggcgcccgccaccacacccagctaacttttgtattttcagtagagacctatattttaccaagttggccaggctggtctcaaactcctgacctcaggtgatctacccacctcggcctcccaaagcgctgggattacaagcatgagccacccagcccggccctggttttttaatctttaaaatagagatagaaattgttcttctcatagagttatgaagaataaatgagctaatacgtggcacctattattcaaatgtttgttgctcttataaattatatctaattttctcttatatagcctaattgaatatttcaggtgaaatatatattttgcctgacagtatatattatatactgtcatatataaagatttctctctgaccgttatggccttttctatgtcctgaattttttttttttttttgtctgatatttaatttgctaacctggctttcctttgtttcattatgtgtcttgtcttttgttttttctccaaatccttatgttcaatccttctgtataatatagtggttaacaatgctgtgtctgtccagcctgagcaacaaagtaagaccttgagtctccaaaaaaattacaaattagccaggtgtggtggcatacacctatggtcctgagacaggaggatcacttgagcccaggaggtcaaggctacaatgagccatgttggcaccactgcagtccagcctggcgacagagtgagaccttgttccaaaaaataaaagaatgctgtgtctgaatccacactgcttgggattgaatcctagcttcatcatttgccattttaccttaaaccttaataaatattgtttgtgccttggattcctcgtttgtaaaatggtgacaataataacttatgggattgttctgagaattcaatgtgttgggtgcaaataaacattatattgttattataattgttgctatattggacctcatttcttcccatttattttggtttccatctattatgattttgtttcttttttttttctccccctaactttcactctctaggtcagattttcctatgctggtttgaaacttttgtactctattctgtgagggaccctttcccctattgtttctaacaggcattaatgtccctttggaggaacagcaaaagctaggtcctgattaggtaaatttggaggcagggcccaatctcagttcattaaatccctgttttcccctagtgcctttacctgagctctcctcttgttagaggcagctgcactctgatggaattccccgtgtgaggtggcattcgggggtctgtcagcacagccatattactggcacctgtccctgcctggctctgtgccttcaggttgaccaaaagatctggctttcctgttccaaggcatgcgtaggaattctttctgcagttttagctttagggcactgaggatgtactcctggaattggagtgttttgttttttaagcatgttattttgggtttgatttcataagctccaaacctaagccaaactctacagttggaatgagtgaggctccatccagcccagtctcaccccactcatgctggtcagctcaaacagggtgccatgggcagggaacaatgcagccagaaaccttgcccatctgtgtgttcttccattatccctcacatgccactcttttcctccatgccgctcagcttctcccaagtattcaccacttcctgtcgccccaaaggtttctcttgaatttgtagttgataattatgaccctgaactttactggcctccttttttaactcctgacatcttcagagttgtattttagtttctgtcaatagtctgtgcgaccaattgttccaccttccactaggtagttttaaggtgagagaaggttccttggagaaacttatccacacaacataggaaggtcatgaggcagagaagagcaagctgattttcttccagcctaaacaagctctgggctgtgcatgatggctcacacctgtaatcctagcactttgggaggctgaggtggaaggattgcttgaggccaggagttcgagaccagcctgggcagcatagtgagactccatctctacaaaaaaaaaaaaaacacaaaaattagccatgcatggtggcgtacatttttagtcccagctactcgggaggctgaggtaggaggatcacttgagcccaagaggttgaggctacagtgagccaagattgtgccactgcattccagcctgggcgacagagcaagacctcatctcaaaaaattaatttatcaatttaattaaataaataaaaaaactttatcccttccttacctccccagagtcataggaaaagagatcacagggcatgtgtgctccagtcagacactgggaatgggaagggaatggaggccactctgagaccaagctcacaacagggtagagctgaaaggggaagcactctaggccttcttgaatagaagtgcttcccagttgagagcacaccagtcccattggcaaggctccctaaatagagaggtggcatggcgttgatccatgcaggaaaaatttctgtctcttcagagcaggtgtacagagagggactactatcatataggctgtcaatatttaactcccgggacagtacctcaataaaagtccttaaattaataactcttgggggcagaagaaagatcctgagatctgctttattctccttgtgttcttccgcagagctttaatcacatactaaaggatcacttaatacttaagtaaatacttgaatcaatgacacctggaggcacattcccaactctacactcttttccaagtccaattccaacttttcagtcagcatgcttaaatgagtctgccagagtatcccactactatctaaacttctgagtatctagaacttccctgatacttttccgctgtcaatattcttcttgccttttccatttacgtttagaccctcattctcccagtaacccaaatttgaaacctcagggtcatttttgaaaccacttttatttggggccctctgtgtttttattttcattttcattgtccttttcctagatcatattcagatatatataaaacatactttggtcaatccaaattaatgtttttaggaactgcctcaaccatgctcttttttttctttttctctctttttttttttttttttgagacagtctcgcactgtcacctgagctggagtgcgatggcgcgatctcagctcactgcaactgcaacctccatctcccaggttcacgcaattctcctggcttagcatcccgagtagctgggattatgggcgcacatcaccacactcagctaatttttttttgtatttttagtagagacaggtatgttggcccgactggtcttgaactcctgacctcgtgatccgcccacctcggcttcccaaagtgctgggattacaggcgtgagccactgctcctggccaaatttctctttcttgtaacatttccatttatttggttccactacctttttttttttttaactgtgaatttactagccatttttgtttacaatggaaactctgggaattcaaaattaacatcctcgcctgtgagctgcttatagacaccagaaaaagtttcagccttgctttccatgttgttctcctatgctttgtccaaatgaacctttatgagccggctgtcatccagtttcacacagattctcttgcccacaatttcacttgggaagatcaagtcctcaagaattgtgtcatatacagctcctaggatgtttttgcttattttttgtatggctttttcaagctggcttaggcagaattctcctctgagcaataaagacagcatgcttcccactgaactttttctccaattcacgtactagccagagttggattttctggaaagatttcagttgaggaacaggaacaaagattatgatagctttctggacaccaccaacttaggctctttggctgctgtaatactcagcttcctgagctgagccttgaggtccgagtttatctccagctccagaagagcctgaaagatgccggactcttaactcgtttggcgtctcgctgttgggcttcacagtcttggtgcttgaaatgaacatggccttctccttgctaagcgccagcctaggaagagcttgctaccatttttaattctgccttgtgctgagtacagtgctaggttcaatataactagatgatattttctgaagagaaaatgaacagcaatattgtagataaactaagctttcttgtgtgaacaccataataaatatctatactaggcggagttctctttttagtgcctttcataggtctatttgctaattagtgcacacatgcacatacatgcataatcaaatacacaccatcaatagaaacggtccctatttaaactacttatctgaatcattgaagcagaaggcagtacgtttacctataaccacataaattctacaaaagagaggttttatatctaaaatgcattgcagaaaggaaatcttttttaaatttgctttccttttttgtcctatggaaaggctatctgtattttatttctgtagactcagtctctatattgtaaggtctcctgaatgcctatgactgcacagtatatcaacagatgttggttttggaggctaggagagctctcactcatcagtcatttgaatagcgcacttctaggtaagaagtggttgaatgtttcattatgtaccatattgctaagtatcatttttaagacttgctatgtaagctgctgttttcattccaagtaacaagttgatggtgagcttctagaggagttaacaatattttgtagtttttgtacatcaggtttttttttgctgtatcttaattttttctcaatgtgaaattttataaatgaacctgccaaattttagttcagaaggattcaagtaagatcttctagtttacgtttttctctccttttgtaatttctgtaaatagtcaacaaaatatgagtcagttggaaatacactgatattcacaggagaaatcttaggaagtttgttgcaaagaaaagcacagcagatcccctcactaatgattctgacctctaaataggcacctggagcagacctcaaatttaaagtttgaggaagttaaagaaatttagtaaatactgggcttggtcactatataaaacacttcaggagaactagaaaatactatgttccttcatattcttctaaaaagttttctagatttaccttctaaaggcaacttcatagtaatttttaagtttccagtataagtctttgagatcatattatattatcagtataattttgtgtatatgtaagaattttttaggttattaatcccaaaacacaatccagtggataaattattgtattccttttggctacctataaaaaattccttaaattatcctttattatacatctattatatatatgtacatatattcttcatatttcatttagaaaggtgattcatttagctaatcccattaagagtgcaaaacaagcttcatgtaagatggaccacctatatacttcttagcttaaatggtaaaaatttccagtgctctgatctaacgttcacagggcagtgagagttactgcatagaaaataagaaaaataatgaataacatgtgcagaaactacagccaaaataatatctgaaaagcatattgcactcagtgcacgtctaggttgtatcagaaaggaccaccctctgtttgtggagccacagggaagagaaagggacgtttacagtacacattggatacgtagtctttttccatggagtctcttctaccaaagaagaaaaagcaacggtggaacagaagataactgtgaataatttaaatcctggatgcagacccacaaatggttaaaataaaacaatctcagggaagaaaacagtgcctttatgatgtttcagaattatacgttgagtcactattggcatttgtttaggttttagatattctcagccatggatatgtgattttttttatagacataggaagaattaagttgttgtgtggtaaggtagttctagactcatggaaattgtatgaatctagaagcaagtgtactgacaatcaagaaagtaaataaactctgagtagagtaatcttttaacaggtggagacacagcagtagaaaataatatattctggagaattttgagtgtgaagttaaaatttattatgtgctatttctgttacctgaagtgaactctcctctcctttcaaaggccaagtcaaattctaacttatcaagggaggcctcttaaagcccatgttgatttctgaaattatcaaagaggggcaatcatatcaaagctttatgctacattcatttttaatgtcttataattttgttttgctatattgtaacccccttgtagcaaggaaccattttttaaatggatgctataaaaatagtggatcttttttactgacttcagcttgacaaacctgaatccctttcagccacattccttccctacagccttctgccaggtactcacagcacactatgctcacacccagaggctcttgggtgtgtacatgctcttcggcttccatgaattgacttggtgcattgtaagtggggctcgttccctagtatgtttattcctgttgtacttcttgaaataatcatttaattaaatatctcataacttcattcaaataactgagtaaaaattattgctagtaaatccaggtataatgctctaaaagactttttgagttgctaaaaaatattgctgtcaaattttggagtaaactaactataaactggggtaaaaggaatcagtacattctggtctccattttagtgaggcaaaccattgactatgcctgagtgagatttctgctacaaaaacatgcagtttcaaacagcagacccctatgcaaagtaaggttctttgacctgcatcacagtttgtacatttatattttgagttaaatattttaagaatgtatattttattttgtatgaatctccacttaaatctgacatctttgtttagcaaccaactgatgtttcagaatcataagaaaaggcttccattatgtcttttgttttaattttttatttccataggttttgagggaacaggtagtatttggttacatgaataagttcttcaatggtgatttgtgagattttgtgtacccatcacccgagcagtatacactgtacccaatttgtagtccccctcccaccctttcccctgagtccccaaagtccattgtatcattcttatgcctcttcatcctcacagcttaactcccacatatgagtaagaacatacaatgtttgtccattcctgagttacttcacttacaataatagtcttcagttccatccaggttgctatgaatgccattcattcattccttttatggttgagtagtattccatctcattcatatatgtgtatgtgtgtgtctgtgtgtgtgtgtgtgtgtgtgtataaaatatataaaatatgtatatataaaatatatacacacacatacatatatatacacacataccacagtttctttatccgcttgttgattgatgggcatttgggctggtcccatatttttgcaattgcaaattgtgctgctataaacatgcatgtcccagtagcttttttgtataatgacttattttcctctgggtagataccccatagtgggattgctggatcaaatggtagttctacttttagttctttaaggaatctccacactgttttccatagtgattatactagtttacattcccaccagcggtgtagaagtgttccctgatcaccgtatccacaccaacatctattcttttttgatttttttattatggccattcttgcaggagtaaggtggtatcgcattgtggttttgatttgcatttctaaagagcttctgcacagcaaaaggatcagtcagcagagtaaacagacaacccacagagtggaagaaaatcttcacaatctgtatatccaacaaagaacaaatatccagagtctacaaggaactcaaacaaattagcaagagaaaaaacaatcccatcaaaaaatgggctaaggacatgaataaacaattctcaagatatacagatggccaacaaacatatgaaaaaatgcttgacatcactaatggtcagggaaatccattatgtcttcaatcttattccaagagggtcatccacttttgttttcccgagatggagtcccgctctgtcacccaggctggagtgcagtggcgccatctcagctcactgcaacctccacttcctgggttcaagcgattctcctgactcagcttcccgagtagctgggactacaggcacgcgcccctatccctagctaattttttgtatttttatttgagattggattttaccatgttgcccaggctggtctcgatctcctgacctcgtgatccgctcacctcagcctcccaaagtgctggaattacaggcatgagccactacgcccagccagtcatccacttttaaagcttggtaatggaagcagatgctctggctagtagcagctgcagtgtgcttttgaaatgtctctcactatatcattttcttttttcttaaatgggcattgttgctaagggcaatcctactctttaacacctcatttaaccatacagaattgaatgaaaatcctcagccaattttaatttgggtgttgaaaattacagtatcaagcagagaaagcagtggttggttgtgatcaccatgaagaaaactaaatttagtccaactcttttctgatgctttttaaaaatcactaatgtcagctcaccttgcagagatttctcctttattacaagtttagttatggaaaaagtaccactgtttcctagttctgttgaacccttggtgtaacttcataatgtattcatactgttagactattaaagagaatttgataaagctttcaaatgcttctctctattcatgcccatttcccattctagatcatttattggtgagcattcctttttgacatttactaaatgtcaactatagtccaggtttaaacattggcctacagccagtggacttaccagtttatattagcctggtaagaaaaattaaataaaatgtgaaaatgaaatgaaaattgctttgaagaaaaatcaagctaacagtgaaatagcctgctaatggcctgataggcattcatttccttgctgagttcacagttgtgtcattttgtactattgccagactgtaaaaggaaatccaaagaaaaaattaaaaatggttttttcgtatagcaaccatgtattgagtatctattttggatcaggcactaaaaatacaaagaagaggagaccaattgactttacaggcagctcacagtctaatgcaatgattctcagacttgaaataaaaaccagagctgctctggctgaagcagttcataagggcagtggggcctcctgaaggcacatatttgtgcagagtatctaccactaaaaatttttcctatggaatgatcaggaaaatggacaaagttgtatcgattctctcaaagtggtgatcttcatttttaaatagaatagtaaatgatttttcagatgttttagcagatatttattattagtcatctatgccacataaccttgataaataatttagctctgagatgtttttcttgtttgaacattgtgtacataagttgtttcttactatctaattattagcttaactgtttgttagaacaatttattgtgtagttttcctgtctttctctatagtttccaatacagtgtagacagtgtgttatgcattctgtctttgaacccttctgtccttgtcctagtgtttattcctttttttttttttttttttttttttttgagacggagtcttgctctgtcgcccaggctggagtgcagtggcacgatctcggctcactgcaagctccgcctcctgggttcactccattctcctgcctcagcctcccaagtagctgggactacaggcgcccgccaccacgcccggctaattttttgtatttttagtagagacggggtttcaccgtgttagccaggatggtctcaatctcctgacctcgtgatccacctgccttggcctcccaaagtgctgggattacaggcatgagccacctcacccggccagtcctagtgtttatttcttaaatggctttagaaagtctgtgaaaagtaactccaaatctaataccagatatgattttaatagagatactggtgttttctgttcctggtccacatttgtataagaggttgcttgatttttacttgacccttagtggctttggaagaaaatgaagcccatgaactataatcagatacttggcattttccatggtgtctgagaattaatttaagtagagttttaagtgtatagtacattatctaagatcagattgcagaagctcaaaacttttactttccagctactatgtaggatttagttagtgtttggcagcatttatgacattgtttttaatttgtaagtgaagaattagaaattctgatgtttgttaggaagtaaaggcattctggcaggctaatgtttaacaaagcattctctcttctagatgtcacctaggggtttgcctctgaggcttgtttttatttattttaattttccttaatacagtaaccaggttaacagatgagtaaacatttgcaaacctaaaactttatcataaggtttcttcagagaactattcatttaggtcttttgcatcttttatccttcaacacgatggcatttcaaaattccttttttcagaaaacagtaattgataatgtgtttcaatttcagggtttctcctcttcaaaaatctgaagttgttgagatggttaagaaacaagtcaaagtcgtaacgcttgcaatcggtgatggagcaaatgatgtcagcatgatacagacagcgcacgttggtgttggtatcagtggcaatgaaggcctgcaggcagctaattcctctgactactccatagctcaggtaaagcgtcatttctgcaaaacacatcattcctctcagtcaactgatgctttgaaaaggaaaatactaattttttcccactcttgttttagttcaaatatttgaagaatttactgatgattcatggtgcctggaactataacagagtctccaagtgcatcttatactgcttctacaagaatatagtgctctatattatcgaggtaatagcaggttaaattttaaatccttgtcatttgcatacatatttaaagaaattttctttatggagacgttttctcatggttttaattaatattttatttgccaactctttataaattctaaatgtattaaaacaaaaaggtggcctgtaatcccagcactctgggaggccgagataggcggatcacttgaggtcgggagttcgagaccagcttagccaacatggtgaaacctcgtctctactaaaaatacaaaaattagccaggcgtggtagcaggcacctgtaattccagctactaggaggctaaggcaggagaatcacttgaacccaggaggcagaggttgtggtgagctgagattgtgccactgtcctccagcctgggcaacagagtgagactccaccccaaaaaaaaaaaaaaaaaagtttgtcagccatggagaattatgtttaaattctagctaaaaatgttatgttgctttgataagaagtgttgaattagagatgctaatgagataataatgtatttaatgtaaaaaatacattattaataatgtataaaagtctataaacttgactgcatttttaataaagctcaaaaacatgcaaaagaaagcaatacaccatggagggataacacacatgtagaaaagctattttttaaaaaaggtgagggaatgagaaacatcaactgaagctagcacctctaattctgggaggagacaaagaagtgcaatcaggaagaatatgcaggtagctttgctggtattgttgccttgttgttcctattatgtttcaaaacttagatctttgttacatacaagcatccctctctatccagatctgtttttgtttccgtgtttggtgagtagcaagagttcagatgatgaaaaatttgtctaaaaattatcagaatatttagtttctgtctggatagcaagggatttctataatccgttttatgtgtcaaacataacatcattttaaaaatgaaaacctgagtcaggaataccacttttaaaaggatgcattttgttctgtaaacaattttgtagcacctactgagcccagacaccaggcttagtccaacaactacaaagtaaatcaagcatggttcctgtcctccaggaacttgctgtattactgttctcacactgtggataaagacatacccaaggctgggcaatttacaaaaggaagaggtttaatggacttacagttccacatggctggggaggcctcacaatcatggaggaaggcaaggaggagcgagtcgcatcttacatggatggcagtgggcaaagagagcttgtgcaggggaactcctctttataaaaccatcagacctcaagatggttattcactatcacgagaacatcacaggaaagacttgcccccatgattcaattacctcccactgggtccctcccacaacacatgggaattcaagatgagatttgagccaaaccatatcattctgcccctggccccttccaaatctcatgtcttcacatttccaaaccaatcattccttcccaacaataccctaaagtcttaactcatttcagcattagttcagaagtccacagtccaaagtctcatctgagacaaggcaagtcccttccgcctatgagcctgtaaaatcaaaagcaagttagttacttcctagatccaatggatgtacaagcaatgggtaaatacagctactccaagtgagagaaactggccaaaataaagggaccacaggccccaggcaagtccgaaatccagcagggcagtaaaaccttaaagctccaaaatgatctcctttgactccacgtctcacatccaggtcaagcatgcaagaggtagggtcccatggtcttgggccgctctgccccgtggctttacaggatacagcctccctcccagctgccttcacaggctggcatcaggtgcacaatgcagtcagtggatctaccattctgaggtctggaggacagtggccctcttctcacagctccactaggtggtgccccagggggaactctgtgtgggggctctgacctcacattttccttctccactgccctaacagtggttcgccatgagagccctgcccctgcagcaaacttatgcctgggcatccaggcatttccatacatcttcagaaatctaggcagaggttcccaaaccccagttcttgacttttgtgcactctcaggctcaacaccacatggaagctgccaaggcttggggcttgcaccctgtgaagccactgcccgaactctatgttggcccctttcagccatgtctggagcaactgggatgcagagcaccaagtctcttggctgcacacagcacgagtgtaccctgggcctggcccagaaaaccactttttccttgtaggcctctgggcctgtgatggaaggggctgccatgaaaactctgacataccctggagacattttccccgttgtcttgaggattaacatttggcttctcattacttaggcgaatttctgcagcctgcttccatttctcctcagaaaatgagatttttcttttctattgcattgtcaggctgcaaattttttgaacttttatgctctgcttcccttacaaaactgaatgcctttaacagcacccaagtcacctcttgaatgctttgctgcttagaaacttcttccaccagatactctaaatcatctctctcaagttcaaagttccacagatctctagggaaggggcaaaatgctgccagtctctttgctaaaacataccaagagtcgcctttgctccagttaccagcaagttcttcatctccatctgaaaccacctcagcctggatcttattgtccatagcattatcagcattttggtcaaagccattcaacaagtctctagggagttccaaactttcgcacgttttcttgtctttttatgagctctccaaactcttccaacctctgcctgttacccagttccaaagtcacctccatgtttttgggtatcttttcagcagcaccccactctactggtaccaatttattgtattagtctgttctcacgctgctgatgaagacatacccaaaactgggcaatttacaaaagaaagaggtttaatggacttacagttccacatggctggggatgcctcacaatcatgatggaaggcaaggaggaacaagtcacgtcttacatgggtggcagcaggcaaagcaagagaacttgtgcaggggaactccccttttcaaaaccatcaaatctcttgagacttattcactatcacaagaacagcattggaaagacttggccccatgactcaattacctcccaccagtccctcccacaacacatgggaattcaagatgagatttggctggggacacagccaaaccatatcacttgccaacagaaatacaatgcaagccacattagcaaaaagcaaaaaaaaaaaaaagaaagaaaaaattgatctcagtatattttatctagctcaatgtattcaaaagattatcattgtcacctgtaatcactgtcaaaaattattaatgagacattttacatccttcatcctaagttttcaaaatctggagtatattttacatttataccacgtctcaatttggactaatcacatttaagtgttcaagagcacgtgtggccagtctctaccatgctgggcagcacagcagtggtagataaataagtgaactgaatggttaatcaaggcatgataaatatgttatttgcctttttttaaaaagttgccttcttattgtcagaagctatatgtgtagtaattctaggtgttatcagtttcatgtccctgttggagctctgcagatcatgacaatggccttcccattgttaagaaaacctcattctcccactcctgtcaaggacccaccatggtctcataaatctgctgagggttcccttacagatagatgtttgtttctgccactttaccatttaatctgttgactgtttctacacgtctgtcaaaaaagatacagccaggctgggtgcgttggctcacgcctgtaatcccagcactttgggaggctgaggcgggcagatcacaaggtcgggagttcgagaccaacctggccaacatggtgaaaccccgtccctactaaaaatacaaaaaattagctgggcatggtggcagttgcctgtaatcccagctacttaggaggctgaggcaggagactcatttgaaccagggaggcagaggttgcagtgagccaagactgtgccactgcactccagcctgggcaacaaagcaagactccatctcagaaaaaaaaaaaaaaaaaaaaaaaagatccatccatttgctatatggaaatcatattctatcctttactctgagaagtaacagtataaacaaagtcagtacgttgacactttcgttgggggctggtgtatatttgcttcacctgttctttgtgcctctgtcagaatgcttatctccttgttaaatgttgactgagcatagttcttattatgagtcaggctagtaaaattgaaacttagttttgaagtgtacaggcagtttggtgtaatggtcactaaaaaggttacaacctattagataaaataacctaatacaggccaggcgcagtggctcacgcctgtaatcctagcactttgggaggccgaggggggtggatcacgaggacaggagatcgagaccatcctggctaacatggtgaaactctgtctctactaaaaatacaaaaaattagccaggcgtggtggcaggcgcctgtagtcccagctacttgggaggctgaggcaggagaatggcgtgaacccgggaggtggagcttgcagtgagcagagaccacgcgccattgcactccagcctgggtgacagagcgagactctgtctcaaaaaaataaataaataaaaattaaaaaaataacctaatatgtggaaatataaacaagatacgtaaatgaacttactcgttcattactgctagatttggtctggaatagtgtgtgttttgaagcaaaatgcacttctaaaatagtttataagattcaaaaaaatattctttgttgtttatataaatgtgtagttcttttctaaagtaattatttttctattctcaatcccttctatatatctagcttttctatttatatgttcttctcattccagaacactgacattcaagcaaataacaatttatacagtttatttacatagatttatcaagataccaggaatttaaagccactgccagcaataaatctgcttataaaaagttaattttataaaataagaatgtccaacttgtcgctttttaaatctaaattgacagcaataaagtagacaaaatttatgtactaatgagaaaataaaaacattaaaatcaaatgaaaacaatcttcatgccctgtcctgtttcaaacccagaattatgtgatttgtggttgattaaccctaaacttcacttgcctttgattttaaaacctgttcatgagatatttgacactgatcaaattctttacacagtgaaaaggaagtgagttctaaactttactggaaatctcatttttatttttctcaagagtttgtggaaatgtattttgaatatgattcaactgtcttggtaatgaccttttaaatcaattcccagatacccaacttttgccagctaaaacaagttctgcagatgttaatggctcatgtcaatactgtgaatgaatagacagaaaacacatcattgaatgtctctagtgaggacaactgccagtctcgaatctctcctttcagttttttgtgctgatcaggcgtgggagcagaggactcattgactgtttgtaagctgctgtttaatatgcagaaatgctccatcaggaaaatgaatgtgaagctttagctgccacgcctctactgggaggtggaatttagaaaataatgccaggagaagcaggtctgaaatttctatgctaataaaggaatagtcttgaacactatgtgttttatagatttaaaactacaaacactgcttttctccttgctatattgcttaggaaagtcactatctagatattccattgctgtaaattacagccagacgaatacagatttggcagatggtggtataaagctctttcttacaggagctgcccaggagcagctctaggtgttcatttaaattattggctccttttaaagagagatttttttttatttctctgatatgtctgactccttcctcataaaataagacctttcctttcaaatgattggtcacatccaagttttctgggaagatctcaaaaccaagttgtgtttctaatttccagaagctttgataaaagtcaataaggtgatactgtcccagcaagtggtgctgggagttgaattccctgtgaatttaaataaactagacacctccccagagggaccggtgttttctttctgaatctgtggctctggttgaattagaggaggtacttttatgtgtttgggataatttagatgttgttttattttgcacgggatatgttcccaatattaactacaatctcagcctaacttgaaatcggcctgctggtaggctacttcactgttaaagaccttctctttctcctttaagatatgtaaacttgaatattaaaatattagagtgaaaatctaaggtactctattgaaagtttctgttcttacctagtcatttcttctttaaaaataaattaaaatgttaacccttaaaaatccaggaaatacattttctaaaaacatgttcacctacctttcagtaggaaaaataaaatgataaaaatgtgttgatacctttccacttaaaaattgtcgtaaagtataaagcaggtcatgcattttaaaatacactttggaaacaaacatgttagtttacttgcaaattatttcaaatttgaaacttactgtaaatattgatttgagggagaatcttaaatttcaagctcgtagtagcctttgaatcagcaccaaatattaggtacacagaagctaggggaccattcgtatttactaatgtttgcccacatataaacttactaacataaacttctcattgtacggtattgatgattgcaaatgcatttagaactacaacttttgagccaaatcttgtccgttagacgaatttggtatgcagagcgcttcggctttcttcagaccaacaaaggttagactgtgtcttcatagattagagaggccataattggaagtttgttttgaaattccttatatttccatcataccttaagaaatctgaaagagctttttagaatgaattactacaatagatcacagttgccttcatggaaaatagccccatcactctgagtatcccaaatatgtatttacataatccacatctcaggccaaatgtgaaaacacaatagagagcattaatgtctgttttgtcaatttgtgtatactcaccaggaaagaataaacttcacttcatgtgaagatgctcagttcttttaaagtttgcatgcatcaatgatctggctgtttgtttagggcaaattatcaaaaattttccataaatatgtgtagcaaagcaagtaagaatttcagatttgactctgatttctctgcttttgttgtggttaatatgtgttacagctctaacacaatttggacttatttttaatgtgctattgctactttgttttcttttccatctcataaagcagacattagtttttatacatgctcaatcattcctttccactgtaaaaaggaagatcagtgtggctacagaacctgttcatagggaggccagcctgggtatatattgataaatggtgaatttgtagtaattcatgcttccataatgaggttaaatgaaacgtgaagtgtagcaaattccctgcaactctgattcaaaaattcagttgagccgcatgtcaagaccgctctcctctaacagttttgtagttgtcggtgttgttaggttttgtttttgtatttgtgcttatgtaatctcattgctggaccagcctttgtactctcccagatccatttgatatttgatttttaattatacttcaggtctgctttttaaaaacaataacgtaggtactattgtttactaattgtcactttaatttttcttatgttttaaacatgctagagaaaaatttgtccatattgtcccttaattttgtttccaaagttaagatttctgttttaaagagaattgtaaaatatataagaacattatgctctagtcaagatgggattttatcaatgaataaaatttaagttaaaatattttaatatataaactcaaatttaagattccattggcagtggttatcaagaactattaagaagactcatgtactttgacctattccaccttaagaattcaccctaaggaaaaaagagagatatatggtttcagtttagagttatttataatagcaaacaactggaagccagctaaatgtccaaaatagttacatccacattgtagaggttacatatccattaacatcattttaaaggatatgtgacaacttaagaaaatgcatattacataatattaagggggtggagcagagtatgacactctctatatgcaggtttccagtaaggtaaatttgtgaatttgaatgaactatacaaccagtgcagacaaaaatggtgattgtactattgcaggaaactatttcctaaataaacaagtgttacttttataattttaaaaaacaatctttaaataactacaatcctgatattttaaaagggaattgaagctgtaaaaatttaatggcatataaatatattctctgaaagtaccgttaagaaaaacaagattatttatcatttttaaatcgtgattgcctgttcatatatttcttttttgattcagcaagcaggaccaattctgacataaataacaaataccctatgaaagcatctctttcaatcagaaagtaaaccaaagaaatgtcattttcaaaagagtcatgagtataatatgttaatgctgctattatgcagcagttgagtatacaacagattctaagcaatgcatttatgcttttgtattctaatttgggggttttgggttttttttcctagatctggtttgcctttgttaatggcttttctggacagatcctctttgaaagatggtgtataggtctctataacgtggtaagtttaggacatttgataattcctgtttcattgaatacttgggagataaaggttcaccctgcatttggctgcttgacataatgaccagtttgtgcgctttagatgtttacagcaatgcctcctttaactcttggaatatttgagagatcatgcagaaaagagaacatgttgaagtaccctgaattatacaaaacatctcagaatgccctggacttcaacaccaaggtaggacacagtgccctggctgggacatgtttggtgggtctgtgtttactgccctcattatatggggtatgtggttttcaaaggccaaggatacactagcctgagacaactccagggtaccgactatggcaagtcatatttcttaaggttctgatacaggcagagaaggttttttgttggttggttgagtttggggttttttgtgtgttttattattaaaatgtaaccaaattcacttgggtttgtaaggcagcaataaagctggcctgacgtataaaaatcattgtccttttggttctctggccttctgtctttgcagtgttgtggtgacatgctcactcctcacaggggttagtcatctaggactggtaaggactggctttatgtgtgtaaaggagtgagagaggtattttattgttccttaactgattttccattttgtgaaataactttgtcctcattagaattttagattgattgtgtcaggcattaaaattacagtctctgggaaatagtactcagtatttccaagctctaaaattaaaaatacaagataaaatatccaacagtttatctaaaatcacattctgggtgtgatccaatagtatttatcccagacacacacacacacacacctcattttctatatagtttactttcctgcaagtatatattctaaagtgtttccattggtatttgttaataattcaatttcttgtttaatgtgagtgaggaggaaaaaatttaatattacaacaatcaagttaggtgtcattttgaaactaacatttgtatattagtgttatgaaagcaacaaataaaatacactttcacagaattgtttttgtttaatatagtgcatgtttattagcatgttactgataattagatgtaaccttaactcagaatcttgaattcaggacagttaatgtaggatattttaaatatttaggaattcataaagcttttcaatggcattttccatatgccaagagaataaagtgaaacaggtgttttggtgcctctaacctcacagcataaacgatagtgctaggtttatgggcaagacattattcttctgagacgtgatcttcacgaacacagcgtgcctatgtatccagctgtacacatgcatacaacttggtggcactgttttaaataaatgaatttggttagctcaggacagacagactgaaggattctttaacttatgccattggttctgaaaagtatttttagtggactctcttaaaactaatactattaatgtgcagttatctctgctttcatttttaaatcttttacttctagatttttaaatttatttgtgatgcccagtttgtattaaatttcatcacattgctgtaatgtttttcattacctatggtgagcattcacaaatgatggcaagccacaatcagactatggcctctggttcccctgaaaaagtgatctgagagctggggaagttccaggtctactggttggtatactaacaataattctcaccaaccaacctcagccacaggcctcgtctaccatagtgtgggctccatggtactgtctctgaatttagcctctaaccacaaatttggccatgccattcttgcttaaaaacataaattgatcctcacagaattaccccaaatcattcctgcaaaggcacattcttctgtacatggcaacttggacacatttttgtggccaggaaaagggtatagcgggtagtatattgttttaatgtgggagcatcattcctcgtatcttttattgttgaaaaaagtcttttcattatctgtagagcccaggagttcagacaagtcatcagatcaacccaaatgggttatacaatttctatacccatttgagtgtttatagtttttatacacgagttgccaaccctgttttacagggtttatggatttttctagtgatttcagtgaaaagtatttgattcaatctcatataagtgtttgaaaattcagggacaaatggctacaaaatgcacagttgtatacacagcagttgctgggggttccaagtgcgggagcattgttgccctgaatgatgatgcttatgtttgttatggtaaaaagggtcggaggttctgaggtcgtgacaggggttaaaggattagcatgtgacaataagtatcagtcaggaaaatggaaaagtagaactaatttttcttgcacccacctgtgctttctgtcaaataaaaacttgtggtaatgacacagtgaggagaagagacaaaggttaatgagtaacacaagttcaaatgtgtaatgtattggagcgtaaattggatcatacaatccagtgtggctgggagaactaacaaaagagattgagctcacagtggaaaattttgggaggcaggcaacttaatttctgttgtttgaacagcttaaaactattaatacatgccagttttatttagcataagttttgtttgcaagaagcacttttaaatgacaaaactacaactgttcagaggggccataagaattctaaacagtttttctataacttaatctttcacatccatgttacaaagaaagtaccagtgacgcttgctctcttgttcttaaaatacaatagatataaaaagtagtaactattatatgatgttataattatacaaaacttggtattaacactgttaaattgtgaaagcctttagtaaagtcatagtcacagtgctttatttgtatgattatataatactggctataacgagtatatatcttgataccctgcagagaatagtatagagtatctttatatctcttgataagagaaagcattacatctttagcattggaaagcttacagttatatgtggggaatataaagggatttccccaaattataatcttttaaaagtctattcttctggaattatgaaaatagtcccacttaaggaatttcagaattctgcatttttttattttaaattttattttctttttcaggcagaaatttaaatttggtttttgagaagcagaaaaaaaaattcaagtgaagctgaaaaaacattttgagaaacataaaaataaataaatgacccatgaaagtctaagaggcagaaagtgtctgtcagttctattaattcacagtggtggcccgacagaaacacattttgtgaatctagctcatagataaaaagaaaggtcagagttcacagagctagtttatcgcaaatggttctcatggatttttgttttccctcaggttttctgggttcattgtttaaatggcctcttccactcagttattctgttttggtttccactaaaagcccttcagtatggtaagtagaagggatatgaatgcaaagagatgactttttacttttttagaaaaataactcattgtcaatgtatgtttaaaagtatagcagtttcattgtatgatatttctcttaacctaaaatgcatgcacccaaaaattgtacacactttgaagatttttattattcctttgggagcaaagtgatttaatatatgcaaagcctttcttctttacgtctcatgttttccaaacttgcagagagttaaattttagggctttttttccctctgttgatgtatagtttgaggacaataagtgctaatattttatgtagcctatttattatacctatgaggcttgtatcaagccctttatactgaacttaatcagacatgctggtattttgaagtatacttgagccaatgttttggatgaggtttttaatatgtttttatgttcatcttggagtgttagcttttactctgctcattttgagggaagtgattttattctctcggtttggagaaagaggatcatggtgcatttcctatacacataaaagtcattaaatagctactttagaaaagagatccctgtgattcttaagctggtgctgctctgtcttggagccgactttgccttgagatcctcgggaagacaccaaccattcagcgtgcctgcttcaatactacggtaatcaaaaacacaacacatagtacacccaaggaattgtcagtcctttataagtacaggccatacctacgtctatcaattaatggttgccaacagaagagagtgctgcctgctgctgcccactgatgatctcctctccataggtagccagagtgatccctgcagaacatgaatcaggccaggtgcttccctcctcagaattccataaagatttagcatacttagaacaaaatcctccacctccaaattgttccccattcttcacagatattcgaattggctctctcccctccgatgcctcaggtctgtgctcaagaagccttccccgatcatcctgtccaaaagagcagccaccacctgcccccactgctcctaggctctattcccttgtcagcctgtatgtcttcatggtacttgtcaatcaggttttgatatgtttgtttcttttgtatgatctttctcaaaactcttttaaaattgaagcttcagatgggcaggtaattagtagtttcgttgcattcacagtgcttagaacagtgcgtagcttgtagtaggcactcagcaaattgtgaatgaattaccaagagcttgtggcataagcgaggtgagtattacaaagaaggcagtggtttcatattctagctaagattttaatctccttttttaattgctcagtaaattacaacagtaaatacttttcaatgtctaggctgtggaatgagcatggtaagaatatttaattaaagtgtagaatattgaccctggaggccaggagaattacagtgagttagtttgttgcttgcttgtttggctttgacatataattcacataccataaaagttaactcttttaaagtgtacaattcagtagttttttagtatattcactgaattatgcagatgtcaccactatctgatgcccgacattcatatcatccaatagagaagccccatatccattggcaatcactccctgtttctccacaccttccctaccagaccctggcaactacttacattttttttatctctatggatttacctattctagacattttatataaatggaatcattatgtgaccgtggttcatccatgttgcagctggaatcaatacttcctttttatggctgaataatattccatggtatagatatgccacattttttaatctgttcatcagttgatggaccttcagattgtttccactttttggagcaacaggatatggaggtccagggtacaattcaagataccctgacctcagacaagctctccaagtaaaatttattttcaaaatgcaaaattgatataggtttgaaagataaggtatgcccgtcttctaaactgctatttcaaccttctaaattagaaaaaaagaaattgaatatcaaaagtcacttaaaccagatagcatccaaaacaccttagcaatgacagggtttgaaaggaattcccaagtgacttcatcttccagagaagcagttcctagatccatcattacgtctctctggaaagctgcgcagctctccagcttcagtcaaggcagttcacgggagtgctgcttatagagaccaaaactagccaagactagggaacatttgctttctttttttaaggggtgaattgacgtttagcataaactactttatggttttgatgttgagagatttgtagttgttgtttcgccttgttttcatttttaaataaggaatgttttagtggggagggttcttttgttttttgatttctgaaaggatggggatactgaagaactttacacatgctgtgtaatatatagctacatattcatctattcctttgcctcagcagttctgaaagagtagtctgtagaccctgggaatacccaagacccttttgccatccacaaacagtggtaccactgtgctagtagtcattatattcttcaccgtcatgcactaggtttcatttaagaatgtgcatgaagacaccataaaactaatgcttttattaaaacttgaaccatcttaataatattttgtatttgacaaaatgggaagtattaacatacatataaagcagttctgcataccaaagtgcagtgattgtctcaaggaatggtgccttctggattgaaccagagactgcagaatcatgcatgggtaaaagatccattcaaagtgcaaagtaggctgggcatggtggctcacacctgtaatcccagcactttgggagcccaatgcaggtggatcacatgaggtcaggagttcgagaccagcctggccaacatggcaaaactccgtctctactaagaatacaaaaattagccaggtgtggaggcgcatgcctgtggtcccagctactcaggaggctgaggcaggaaaatcgcttgaacctaggaggtggaggttgcagtgagccaagatcatgccactgcactccagcctgggcgacagaacaagactccatctcaaaaaaaaaaaaaaaaaaaaaaaaacgcaaagtacaaagtagactgatggattttaatgcaataaagtacagaaagttcattgatatagtttcagattccacactggcaaccaacctttaagaaactacctctaccactttgagaaactacttgttggccaggcttagtagctcacacctgtaatcccagcacttcgggagcccaaggtgggtggaccacttgaggtcaggagttcgagaccagcctggccaacctggtgaaaccccgtctctaccaaaaatacaaaaattagctgggcatggtgacgtgtgcctgtaaccccaactactcaagaggctgaagcaggagaattgcttgaacccaggaggtggaggttgcggtgagctgaggtcacatcactgcactccagcctggacaacagagtgagactccatctcaaaaaaaaaaaaaagaaaagaaagagaaggagggagggaggctacttgttgagttttgatgtagtatcaaagactatccacaattattggaaaagattattaaaatagtcttcttctttgtaactccatatcactgtgcagctggatttccttttatatttcaaccaaaacgtgagaatccagctgctttctattaagccagaaataagagattgtgaaaacccaaacaataccatttttctcacttatttttttgtttgctttggaaaatacttttcagaaaacctgtcatttatattaccatgtgttaggttttatatttatgataatcaatacataattttaaattttctgttttaatttctaatttggtaaatattgatagacataaaccacataaaaactttttgagaccctcaataattttttagtgtaaagagatccatagaccaggaagtatgagaatgagtgatttacccaaattattcaaatgctgaacatgccttgccctgatactgcttggtgatttacatacagaacttcattgtcacttcaaaaccccctcaggttaaatagcttcactcgttttagctaaacagagttccatagggattgattataaataacccaaaatgacacaactgttaatagtaatagaactaaacttcggtgtctccaaagctcaccagtaccactctctgtgtttcatcccatactttattctaatacagtttgcccttacatatttgactctgaataaacgttgaatatgtgcatgcatcactgtattatatataccgtggatttttaatttttcaatggtatcaatgatttaattattcagctcttgcttattttcacttgattttatcagtactagaaatttttgtgcatcagctaccacttccttcgtctaaagccacatttgaaggcggccaggtgcagtggctcactcttgtaatcccagcgctttgggaggccaaagccagcagatcacttgaggccaggagttcgagaccagcctggtcaacatggtgaaaccccgtctctactaaaaataacaaaattagctgggcatgggggcgcacacctataatcccagctactccggaggctgaggcacgataattactagaacccgggagcggaggttgcagtgagccgagatcacgccactgcactccaacctggatgacaaagtaagaccgtctaaaaaaaataaataaatagaaataaagccacgtttgttagtcattgctaaaataacaaaatactttaaaatatgcccctatactcagccagatcctcaaagaaccacatgcctgaaaccatactggtgttccttggccctctgtgagttgcttttatgaatcccttttggcccaatgccaacaactttattgagagatagtgagaagattccctatgactctcatccatattgttaacagagttctttattacgatccagaatgccctttcctgctttgtttgaacaatttgttggattttttttttttaatcttgtggactctgaaaattcgttaacaagtcggatttccttcttcaatgttgtcttttgtggcctatctttacagcagctttgttagcactcaagagtgtttggggttgtttttttttttaatctcatttctggctccattgtgtatcccttgatttcccttccttcgttcaaactttctgaatatctttgaaaagattctgaaagaatctcattttcctttctaataggcctctccttttcgtacaggtactgcatttggaaatgggaaaacctcggattatctgctactgggaaactttgtgtacactgtgagtgcgggatgtcggtctcgtttgcgtgtaaaatcaaaacctttcatctgtcctcattttatttttaaatttaaacgtgatatgagtgtttctggatttaagggttgtttacggttccctttaaaaattaagtaagacccagggcttataatggggtcttatttcatttttatcaaataatgaaataaaataactgaatgataggaaatcagtgccgttaagtagcagaaggaatgaggttttgccaaatctggggggtctcctttctcttggcatcaacccaccgaagtagtaaaagacaagcaaaagtatgtttgcaggggctggtggctccttctcatatgacatgaatgcgaaagcagagcagtgggtagaaatagatcagagcgtatgtcatggatgtctcctggggacactttacagtatccaggtctcaggagagtatttttctttaatttatttcaaactatatctcttctctttttttttttttttttttgagagggcgtttcactcttgtcgcccaggctggagtgcagtggcatgaccttggctcactgcagcctctgcctcatgggttcatgtgattctcctgcctcagcctcctgagtagctggaattacaggcgtgtgccatcacgcccagctaatttttgtatttttagtagagacaaggtttcaccatgttggccaggctggtctcaaacccctgacctcaggtgatccacccacctcagcctcccaaagtgctgggattaaaggcatgagccaccacacctggcctatatctcttcttttagaatgtttggatcacataaattaatttttgcatttagtaagttttattttaacaaataacctaaattgccattagctatcctgctgagaaagctcaactgttcttactgtaacctgactttacaaccccactgggaagtgtcttatcacatgctgtgtgcaaacccttaatgtgccttaaagtagaactgggcacttcaagcatttattgatcaagtgctagcaaacatcacttccatcaccacaactatcaaaggtgcctagggtttccttgacgactaacaatatttaagattgtattattataaataaataatattccatgttaatcactgttctgagtattttagagttttactctcaagaaaagaaaaaaaaaatctctgtaagattggtaagctttatcagtcccagtttacaagtataggagtcgagacacagagacgtgaagtaacttgctttgttcattaaccacaatagctaagtgataacgtcttgggcacaggtagtctgactccatggcaagtacacttcataattatgttacactgtggaaaacacagagcaattaatccaaccccagtttcctttttcagaatgactagcgtaagccccagcgatgggtgcatatatcatggagaaatgtctcatgtcctactcagcaaggttttaagtaaagttccagagtaagcatttagatttctaaatgtctggttattttattcattaaaatttgtctttaaaattcagaaagttggacttttaatatgaaaggagatttaaaataaaggtaaagtaagcttgaaaactcaaattaacccaggcatgtgctgttgctgttcatgaattgtacaaaaagcagaaaacacatacagaggaactcgtggatggagggtcaggctgtgcaggtgagggagaggcaaggaagccggaagtgcagtgctgccctgggcacctctgacctatcacagtcccgtcagctgcccagctaatttacctgtctctttgctggttggatatacaaagcaagcagcagtctcctagtcccatagttacattcagagatctctgttctttataaatccttcagtcatttgatgaactttcatgtttatgaggtaaaataacattttccccttctgttttagtttgtggtgataactgtgtgtttgaaagctggattggagacatcatattggacatgggtaagaaaatatctaaccacaaccaagaaatgtcacatttacttgtgcattatctccagtcttggtggtggtcttcactctaacttgatatgtcccaggttaatatgtcctagtccacaggttttcaattgtggggtgtcaggggtaggggaaggagaactggaggttttagttgggaaatactgagttaaacaaacttaaacaagtgcattaccacaagacttctcagagcctttaaagtattgtcatatattatgagtatcccaggaagtggtgagactttaaacttacggattacaagtcttttcttagaggtgtcactggactggtgttctgcagcaaacccattggaaagtgattctgaagactgaaaatattaaagatttgtcctcagacattgacaaatacccagtcttgttccattttagatacgttagttttgcggtgtacccccgtccagtagagaccccggaaacaaaaagacattaaagtttcatgtccctgggaaagattgccacaaggcgtttggatttaacagccatcagcatacatataatattctcacaagggtctgacatgtttcggtgagagcatgcagaccaagagtaaggcaggcttccaaatgttcaggggtaaaaaaggtaagcgtaagaggagaaaactaccaaaaaagctagaggaggaacagttcgaaattccagtaccacaaacattgcaactgttgtagaagagattagcacttaaagatccaattaaaaaacacacacaattaggtagaaactcctatagataatatttttatggatataataaaaagttaataagggaatttgagagagtttcattagtatttgtgtactcggtctacataaaacttttttgactcagatttccttgctctacagttcagccacatagcgatatgggggagcatcgcactctgggtggtgttttttggaatctactcatctctgtggcctgccattccgatggcccctgatatgtcaggagaggtaatgtgcgctaataactcacaatccaacaaaaccttaaaaactggtattttttagcaaaccttaatcgtttagcataattttccatcttgttgatttatattaaaataggatttgaccatttaaaagctgtttttaaattccacagtttcgagtgattaatcttgagagaatattttaaacttgaacattttacttaaatctgacttaccttttcataaacataaccaagacaataaaatatggttgtcgggagcttgaatctcgttaagaatatccatatagaagatgccattttaaaattacaccataaagccacaaatacattttgattaaagatttggggaaatggtgagtttctgtctggggacagtctatcatttcttctgttatctcttattccagagaaaaatctgctgtcactagattaaatgcactttttgagttgtcctaatgacatcagtttggttttcattttgaaagaattagggcatctgacatttcagccttatcatagtccattttcaattctgtctttcagtttcttgttacacgggtaggaattgagttattaggtgttcatgggggagtgtcaaaagatctcctttccttctgaagagattccagcagtaggagggtttatgatttcaattgcaggaaatttgacataaaatgtataaaagtaaatgtggaaaacattttgggatttcctgtgacctcacagtaacttgcaaatcaaggtaatgtgagctccgtgacagtacattgttttaccgcagtcccaggaaccctttccagtggttttcatgtatttgttgcccctaagtactgcctgagtacctttcacttttgacagtctggtttatagatcattttcatgaaattttatctgacagcatcctgctttttataaattagcagaatgcagacacatttttaaaaatttgtggttaaatttattagagagaggcattatatactattacagcaaaaccagacatatcaaggagtatatacttccttctacaaaaagtgaaggcttcttttgaaacatatattgtgaaaactagaaattttaacagcatgtattctaagcagaacagggagaatgccgtgagtgggtctcctctttaccttggtttctgagtccttttcctgaaataaaggaatacaactgaaggaaaaaaagtatgtgcatgtgtatgtatctgattatgacatttggaaaatttaattctattctttgtttttatctgatgtgctctgtctcattggacctgcctttcccttaggtcgattttaacttgatatctttttcattagacataagtctttgccttcctttatctcatttcttaatgtttattttattttcaaaatgaataacacaaaagatttgagacccagatggtttaagcaagtgtggccaataggtttgatgacaagaactgaggttttgaccacctacttctaggacaagtgtgaagtttgactggctttttgcccaccaaatataattctacccttgcctgtagaattcccagtattacccaaacacaaaacttaatatcgtctcttgagactcatggtgatgctgtgtttaattcaaagtgaaatgaatgtcagtactccatcacatttctgttcacttcagatacagtgggaatgctaacagaggttcttttcttgttgttttattactactgctactctgaatatagtgtttaaatagctggtgctccactgaaaatatgaaaatggattaattcagctgtagggtaggcttgactagcacgtccaaaatgtctgtttattcaaacaaaagaagaatactttaagtttatgtagcactttagtgctcccaaagcattttggtgtgggtatggatgtgggtgtggtgggatgtgggtgtgtgtgcgtgtaaatgagcctcacaataatgccaatataaggatatagtgagaatgccactcagattctccgaggtaaatcatctccatttactgtttcttgggcattaggctaataagtcccaaaaaatgttgtagctgtattcaatttctaacatttttattatagatatagggtcactagttatgttacattacaactcagttaatttcaacaagtagtgactactcttaggtctatatttttctaatcttaaaattcttatctcaatcaagaatatagccaaatatatacatatatatacatacatatataaatgtgaaagattcatgtatgtgccaatatttatatctgtaggcatatacataattggccaactgtcttaaagcttattcaactgttaactttcatagcaatatattattgtaatatattgtacattacatatattatctattgcatatagtaatatattgtaagtaatgccagcataagttaaatgttagcatctgctgccttgacatgtttatgatatccacgtaatgaaacacggcccagagcagccccgagaacttgaggccgttctgcaggattcctgatgcagggtgtaggtaatttctgtcaccaccactaacagggtcataagtatctaatccaaagatcatatccccaggatcccagtcctttcctgtgttgatttggcagcaattccttccacactaaataattaattatgtacgtaagtgtgttttggttgcccaaaagcttaataagggtctccaggatggtaccttgtagaggtggagcagacagagaatagcagccctgttctgctctgtgctggttcaggaggtattttggagagtgagacactgtgtggttctaaagggacgttgactgaatagaggagctctataaaaaggcaaccaagatctgggaagaataacaccaataatacctcatgaatattgaacgcttactttatcccaggtagttctgtaaggactatatatatattttttttcaatcaatcaatccaacagctattgagattcttctgtgtgtctgacgctattctaggcactgtggattcagtcctgaatgaaacagacagaaacccatgccctcccatagctcacttttctagtgcaagggggcagaccataaatacaatgagtaatgaaatatggaaatgtttaagtgcctagagaaaagtacagcaggtaaggggaaccaagagccatattttcagttgtgtttcccataaagccttgtggcatttactcatagtcagattaaaaaaaaaaaaaaaaaaaaactggaggagcttgagagggaagtgtcatgacctgatttatattttcgctgtaggactctgactgttgtattgcaagccgcttaggaggctattccagtaaaacaggtgagagatcatggtgtgtggggcccggagggcagcagtggtaagaagtggttggattctgaatacagtttgagggcagagccaataggattgatggacaggttggatgtgaggagacagaggagaagtcagggcagactccgttgtgtttgccatgaacatcaggagagagtgcttgtcggtaactcacatgatcctcacaccaaatgggttgccatgatcaccactttacagatgtggaaattgaggcacagagaagttaggaaccttatctgacatcactatctgactcatagtggcagagataaggtttcaacttcgatgtctgatccccaggtctgctaccttaaacgttgccctgtgctccttctctgataatagttgctaagaggaatgcatggtatttgatctggaaattagaagtctaaagggaccctcagtcctcgcaggtatttcagggatttgtaaaggaaaggaaatctctgtattctgttttactggcagcactacctcctccatgttcttctctctgccatttcctctctatagacattgcagcggtcttgttcttcctcagtccttcttccacatcagtgccacagtaaccatttcagaatgcttaaactgcttctcgagcgatgactgtatcttcatttctttcctcattcactcagacctaatggtgcggggcccctagtgccccataaatgagtgttaagtgattggcaaataacattttttgcttgcttccgtgttttagacaaacaaatgagaaacagtgaaatagaggttatagagaagcagctttcagctcacataagtacatctttccaacatcttgtgatttccaacacatgaagattttcagcagcagaacaggatgctggtctcatttaactaatccttcccaggccaggcagatgagctcccagccactgtgatacttaagcagcactacattctatgcctctgagtttgtcttccaattcctaagagtttctcttgtatgcctctctttactgcgtccacttcagagaactatcttaaaagggcacagatattttgctctagttaacaggatctcggggtgcaaattatacaaattcagcaacttacaggtacaggtctcatgcttctatattcagcttcatgcagattcacacaatcaggactttatagtcatttccaacttacattcttgggtcatctttgcagcaaagacagagccatttctctcaatgtgttgaaagaaaatccttgctccctaagttggggagggaagggaaccaacatttattgtgtacctactgagttctccaggcgctatgtttaatgccagatactccttgttttcgctaaactcatgttccaaatctgtgtagtaagcaaagaaatagccagtgacccagagaatttaacccaggtcattcttttcaatcccattggtttctgctagcatcctgaggaattcagtaccttctttttggggcccattgctgttccgtactctcaggtgataactctttttgtcttgtagccatcctccttgcattcagtccatctgccatttccccgcttttcccagggccctgaacaatttctataagctagccagatatgaaagtgctcccatctctttaaaaaagtgcccagagttataattcccccttctcaacacccacctgactccctcaaccctatttagagaaattccatctcacttcatatcctagcctcttgcctcttcttaacagcaatattagcataaataatacccattttgttaaaaaaaatttaaaaaaactattaaatagaaaacccagtcatcctacatcatcagaaaacgaatggttgccactcagctataatagggccccattgatgaagggccagtcactgttagaggcacttttcatgtagtcactcatttaatgttcacagccacactgtaaggtaaatccttttagacatttcacagacacaaagtgaagacacactttctgaaggtcaaacagctccagagtatctgaactacagtgtgaacccagcctgattctgtcccctgatgcaccgtgcacactcctgtctgttccttttccatttcttctctcatcttttctttccccttccctgtggcttttctcccagacttatcaactttaatttaatgcccttctagcatcagtgccacccatcgaagtacttagttccatctggttgatgaactgaccagtcatgatgtgcatatactatttccatcttcagctgtccttagctgcctttgtctctgcccagaagttcttttcagggcatcagatagcttttccccttttgcttccgctcattctgcatgcctgaagtgaccagaaagctattcctcaaatatctcagagtttagtgcagacttggttactgtagacccagccgagagttggttgttctcagttggtgggcagggtgttctcatttggaaaacattcccacctatagttttgcactttgtttccactacagtaattcgacatctctacccatgataatgattcaaatgataatgattaacaagtgtcccacaaccataaattattgaaatatttaactgttcaaaaggaattacgatatcgggggttaggggcagtgggggtaaggtagacaattggaaaatgcaacaataagaaatcatttaggaaaggaaaaagaaactagtgtgacgaacttggctgtcgctttaaataagttgctgtcttcctctcctctcacaaatatggttgtgatttaagaggagaactttttttcagacctgacttgtattttttcacaccagtacaacaatttatggggcaaggtaggccctggggaaaagtgctatgttatataaacatatgttggcctgcttttccgactcgtctaaatgatgttactgagtattttttgaatttctaggagaaaatagtttagccaatgattaataaaccagattaaaaaataaaaaaccagctacagcagggatcgtttcatatcaggattaataacagaagcttagtatcagcaaaacctttaaatttattgtggcattgcagacaggcactgtaaagtcctcccgagcaccatctgtttctgctctccctggcctaagggatctataaaactactgaaggaaattgaagttaaggaacgagcatgtgttttacagaatttcagatctcttgattgaggtttgtaaaggctttctgaaaaacaataaaaatctttgttgaaccctttggtgtcagccctgtaggaaaggtattaataaactacattagtgatatgattttcctaaattgtgctgttgcctattttatccaacataataaattacttttcatatgaggaatttcctggttaaaagagtctttattgatctatcagcttttaattacctccgtagcatgtggtaatttattggtcttaagaccaacccttgttgctgaggtggggcagtgttatgatatgatggagtttcatctgagattactgtgtttagccaagtagcctggagggaacaactatgcaaaattctgtcagatgttcttcaatgagccaatgactgtgagtccatccagtaaaacctgccattggtcacagtcctcatgcccccaacagtaaatgaaacaggtagaccttcattcactgttctaaaggcagctggccaagagccacttccaagcccattttgtaaagagaagtatatatggaaatgctgagaggaaaagggagacatgggtatgacaaacgtaatcgtgaatcaggacctctgaacatctgcatacactttacagtgagagctctccttagagccattacgagaaccagcattgtgttttgtaaccacagcacctttgcctgcaatatacggcaagtgtagatcgagcgtctaatgtgtgccagggcctgtgttaggcactggaggatgcaaggatgaatggaattggccttgtcctcaaggatccctttgtttaatggtggggcattgatgtcataaacgagagagaggccatggtgtacccgtatgctacagtgatgagcaacgtatgaaagctgaacgaagcctgctcctggtacggcacagctttaactattcagccctagagtcaattcattgtcgcattcattcattccataaatatgtgttgaggacttaattggtgccaggcactgttcctcaataccaagttaattgggcaggatccccattgcctaattgagggggccagggaatgggaaggagaaacaggtactaaaccagttaacaaatgactaaatgaagaataagtaaagataatttgacaaagtgataagtgacgggaggaacacagaacagatatgataggggacaggattataatgggtgttccaggaaggtctttctgaagttgggacggttaagctgaaactcacatgatgcaggaatgaatacctgtcatatgaagaagagcatttcacgctcaaggagtagcaggtgcccattctccaaggtggcaacgggattttccatccaaacacaaggcccgtgactgcagcagagagagctggagagagcactgtgaggtggggtcagtgaggtgggcagagggcggactgcctctctgccctccaggcccagcattctagtgtgggaaccaccacagtttttgtttgaatgacaggccagaaatactcatgaaagaaagtatgaaagtcgttgtgccatctgtttcaataaagctcataactggagatagtttgtttttttttttttgtttttttttttttttttttttttgagatgaagtctcgctcttgtcccccaggctggagtacaatggcgtgatctcagctcactgcaacctccacttcctgggttcaagctattgtcctgcctcagcctcctgagtagctgggattacaggtgcccgccaccacgcccagccaatttttgtatttttagtagagatgggtttttgccgtgttggccaggctggtctcgaactcctgacctcaggtgatccacccatcttggcctcccaaagtgctgggattacaggcgtgagccaccacgcccagccaactggacataattcttgcattccatcatatggtaaggtaaagggctcgtcaatgactggtgttaagctgctttgttcaaagttgtcacttaagctccctagcatgcatcatccaaagcaagttactttatggcatatttttcagcatttaaaaaagtaactggattaaacaagataaaaacgtatttatcttccatgtaatagaagtcaattgggagacaggcagtccaggactggtatggaatctgcacagtcgtcagagactaggttgcctttaacttactgtactgccaaccttagtgtacttcctcagtctagaatggctgtctgagctctagccattttaccaaccttccagctagcaagagagggaagaaggagtaaccctttctatttgaggctccttcttagacattaccaatacgtttctacttagatctcattgaccaaaagctaatcatatagccaaagtagctgcaacaagagagccagagggatgtagcctttgagctggaggaaaaggtgtccagccaaggaccaaagtgattgcatctaaagaagatagagaaaggagatagatttgatagaatgaagggcaactaaaagtctcagccatgtaagtcagtttttctatgtaagccatataacagctgtttttctttagctaagtgctttttgaagttttgaggtatttaaaaatcattttctacagtcttgaaatgcaggttattgtgttttacagactgatttgtaatcaaacaactgatgctttatgagatggctttttaaagatttttttaaaaaggtaaaatgcagaaccatcacaaaattataaaaatctgtaagaatggtgtaacaagtaaatatattgaacactgagatatcataccctgtctcatacaacttacttaataacatcatagtattttaaaattttgtttctcttaatgaaaaaaattttttttactaatactgtcctcatttttctgcgacttttaagtttttaaataggacaataatgaagattaaaataaaacgaattatgtttttaattatcttcactattctgggaactatattcctagagaatagtttcagaactgcacattttctagtgctcttgatgcctttttagaaagactattttcttttgcatgtttagttctcagtatgcattgatatatagtcaaaaaattttttataaaaattaacttctagtttatccaggtcccaactagctcttcctcctttccctctaaacaccttttttaatcgttttttttttttattactctcttgccagagaacagagatgcaaagtttctttcttgtatcatatggctagattgagtattggttcttagcccccacgagatgataacccctttttcagctcctcatcaccccagagaaatgtccaaaggaaagaagcacataaatgctgtgagctggtatctaatttgcatattttctaagatttgtgtttgtttgtttgtttgtttgtttgtttgggataacccaagccaagagttttctttgtctctgagtaatcaaaagctgctgagaataattgtaaacatattggggtttatctgaaacaccctttagttattttctgggtgttctgccctgtctagtttcgtggagaaagtaaccatcccatgtaagagcccaattcagttcaattaaactgagatttatggagtgcctatgtctcaggacctataccgggttcagtggatcaaaagtttcaaaaagagtccattctgaagagctagtttgtcatggagtagtcccacagacaattaggatgtaagacgctagctgttatgctcataatgcacagggactaacagagaagagagcgctggacgcccaagctgttgtttggaaaagtgtcttggtactactgttccccaagctgtccaggaaggtgggtgtgaaaagagttttccaggtacagaacagcccaagcaaggagcaagtgtggtgttaccaaggcagaaaatgattggagctagaaccagaaagttgagcaaagaccaggtcacaaaaagttacctgaatgtcattaacatcattactgtaagtcatggcagacatcttttcattacagaatatacagtattccagagagtaccagaagccatagaataaagatttgagtcagaggaagtgataaatgctattgataaactaggaagtcatgaagataattatattttgatgtgaatatatataccatataattgaaatttgcaagaatttttttcagctaaaatgaaagacagtaaagttagttcttaatgataaggcccagaacagagaatttggcatttgcactcctttgtctgtaggctttctcagagggaagtgttgagccagactacccaagatgtgcagctactgaaggattcagtgggacttctcttcatgccaaggttcatatgaacttagaatttgtctctggttaaagtacaaggtggcaaattcaccacttactgctcatccagggatgcttgcgtaccacccagttcaaccccatgcccaactaccataatgaattcagactggaaggctcgggcctctgagaaagagtccaacaactttatgacctctgcagtgtcccaccatggtatttcaccagcctggaacacaaagacactttcagaagtgtttgcaagttcagattctaatgacacttttcagtgtctgaaagcagagttgattttgatagtcgatgtgaagttcccatacatcagtggtagcattgccagcagagaggactctagcattctactgatatatttctaccttgccataaaaatatagatattaatattgtggattttagcttttaagatactctagagtatctttgctgtaaaaatatagatgttaaagttgtggatttctccagttttcggggtactctagagtaaccctggagtctcaggtttcatgaataagatcttccagtccactgagattgggtgactgagaaaaggaagtggaggagaaaagagcctattatgggtaactgagattgggtgagatgagactgaaatgggaatacagcaacacaaaatgcaccttctccgaagagatacctcgctaatagagcatagacaaagcactgcggtatagcaaggaggaaagagccacaatgcggttggaaagatcaagaaaacttgcatgaaaagaaacaatacctgcaaacttgaagctaagcattgaagatttttattgatgatgatttcacgaagaagatgcttcctgagaagaccaaaagagttaactgagacctaggaggagacaagagaaactaaatgacctcagaccatggcagataggttttaaaaagagaaatgtgagaggtgtatatgtttcgggggatcatggtacaaatcatctctgaagagttatgctaccaggatgtttcagaggggtcagagccagaaagaaccattgacttcttggatttggcaaaatcctaggaaatacataatggatttgccacttttggagttttctctaacttgttaactcccttggaaagggcctaaatctttaaagataaaatagcctttttacacaaagaaaaatgaaagattccattcacagcaacaagaagaaaccttaccagttatgtgaatggttagtaggagaaaaactagaaaatttgacaaaaatgagagaaatattttaaaagttgaataaataaacataccattctctgaatagaaggatcattaaattgtaagttcttcccaatttgtgagccatttgggggaacaaaaaaaaatacaccttctcctcttgattgtaatctagtctaggaaaataattataaatgcagagaaagagattagagtctgactgaaaatagaggcattattatactattttgagtgcttctcatatcagtaaaaattaaagttttttcctctttaaattttataataaaaatttttcaataacttagtaacttagtcgttaaatcaataatatatttcaacaaatatatgtcaaagcgctattctagtttctgggaatacaaccatgaaagaaaatctctgcctttgggaggttataatctagagaagaaaaacatacaaacataagtctattatacagcaggctggactgtgttaaatgctctggaggacttgagtgcaggggagaggatggggtggggtggggtgctgttttcaatggggtggtcacacaaggcctcactgtacctgaagtgttgtgaccaggacctgtggctatctggaagaaaattccagatggaaatagacaaatgctgagagcctgaagactgcagggtggtggaagctgaatgagggagggggtgactagtaaaagcactattattcctaacaaactaatgcaggaacagaaaactaaataccacatgttctcacttataagcgggagctaaatgatgacaacacatggacacgtagaggggagcaacacacactggggcccaccggagggtggaaggtgggagaagagagaggatcagggaaaatatctaagctcaatacctgggtgaggaaataatctgcatgtcaaacccccatgacacaagtttacctatgtaacaaacctgcacgtgtactcctaaacttaaaagttggagaaaaaaaaaaaaggcactagcgagctggccttcggagacagggctggggcagaacacccagggccatgagacaattgtaaagactctcgatttttctccaagtctctggagggttgagccaaggagtcacgatctgacttctaaaaggactgctctgggggctctgttaagaatagtatgtacagggaacaggcaggaggccaggggacccctagcaggctgttgtagcactccagacagaagatgatgggggcctaggcaaacgtggaagggcgtgaagtgggtagattctggatttggggtggggagaggatttgctctaagaatcttttttttttctttttcatttaaatgtttttgttatggtagaatatacataatgtatttatcattttaagtgtaaattcaatggcattaagcgtattcacattattgtgcaaccatcaccactgtccatctctagaactttttcatctttccctactgaaacctcatacctgttaaacaatccccattctccttttcccctaacccctagcagtcaccattgggcttgctgtttctgaatttgactattccaggcactgcatctaagtagaatcacacatttgtccttttatgtctggtttgttttatttggcaaaatgtattcagggttcatccatgttgtaacgtgggccagaatttcatgtctttgaaagctgaatgatattccattgtatggatatgccacattttccttgtccactcatctgttgatgttgtttccaccctttggctatagtgaacagtactgctgtgaacattggtgtatggatttttttaagtcaagccaataagatttgccagtaaattgaatgcacagtttcaaagaaaaggggaaacaaagatgacttgaggattttggccagggcagccagaaggataaagtttgtatttgcctagaggaggaagactggaattttatattctgcttctttttctttaacttagcaaagtgttcatactgtgtagttaattaaaatctttgttaatgctggtacttccttctcttcctgcctattctacagctcttcctcacctccccacaaccacaaaaaaaaaaacaaaacacttttatttccaggtatcatacctttcttggattcattgaaatacttctgatgattcagactgggagctggggatagtttaacatatttagcttttaatgcacactcgtcaaccttcaacagaaaaggcagcctacattggaaaaggatagtcatggagctgaatcaactcctctccccaaaatacgtaattatctggcaataactctccctagaataactccatgtcagagcacaagaaaaccaagcaaaccataaccaccacatctcaagaacagggtccccaggctctgtttttcatagtttctacaacactaggttgtgagaacatatttatccagcaattatttattgaacatctgcttggtggttaagcacttggatcatgagaattaagagagtatatagtctaacaagaggatgaatgagcaactagaaaatgggtgataggtgccaacataacggaagcccaagtagtgtcctctgagtctaagaaaggaaaattgaaggacgagtaggcatcacaggtgcaaaggcctgaggacaagagtgagcatgggcgctttccaggcatcaaaacatgttatgtgtagcaagagatgggcctggcttgagagatgatactgggaaagcaatcagaagtcagataggaaaggtcttgaaattgtattaaagattttgtattctattctgaggacattctgaagccacagaaagggtttaatccaggaactgctaacatcgaatttgccttttggaaatatctctcaggctgcagtgtgaacagctagaagcagagtatttctgaagtcagtacagctaggaggacaggcaaattatttggactgggataagcaaagttggccagagatggataaatgtgaagatgctaaagcacaacagaacctggtgaaatattggacacagggtaaaaagccaattcaggaatagggcccaggtttctgtcttgggcagccagggatgatgccattccctgaatagcttgtaccaaggaagagcagcctttggagggaagacagtgtgtgttcagtgtgggatgtgtgaggtttgaggtgcctgtgcgacccacaagttaggagctcagtagtctagcctgtgcttcaagttcaggtgagaaatctaagccacaggtgattagtggctgatttccatatgaatgatgatacaaactgcaaacccttccagggagggtgtttgtatgctaacagaaggctcctgggagaataccagggtagtttacgtttccctccaggactcttctaaactatcagtcttctgataattacaatctgtgaacagcatcttcacagcttggataacattcagaccgagggatgcacatttgcctaatgagccacatagtgccctgttagctttaactagtattttgttatttataacaacccacaacgaatatttgcattccccaaaattagttgtgtgggatgtttgtaagaaggatgtaggggaaagtgttccataatcaatcaatacctttaggaaacctgggtttaaaaaactattcagtagggtgctttactctgacttcttgaagccttacgctgctctgcgctgtgactctccaagaggatgctgccatggtttcttttcacctttactaaatctctggccatgggcccttttcaggggatgctttcaggactagcaaccacaggacagtttcatgagatactgataagcaaaagctggacttcattttaacacatagttcagaaattgaattatcgaattaaaaggaataaatgtttgtggtgttggtgcacattgccaaataccttttccaaaggctagttcattgctggtgggaatataaattgctacaaatacctattccaccatacacctctcactccaccaaactgatggtgaatttttaaaatctgatctaatttgtcagtgttctctaagactgcagagtgacttaacacttttccatgttgttaattacttgctgctgcttttatgaatacctttccaggtctcttgcctatctcttgagattgcagctattcttatgaagataaatgggctatttttctggtcagatattaacccagaatttcatgtatttgtagtagtcattctcccagttttttattgtttacttttttagttatgtttctttgaacacgtggaagttctacgttttcgtaaatcagttctttaaagcatcctttcatagttttttttcactgtttttaagctttggaagccttttatataaagctttgtccagacacttaataaataatcacttcttggttttttgttgttgttcccagcgttaacgcaactactctggaagttattcatttctcttactgcactcccctccaaaaaaatgttttgaagcactattttccaaataattttcccttccaaaattaatatattatgccggtgtagtcaataatttctatgacaaaattatttttctccattttctaaattggcaaattgagatgaatggcactttattagggatctcttactttggcctatgtttcatcattgcgttttaaaaatagcagataagacaagcgtgtgctgtgatattattgagatgaacatcataaaatttataaattgatttacagttaatttgatattgtcataaaaatttgcttccatgaagctcatgggacagatcactggaaagaaccagagacaagagcatttaaagaaatttgacaattgaaatgaagaaagtttgttaataatcaatgttatgcagccactttacaaacattattgagtttaattcctacaatccactgtacagctgaggaaactgagactgagaagtttcttcccgagtgtctgattagctgggaagggccgtgccaggaccacttccaggcctatcaccagacctgctccaactggggtccatggagacagtcttagagttctgcaaagggccttctgttttagatgtctatacatttccatgagtaagagtcacagcatgccactctgatattaatagtgtaaacacatagaggtagactgaagaaccatgccgttagtttgtaggcaggtggcacacttgaattctctctcctatgagactgaacatgggcacattgaaggtgaagaagggtttctgtctggcgtgggaacgtaggtgctaacagatcatgccgttgtgggtcagaaggtaaacccctcttatcggtcatgccccctgacttggccaaatgcacataaactcgtattttctcaaaggtttgttccctgaaagttcacatagaaatttcagaacaattcctcttctgcaagttgtgttttcaggcagcgttggtttatttttgaagccccagtggttcgattttgagccggcatcactctgcagagacaagcagttgcttgttcgccacacacggcctgtgccctcctgttaccagctttgcagcttcctcagctgatcccttctcaaggcccccgggagccactttcgtggcaaattccatttggtttcacagtgccttgagaaggggcagtgggggccacttggcctggtgcaccagtctcccacattaggagaaatttgcaaaccgctctcggagggaaccggagctcggcccgaacaggctgctcctgttcggagcaatccaccattgtctcaggatcccttcgccttttcccagctgacctgcctgtgagtggggaaatgtgaaaagttagagacaaaactggtttcttcagagtgagggggagctttcttatacagaaaggaaggaaatacctctgtgggattttatttttccccccctcttcatccaaaaaatacaaagagactctctgtctttaatgcgaatgtcggctttaaatcttttaggtttggattaactctgcaaaagaaaaaaaaactgacaggctttcagatatgacgcagaaaaacttttttcccctcaattcatgttgttcatttgtaatgccaaaggctggtagactgaatggtggggcgccagtcactcctccattcatcgttagcatcacaatggtcagaattagcagccttgaatctccaccacttttgccttttccactggtggacatttaatacaaggtggtgaaggcaagaataaatcctccttctcttgcccccccccaaccaaattaaaatatattaaaattaagccaagtaaatgtattttcagttgcatgccttggaattcttaccttacctttccccccagaaggagaaagaaattggttttttacagttgttaccttactagaaagcttctttcaatctaaagaaaatctactgacttgatagacatttcctattacacagttattgttggttttcaccattgaggatgtcagcaaacatgtcaaagatcatgttttgcttattaaataaagtgacttttatgtgagtatttttcatcttgttggtgtctcgaatattggtgctatttcattgaacccatgtggcaaaacttattttctggaattttttgtaatagcatgtttttattttaaaagtattcagagctattcacttctacatagcgaaaaatcttagcgtccctgaacctgcggtctgtatcgataagctcatgtcaatgcagaaaaaatttaaacagcagttcctagtccttaatcgagagtccaaatgaataagtaatctgaaatataatttaaaattagaaatgtttatgtttgataaggactgattgattaggactatttatgtgtaattttgaaattgcctagaataattaaactctaggttatttttaattcctgaaccatacctgattctttttaattttgcatgatttttagtagaatctaaatgtgcatgcgttagttggctactttttaatggaattagaacaatacatatatggatttaaataggtactaaaaatttcctcttgataaaaagattaaaagaagtgaaaccaaaatatttcttttgcttttattgtataatactattccttttaagttctgtgtaatctaattatattacaaagatattttttattataattgcaaataaataatagaatttattactttttaaattacagaatcatttttttttgcaacccaaaaggctctaatacagcaatttggtatttattacaaagaaattattaaagttatttttaatacacttttatttggcttttacatacaagatatttggtttgactttagcaataacaggtatgcaccaataccagttatataaatcattgaacaaaaattaagattattactacctaatgttagccaaaaataatcaaattgttgtttttgtaggtatcttaatttgattatacagtagtcatgatttatctggataatttttaatatcctataattttacaaaagtaattttcatttgccagaaatagtaaatttagtttctaattatgatttattttacaccatatcttataagagaatttaatccagagtatattttaaatttgctcaaagatttattttgatattctaagttaatttcataagttcgaattcagagttgtatactctcttacagaatgatattcttaaaattgtttcacttaaaaatacataaaaactaaacacaaatcatgtattttttggttttaaagtaatgttttttctgacgatttacacaggcagccatgttgttcagttctggagtcttttggatgggcttgttattcatccctgtggcatctctgctccttgatgtggtgtacaaggtgtaagtatatactcagttatatacggagaaatatagatgcatattcatcctcagatttctctcttggtaacatcaactcaagcatgtagagcttgcaggatagggactggtaatattacttaattttaaataaggaaggggtgattcaggaactagaaaactagtttaaaagacgaaatgagtagtaaagcgggtagtttcagttaacagagaaaagtaaatggcactggagaaaattacatcggggagtatgttttttagaaacagccccaaaactcatataaaagtaaaagaaaaattgtactatttccaaaaacattttttattataaaaagaaatgttttgcttgcctgattccaaacatatataaaatataaaatgaaagaaaagaaaaccttactaatttttttcaagggttataaattttaaaatcttatgtcttcccacaaaaaagatagcatttaatttaattacatgatatttatttaaataactatgggagtttcaatattgtaaacctaaaccatcatttatttttaaaactataatttctatattctcaaaattacggtaatttttaagattcttttgaaaaactgcttgtactcttgttaccattgtgctttatcaaccgcgtgataataagccagacatctagttttgtaaaatcttcacagaagtatttccatgcaaatccctttttttttctttttgcagtatcaagaggactgcttttaaaacattggtcgatgaagttcaggagctggaggcaaaatctcaagacccaggagcagttgtacttggaaaaaggtaaaatacacagtgaatatattcttttccaaatgaactttaaatttatcttgtactagtggttggaaataagtgataagacttgtatttgtcagcatcaagctggcagtgtcattggcaggtttgggagtcagagacatgtggatttaaatctgtcgctttctaaactgtgcccttggctacgttgcttaatcctactgagcctcaatttcctcatcaataaaatgggggcaataatacctacctcatggttagttgtaagagttgaatgaagtattataaagaacttagcatagtgcaaagtctttaatgagcattaaataaatggcagttacaaacattattgtattattaaactgcaagagaagaaaaagacttttagcttgaaatagtatccataataaaatgtatgtaattggccaggcgtggtggctcacacttgtaatcccagcactttaggaggccgaggcgggcagataacaaggtcaggagttcgagaccagcctgaccaacattgtgaaattccatctctactaagaatacaaaaactagccaggcatggtgacgggcacttgtaatcccagctactcaggaggctgaggcaagagaatagcttgaacctgggaggcagaggttgtagtgagccgaaatcaagccactgcactccagcctgggcaacagagcgcgagactccatctcagaaaaaaaaatagtatgtaatcaaaatcatagtttgatataaggcaaattaccttgtataattgcatttgtggttcagtagttattaggaactgacctagatatgtatcatatatgaagtgaattacctatcccaagttctcttccttacaccaccccctccaaaaaaaaaaggaaagttagaaagctaatcaaatccactaaattcacaaagcattgtaagaaagaaattataattagttgcagtctataataaaagacaattattaagataggaggaggaatttattttttttcttcatttttatcatactaaagctgaggttttggctaaactataggaaatattttaccctagtatatgtcaccttaatcatgattcactgttgttatccattttgacacaatggagtagttgtcagaactcagtgagaccttggcttccagctctcttgctctcattatgctgaaggaacacatcacacaccagtgtgtgccacttttttgaaaataatagcactgacctttgttgagcgctcacttcgtgccaggtgcttcccttgcattttacgtgtactatctcactgaatcccagtaacaaccctatacagatccatcatctccatttttttccagatgaggaaactggggcttcgagagatgaagttcccaaagttgttagtgacagatctgggcctggagtccatgccagctgatcccagagctcctgctctgaaccattcacaattctgcctccttttgctgtttgttcaaaaatataatagagctgcaaaaaacagcctactactaacttgacaaagtacttaatctctgactcagcatcccagtgtacaggatgggaatgataatacctactttcagggttgtgtcctcctccctccacctttttcttcatctaaaaatttgcatcacaggattcctcataggaaagtacctgcagtttgtcagtaaattcagctagtaaattaattatgtcagttctctttctctagcgataaaaagaatacagtaagagttctggccaggcgcggtggctcacacctgtaatcccagcactttgggaggccgaggcgggcagatcacgaggtcaggagatcgagaccatcctggctaacacagtgaaaacccgtctctactaacaatacaaaaaattagccaggcgtggtggcgggcgcctgtagtcccagctactcgggaggctgaggcaggagaatggcgtgaatcctggaggcagagcttgcagtgagcagagatcatgccactgcactccagcctgggtgacagagcgagactctgtctcaaaaaaaaaaaaaaaagagttctagctcatgaaattgtgaataaaacaatgtattcgtaattattagggaaaggccactgttaatactgttactatccttagtagtaaatttccagatttgtaagtatgttaataaaatcacattaagcccttccacgtgatacttagtttgtctttttgttgtctaccaatgacttcaattcataaatcaggccagtgtaatgacccccaggtcctaaacattcagtgattccgtaatatatgtagctccttctgttaaataaaataagccagagagcccaaaaaggaaagaagtgaattccagcataaatgaccaccaacttctccataggaaatgcatcagataaattccctgctgctgcctcgctcatttgcctaaaatagctatttagtttttcctaagaactcaggaatgtgttagctatcagctgaataccagacaaaaaaccctggaccagcatgtgctccatgttgccactgccgcccactggtgatcagaaggttaatgatcagtgtaaccatagtggcttcgtgcttgatggcaggtgcccggaggagggaggcaaggggaagatctgtgaaaggagaaaaatagcaactggatggaaacatcttcatgcttaaagtaatggcactctaaggttaaagaattgttggattgattttaccccctggattattttaggaatcttggagaatgacattgatttcagatttcaaaaaaagttagcagttttttttttttgtttgtttgtttttttttgagacggagtcttgcactgtcacccgggctggagtgcaatggcacaatctcggctcactgcaacctctgcctcccagattcacaccattctcctgcctcagcctccctagtagctgggattacaggcacacgccatcacacccggctaattttttgtaattttagtagagacggggtttcactatgttggccagactggtctcgaactcctgacctcgtgatccacccgcctcagcctcccaaagtgctgggattacaggcgtgggccactgcacccagccaaaacttagcaaattttatatctactttatcaaaagggaagaaattgtgattcttgtgaattctaatgataccagactttctttggttccaaaacaccatgttattttatatcttccagtctttgcatttgctgttcccctgtttgggagccccttcttacagactaggcactccaattcccagctttccaaacccaatgtagattcaattttttcagctgtttgcattcacaatatttaattcctagcctactatctctgtactattatactctgtttatactctgtataaacttctataggtacactgatcgcattgcattataaagtattagtttactctatgtatgtttttattttccccctactagattgagcttctagagaggcccatgtcttagtcatagctgcaatgcaacacctggtacagcaccaggaacttagtagcactcagtaaatacttgttgagtggatgaacggaatagttaagagaataaactaaagaatggatgaaagaaagagtgggcgaaaggattgctgagtaggagaaaggattgttgaattgatggttgacctgtgggctgtgaaacagaaatctgattcataaaaacatagaattgtataatttgtacttcccaaactaggtaatatccaaagcaaccatcatttacttttttgtcatacaatgatgcagttcttaagaaagatcttgtgagttgatcatccccaatttttttaatcttcagtaagtatgactattaaactcaagttgtgtataaaatgcaaatgtcagaaaaacaaattgtaagcacttaaggaagattaatatttacaataatttctcatctttgttcattttcagaaaaaatcatcttggttaaaacagccatttttagtggaaatagtatgccacctaccatattaccctgcaaattagattcattttattacattttaggggaaaaatatgtttaatcaatctaagtatgttctaaatacgcatgcttttgagccatgggttatggtagaaataaatgcaagtctacaatgatgagagaataacctaaaccttactcctgaaggtttaaaataacccaaaccttgctgcctcatgacttctaccaaagtccatgtgaggagctgagttcttaagaactgaggaaaaaccgtccactggagaaaaataaaacggaaattgtactttaaaaaaagtaaaataacccaaatcttagtcctgaacatttaaaccttatccaaaagtttacagtaagaaatgatggacactgtgggctcattggaggcaggacaattatttttggatatcattggagtatgtgtgaagcagtgcatttcataggcaaatacaataatgagactcataattcttttttatttctcactgtagatattagccagcatatcatcattggccattactaaatagaattttagcctaggatcttcaggtcagtcctcactgatttgcctggcactaccgtttggccattgtttacagcttttgcatgcagggagagtagggaatatgaggtgtcagagaactcggtggtgtagatggtgacagtgctctctctaacctttctgatgtattgttcatcttaatgaaaagcagttttaaccttgctccagaactagtagaaaggaaattttatttctcagtgttcacactcgattttatatcagtatgacttaaatactttggtggggattgaggacacagggatctgtcaaatgtttccttcagccttctctcatcactgtggtaatggttctgtccaacattcagaaagaaaagtgacagaacactgaaatgttttcagctccagggcagagataggcctgttatattcattgtttgtttctccgccaccacagctaccctagtgtaggacagctattgcatgctatacattaaacattccatgaatggatagttacgtactttttggagatttattttaatgagtcaacctaaatagcttatcaactcaatatgtagacaaatgcaaatttattcctcttcaagtttcccactgaaaattccttaagacaacacgttccaacacattccagaaccatgaattggtttttaccaacactgacattttttagtatttgaaatattattttaaacatgttatctttatattcacctccaccaaatgtttaaattgcaacattttagtgggtttggaaataaggtaacaatatttagtagtagttgtgtgattgcattaaacaaactcaaaatttacatagcttggtatgtaaatgaaagactataagagactacgtaaaactgctagtcaagagttgtgaataaaatgtggttttagtgagaaggtatctttagtgttttttttttttgtcttttcacactgttaagctgttccactaaaactgaacttttaatatatctattagtgttagcataaatatattttataatgtgccttaatagtagtatcagtatctataaacattgatggcccagaattgcatagatgttgaaatgagtagttccccaaaggtgtaagataagactagagaaatacaactcatcatcacttatttatttagcaacctcctgtgaatggcatttatattctgaaggagggactctgctctacaggactaaagcaagaagttcaaaatagctaaggaaaaacaaaacaacaaaaatctagtcattttcttagtaaagaggtagaatgagaacattataaactaaaacccatgtgcagcaacacacatctcaccttgcgcttatgttgactagaaaccaaggcatcaaaaatactccttacaaagtaccttttgtttggtgatgatctctgttctagttgattttttataataaattctcagcatcttgggggtaaaggtgggagggcccagcatttgttgagtgcttcctaagtgtcagtcattgtgctgacagctccctgcatcctcacagtctgcctgagagttaagtactgccctcctgatatataggagatgacagagaaaagcttgcctgtggtgacccagctaataagcagccaacgcaaaattaaaccaaagccctactccagagcccatgatctttcctgagtaatgtgcttctttcttaagaaagagactttcttactgctttgttttaatgctgtacgttaacttgatataaaagaagagctaatgagagcctttatatgaactgtacaaaacggaattatgttaccttatgtatttcagttgctgtaatatgaaagactaaattctcatgtctgccttcttaccactttaatattgtaatattaaagtattatgcatttaggaaggccagcctgaaacctggaaaatgtcttttgggaagaagatgctgcataatgatacattgccatcctctagtctcccgtagtcatttcggtttgaaacaccaaagactttccagcaccccatccacaaggctctgctaaggaagtcagaccacctgctgctaaagctgcgacttcctcaaagcagttacatattttagtgtccctcagggtccatgggtctgtaatgctagatcatttaaagagtagagtaagaaagcaactctgtaaaaatggccctttctcatttctcatatctgtttatttcactgacagaaacaagttttacaactatttgcagaactgctggagttttagattaattagttttcttgccttcatgtagctaatttccaatgacaataaaatatgtccaataataccagttaacctccctagactttaaaatatatatgtggaagattactacaaatgttaacatttctaaatattttttcttcggtttttgcctaaatgtttgcataattcatttacacaatgagttcattttgcagaggatcctttttttgtatatgatattgtttcatttcagggtcttagaaaaattggcaaaatacagaactaacataacacagcaatttaactaaagcttttatagtgggaaaaacacaagatggaaatttttcagctgaatcagttccagttattaaaattgcataaacatttgctgcaacacatatggattacttatttgtttctcatgcctattatgttctttaatatcaaaacaattttataaaacaatgaagaaatggcatgatttggaagatggatgatgtctataagtacatttcagaattattactcaacttcacgtattcaacaaatatttgagtttctactgtgtgagacacttttatgggaagttgggggagaagatgccttattttttacaatgtgcttttagaagttacataattatctggatttgtatctgaggagacaactattctaaacacttcctgaaaaatactttccttgttatttcacctaccataattatttttctgaaaatagtttattttaaaataaaattaaggaacacatgtcataccatattagtggtagtgaacttctagttaaaaagtctatgaaatgtcttctttgtgtaatgttagttaatatttactttaatatttttaactaaaaaatagtttataccaaaacgtgccaaatgtgaaaaaaatagtaataactaattttttattctaaaaattgccatgcttagaatatatgtagtcagtttttaaaagtgaataacactactgttgttttgtatttttttattttaattgtgttatactggctctgtgttgccatttgacttaaatataactgagtggggggtggtgaggagatcctactttttactgggagaaggattattggggaccaaactccttagggagaaaatggcctcaaaagtctgtctaaatacttgaaatttcattcgctatctgagaaaatgtgtaaaaagaatcactaggctacggatttctcgagcaatcttttgtttaagtctaactctctttggtggtcctgtgggcacactggggtctctgccgagttgataattcatttcacacatttgcacctgctctgcagcctgaccgagagggcgcaactgctcaagaacgtctttaagaagaaccacgtgaacttgtaccgctctgaatccttgcaacaaaatctgctccgtgagtatttgagtttcttatttttaaataaattctctgccattgctgtatcatagcatttatacagtatcctgactttagggatatttatttaaaactaatgtctaaaataagttttgcatatttgtaacctgtaaataacagaaaatccattggtcagaaccatttcactttcaacagaagagatagttaattttaaaatcttgctgtttcacttaaagaaaaacagtatttccacattccttgcttcctcaaatctttttctttaaagccagtaaatcttaattcttaaaagctgcccctgtcttgttatcttttctacttgaataactttgcaagagcctttcagctttcatacaacacaaggaagcatatattttccccttcagaaatatttatgaatatttagagttgtaagacattattagatattgtgccctcttaacatttcaagatctaaaaaagaatataaaatgtaaagccctgtagtaaatgtatttgtgtgagtaatatatcttttgtttcatgttgtttccacttataatttattttcacttacgtatactcatgtctaatgcttttgctctttatacttcaagaggccttttctaaagatgtgatccccttgggggccattccttatgcccatgccatgtcggggcgtgagtgagtttatttgtgatgctgagagccaaggggaatgtcctctgaaggaaggagaccacttgccaccatgagcagctatttgtgtttatctcctcctcctcgcctttttaaattgacaaacaataattgtctatatttatggagtacaaggtgatgttttgatgtacagttggccctttctatcagtgggttccacatctgtggattcagcccgctgtgagtcaagtatattcaagggggaaaaaaaaattcacaaaattcctaaaagcaaaacttgaacttgccatggacgaaatactacattgaatccactagaatgaactgatgtgagggcattgtattaagtattataagtaatctagaaatgattttaagtctacgagagaatgtgtgtaggttatatgcaaatactgtgccattttatataaaggatttaagcatccgtggattttgatatttaagggggtccctgaagccattcccacagataccaagggaccgtacatggtgggatggttgaatcaattacattattcaccacctcacctacatatcacttttcctttcctctcatccacctgacctatgtggaaatatgtgagcccacttgactcaactccctcaccccctccagaattggggaagcaaaaattagaagagttggagttgacttacgggacagaggatttaggggaattgagggtgcctactcagtcttctagagagaagaatacctagaatctaaactggcaacctaagatcatcccactctttattttgaagttaagtctgtatcttttctaggcattaaaaatcagtgtctccatgcttttgaatgtgggaaggctgcatttgttccccaggctagaaaatgaatacccaaaagtcagaataacggtggtttccagtgcctttgtgagaatttctgttttatcattaacctacagatgggtatgcgttctctcaagatgaaaatggaatcgtttcacagtctgaagtgataagagcatatgataccacgaaacagaggcccgacgaatggtgatggggagagcctgaaaggcaggctctgttacctctctaaggagagctaccaggttgtcaccgcagtctgctaaccaattccagtctggtccatgaagaggaaaggtagatctgagctcatctcgctgatggacattcagattcatgtatattatagacataagcactgtgcaactgtactgtaacaccatctcttttggatttttttaaggtatttgctaagtctttgtaaacggaaattgaaaatgacctggtatcttgccagagggctttcttaaacggagaataagtcagtattcttatgccattactgtggggctgtaactgactgtcagtttattggctgtaccacaaggtaaccaaccattaaaaaactctaaatgatatttagttaaagggactcttggtatccagacttagatttcaggatatgctgaaacaaaccagcattcttaaggaactgactcaccttcctgagcaaaatttctaaacaagcatttgtgtccaaaattgtcttgataaatgtttgccaaagaggttcagtaagtgtttttctagttcagtagtcatatgcccagaaatgtaagagaaagtttacttccagttccgctgtaagatctgcatgcctgactttccaaatgtaagagtgatttacaaaaatgaatatttcaaggcatttgctactaaaatcggtgatgttgcacctttggccttacaaatgcttctttgttgtttgtcgtgtttatttgttagaggacacacgtgttaatgtgactctgttgttatgacactgatttttcaaactatgtatgtttcaggtatttctgatgaagtttcatcatcatttagatttttctaaaaatctggctaatgcagtagattgagtgatgtcattttgtcttaaagtttttcctcttaagaaacatatgctacgtatttacgtgggatttccaaagcttctgttgcaatatttggaataacatgtcagataaatgcatgggcttttgtcctgtgttccagttcccactagagatgcctgtgtcttgtgtagcacacccagtgttatggtgactgccccctatactgaagactgaaaattatttcacagttcactcatcaaatagttcccaaaattcgtcacatgctgcttattgggacaaataggtagtacattttccccatttaaaaaatgcggattttactcaggccggtaactttacagtcagaggacacgttcatcatgagtagcttttgttagtatgttttaaaatgtatcttcagttcaattattttcagcatttacaagacatctgaaaatggctattttgctaccaacagtaaatgaaggggctgtttaaaaaccacaaccagttttctacactattttttaaataatactttcatttgaaaaaaaggaattagttttcagatacacttcagagattgaagcaaactatttgccttttactcaaaagcctgcttgcctttacatggacttaccagcaaaataggtagaactttctcttttaaaaaaagtcaactagaattgagaagaggtgattttttttcagatcgcttctcgagtttaatattttcacattcttttcaccctttttctcaatctagatttaaaattaggatatatgtcatttccttgtctgtatttgtagctccttagttaccagtatgcctctccattttctacaaataagaggttataacacatatacataattctaaccttaagggaacacacgtttacatactttacttcccaagcccttcctgtttggggtacagattgagagagtcatgaatcaacacatctagcaagaccacaggtgtaagagtctaagatcgtcttcaaaattctgaagtcccagtctttacctgtccagtgaatgaatattcagagcagcttttcctgggcttcccagtggtgatagctgaggtcaaaccacaaaaaataagaaagcaagagtgaaatgcacccctccagagaaacactttgtagtgtttaattctgttaatagagaagagctgcttctgtttgcgctcacttcatcagtggcacccttctgcagaattttaatataaaaacattatggatataatagaactggattttctgacttaaaaatgtaagttttattttaatcttgaaacgtggattgtttctgtggagctcttaaacatgagaagaatacttacggttgataatgtgtaacatgatctgaaatgtgactaatttgagcctctttgtcccatcgtcctgtttttgaattattgacattgtcagtctctttgcttcctgggtgagacttggggtttgagggacagggaatgaccttcttggtgaaacttaaaatataacattgcaattgcagtgactttacagtgttaaattagagaaaatagtctgattttttaaaccttccttaactggaaaaaagtcacatggttttaccaggattgaaataaacagtcaatgtgacttttaacatgtgtttttttgaaataaagggcacgtactcttcaattaaaaagttccttatagggactctggcaaatgctaacacagttgctttacaatgtttacaattcagacaatacgacttataatagaaaatcctcattcatttagcattgaaaagctggaagttgcttctttaatgttgaatagtatacagtggtattgagcatggactttctaaatgttttatatatacatataaaaatatattggtgtctcacacccagaaagatgttatattgtagatattattaggaaaacagtgtttctcaggaacgttgtaaattttaaatgatatatgtacttcccgtcctcccacctccactctgtgctctaatgtgagactgcttcagcagtgttgctaagttaatggaaaactttttctaatcaagtcaggtgaatgtgtattctgctaaataatgttagccatttacatgaattgtatggtcattaaatggaatcagtgattcctctttaatttccagaggggaaatgaattatggaaatcagtcagcattctgatcattaaattttatactttaattttgccgttcagcattctaaatatccaatgtgaaagtcacatgataatttgttttgcattgcgtgcactgtacaacacttacaacttgtcatttaaaatgttttctcgggaaatgaatgctagtcagaaagtaatagattgtattattcatagttttaaaattatgacaatgtcataattactacaaagctaaataatcgtgtttatttttgtgcagttgccctttgatagttcctggttttaaaacctattaagtgtataatcttacaaatagtcatctacaaaatttatggagaaagtgcccagcccattcacatcacatggaccaggaattcttttgtaaatgacttaaggtaacatcatgcagttcagtgcctaataaatgctttttaatgatgaacatttctataatgactcgtaagataccatagtctgatttttctcacattaaaataactgaagtcacttgtgtaacgtagttatactttgctgcattttaattaaccttcaacagctattaaagtggaatgtaagttaaattttgaaggaaaggaaataaatgttttccatatttcgtcttgatttactttctgtatgagaacagctgtgtttttgataggtttatggtttgcatgagttcatatttaaagtgatccaggccaatgcatggctattgctgtaaatcttgatgtttatttctgccttgtaaagttctatcacggcctacctggaatttaaaattcagtagacaaattaattggtcctctgcacaacttttttaataagtagattattttacaaagaaatttgaacaaatttaattgaatcttttgtttagcttgcctctaagaacttttcttaataaagctcccaaaacttctcagcaaataaatctcccttaagtaggaaagctagatttcatatttgcttactttgaattaacagcaactttccacaggtaaatctgttcttgcaaagatgtgagcagaatagttaaaaataatatttttatgtttcatggttctaaatggaagccataaatgcagtaaatactatctgttgtttaactactttaatcgtcattttttacattttcaagtttattaggttaagaaaaacagggcagccttggaaggcagctactacagaaaactgcagttttgcgttaaagataaagtagtattttcagctccctgaaaaaccattcctgctgaaactgctgtagaaattgtgaagctgcatgagtggagagtattgaatctgtggttatagtagttttctcaggtttgtttatcttgatgtttgatgcactgtgttttatagttattaaaattgagtaatattatttctatgcagtgttatgtgtcattggccttttgtgaatgtgcatgttttaaactgcaaattttaaacattttgtcctctaattgttattaaaaatgaaataaactttaccattacttaaaa

SEQ ID NO: 572 - DNA, 13258 bp, Homo sapiens
cacttccctctgtggctctgctcagaactggcggtttttcccagctccttgcccagaccaatacttccatgctgtcttcaagccctgcttcctgcacatctcccagcccagatggggagaacccatgtaagaaggtccactgggcttctgggaggagaaggacatcatccacagactcagagtccaagtcccacccggactcctccaagatacccaggtcccggagacccagccgcctgacagtgaagtatgaccggggccagctccagcgctggctggagatggagcaatgggtggatgctcaagttcaggagctcttccaggtaggtagcacagcggatagtgggaggagatgggggcctggggtccacccagggcactgagaccttcacaggagctggagggctgatgtgaggtgcttccgtgaagagaaagcttttgtaactgatgaaagaaagaagcatcggtttgaagtccagaagtctgcctccctctaggcttgtctgtgcctctaatgctctttgtgatctggggaaggtcttttaacatccctaatctataatagggctgttagtgcctgtcatatctcctttataggactttctgaggctcaaatgagacaatagaagggaaaatgcttggtcacactatgtttcaaaattttatatctttatttactcccatgttcaatgcacatacatgtccggagctacattttcgtttcttttctttttctttgtttctttctttctttctttcttttgttttttgtttgtttgtttgtttttgagacaaagtcttgccctgttgcacaggctggaatgcagtagtgcaatctcagctcactgctctgcctgctgggttcaagccatcctcccacttcagcctcctgagtagctgggactacaggtgcgcaccaccacgcctggcaaatttttttgtatttttttttgtagagacggcttttcaccatgttgcccaggctggtcttgaactccttggctcaaacagtctgcctgcctcggcctctcaaagtgctgggattacaggtgtgcaccaccatgcccagcctagagctacattttccaattctgtagccatcagccatgtgtagctgtttgactttaaatgagttataattaaataaaattattcagttccccagtcacatgggccacatttcttttttcttttgcctttttttgagacagtcttactctgtaaaccagcctggagtgcaatgccgtgattttggctcactgcaacctccgcctcccaagttcaagcgattctcctgcctcagcctcccgagtagctgggattacaggcatgcgccactgtgcccgactaattttgtatttttagtagagacggggtttctccatgttggtcaggctggtctcgaactctcgacctcaggtgatctgcccacctcagcctcccaaagtgctgggattacaggcgtgagccaccgcacccagccaacatgggccacatctcaagtgttaaatagccccatgtggctagtgactactatgttgtcagcacaaatatagaatattttcgttatttcagaatggacagtgcgggactagaatgttaagagtaaccaaagttgagtgccaataccaggacctaagcaatctttgaccctggctctgactaacactcttcaaccccactctgggaaaaggacaggtcttggtccctggttactggaaacggcactttcttacttatatacctttaaacctggattctagagaggtaagaactgctgttccagcaataagaataacattctgaacacaactacgtgctaggctcaatgccaggcactgacatgcattctttcatttaatccttcccacaactccattaagcaagtactgtttttctttttttatagagatgagatcttgctatgttgcctaggttggtcttgaactcctgggctcgaacgatcctccaatcttggcttctcaaaatgctgggattacaggtgtgagccaccatgcctggccagcaggtactgctttacagctgagggaatggaggtttacagatgttgagtaacttgcccaaggtcacacaactaggaaaccttgggaccaggtgtggagcctggccacttatttgagcagccaatggttctccacacttgaaatacttaagaaaaaaaacagatgccctggctcctcctcaactgaatttaaatctactacagtggagtccagatactgggcattttttaaaagccccacagttggttctaatgtgtggctgggctgagaaccatacgccaagctagtcaggagttcaaaatatgttgtccttgtttctctttcttgttgactcagatcctatctttttggagcagcagggccctataattcctgtgggtaagggttatcagcagtcctagggttgcaggtggtgaagaatgattgttgtgacccagtctatctcgaaactaactgggtcatgtgtcagtttggtcaaggtattgaccaaagatgcagcatcccaagcatctacctcccaagcccactcactgagggtagggagaccccttggagctgggaggcaaactatcttggcctgtatctgctctgacctcgcaggacatatccactgctcttccctaattccagcactctccactggatcagtttcaatttcagattgtttattgtgcacttgcatacagtctcaaatttctgacattccggggcaaatccttccagacatcaaagaaagaaccttgttttgcaagatgaaagtggagggctggaggctgtacagtaataagcctgtaacacagaaagcaagacatgtggaaggagcgttcccaggcaatgactggaataaaatgcctggcctgtgattgccatggtaattgtccaaaggtgccaggtggcagtttctctcccaatccctgctcttttcagcaggaagcagttaagtggctggggaagccccaggttgttggtcatcttgggcagaggtcaagacagcacagtctccagccttactctgctccattccagtttacggagagcccctgcccacccaccagggctctaccccagatacccaccttagacagcagcagtgggaaagcatctaaggatacaacactctacttgtttaatatcttgggaccaaccttcgtttgttggagggacctacctcttctccctggatgtgcagcctggtgtggggtcttcagaggaaccaagtctggggacgcagacttggggtcctagagctcctgttgtccggaggtagagcatgatttgccttctaagcagggacttaaacacacatgagtttcttctattttatggagacccttgcccaacatgcaccccttttgttaccatcccctctatttctttctttctttcttttttttttttttgagacagagtttcactcttgttgcccaggctggagtacaatggcatgaccttggctcactgcaacctccgcctcccaggttcaagtgattctcctgcctcagcttttcaagtagctgggattacaggcgccgaccaccacacctggctaattttttgtatttttagtagagatgaggtttcaccatgttggccagtctggtctcaaactactgacttcaggtgacccacccgcctcagcctcccaaagtgctgggattacaggaatgagccaccgcgcctggcctggtatcccccatttcttgtcactttagagccaaactccttaaaggacttgtccacactcacagccttatttactttttccctgcctgtcatcactcaatccactggaatccggcttctgtttccaccactcttttgagagctctggccaaggtcaccagtcactgccttgggggtaaatctaatcttcacattagcaagggacactgttgaccatcccagagttttgaaacattcctttcctgtagcttcctttttgatatagtgacattttaattctattaattagaatttaataattctattaaacttttgacttaaaaaaagtattgtcagctgggcacagtggctcatgtctatgatcccagcactttgggaggctgagaggggcaaattgcctgagtccaagagttcgagattagcataggtaatatggtgaaaccctgtccaaaaaaatacaaaaaattagcagggtgtggtggtgcgtgcctgtggttccaaccacttgggaggctgaggagggaggattgcttgagcctgggaggtcaaggctgcagtaagccatgatcgtgccactgcactccagcctgggtgacaaagcaagaccctatctcaaaaaaaaaaaaacagtattgtcaatgaatgtgtgaaacaaacatttgtgtttaacttgattgcctctataaaaaaaggaaaaaaaattgttggttcatctgagccttatttaattgctggtctccctagtggagaggtcaggagtaaggaccctgggtatggaaaggaagtaagaaagggagtcaaatcaggcagcagcttccaggaaactaccctacatgacatagagtcacaagtctcacacttgttcatctcagtaggggttgttttatatacctgcttatgttctgagagttcaaaaattatttgagggcaagagtatttggactgtgatatgagcccatattctcaacaccaggttgccgtagtagtcctttttttttttttttttaatggagatggagtcttgctatgttgttcaggcttgtctttaactcctgggctcaagcaatcttcccaccttggcctcccaaagtgctgggaggggtaagccactgcaccccagtggcagtcttgtactcagtaatacacataccttatattcaatatatagtcatgccctgcttaaccacagggatacattctgtgaaatgctacattgttaagcaatttcatcattgtgcaaacatcatagagtgtatgtacacagacctagatggtatagcctaccacacatgtaggctatatggtgtagctattattcctaggctacaaacctgtacagcagtttactgtactgaatactgtgggcagctgtaatgtaatgctaagtatttatatatctgaacatagaaaaggtatagtaaaaatatggtagaaaagattttaaatggcacaactatataggtcacttactatgaatggagcttgcaggactggaagttgttctgggtgagttggtgagtgaatgtgagggcctaggacattactgtagatttcataaacactgtacacataggctgcactaaattctttttttcctgctgggtacagtggctcataactgtaatcccagcacttgagaggccgaggcaggaggattgcttgagcccaggagctcaggaccagcctgggcaacatagtgggaccccactcaacaaaaaaatttttaaaaattagccaggggccaggtgcagtggctcatgcttgtaatcccagcactttgagaggctgaagtggacggatcacctgaggtcaggagttagagaccagcctggccaacatggtgaaatcccgtctctactaaaaatacaaaattagccaggcatggtggtggccacctgtaatcccagctgcttgggaggctaaggcaggagaatcgcttgaacccaggagacagaggttgcagtaagccaagattgcaccattgcactccagcctgggcgacaagagcgaaattgtaaaaaaaaaaaaaaaaaaaaattagccggatgtggtggtgtgcacctgtagtcccagctacttgagaggctgaggtaggaggattgcttgagcccgggaggttgaggctgcagtgagccatgattgtgcagcctgggtgacagaatgagaccctactcaaaaacaaaaacaaaaactccacaaaacaacaacaacaacaaaatgtcattttaagttttaaaaaactggtcttgaggccaggcatggtggctcacgcctgtaatcccagcactttgggaggccaaggcgggtggatcacctgaggttgggagtttgagaccagcctcaccaacatggcaaaaccccgtctctcctaaaaaaatgcaaaaattagcaggacgtggtaggcacccgtaatcccagcatctcgggaggctgaggcaggagaatcacttgaacccgggaggcagagtttgcagtgagctgagatcatgccattgcactccagcctgggcaacaagagcgaaactccatctcaaaaaaaaaaaagaatctggtcttgaactcctgacctcaagcgatcctcctgccttggcctttcaaagtgttgggattataggcatgaaccaccataaccagctgctacactaaatttataaaaatatttttttctttcttttttttttttagaggcaaggtctcactatgtttcccaggctggacttgaacttttgggctcaagcaatctgcctgccttgacctcccaaagtactgggattataggaatgagccactgtgcccagcctataacattttttttctttcttcagtaataagctaacttcagattactgtaacttttttacattataaacttaaaatgttttttaaaaaatagagatggggtctgccatgttgcccaggctggtctcgaactcctgaacttaagcaatcctcccacctcagcctcccaaagtgctgggattacaggcataagccactgcacctgaccaagactgatacttttttaaaggcaaagttctaatcattagagtgtgttttgtttgtttgtttgtttttgagacacagtctcactttatcgcccacgctggagtacagtggtacgatctcgcctcaccgcagcctccgcctcccaggtttgactgattctcctgcctcagcctccccagtagctggggttacaggcatgcaccaccacacccggctaatttttgtatttttagtagagatggggtttcgccatggtggccagtctggtctcaaacccctgacctcaggtgatccgcctgcctcagcctcccagagtgctgggattacaggcatgagccaccacgcctggcctagagtttatctttattataatgcccactcacaccctctgagattccagttacagatgttagaccacttgatatccataggtcatcgaagttcttttctattctgtcctcccccactaccctgcccacccaggtttttttttaatctgtgcttcattttggctcatttcatttgctatatcttcaactgaccttttttttttccccacagtgttaaacatgctgttaattctatctagtaaggtttacatttaaaatatgcaatttttcttctctaggtgctccatttggttttgtttgtttgtttgttttgagacagactctcactctgtcacccaggcaggagtgcaaatggtatgatctcagctcactgcaacctctgcctccttggttcaagcaattctcctgccttagcctcctgagtagctgggattacaggcatgcgcaccatgtctggctaatttttgtatttttagtagagatggggtttcaccatgttagccaggctgatctcgaacccctgacctgaggtgatccccacctcggcctccgaagtgctaggattacaggcgtgagccacggcacccggcctggttctttttttttcttcttattttttttttaatggagaagagttcttgctatgttgctcaggctggtctcaaactcctggcctcaagcactctcctgtcttaacccccaccaaagtgccgagattaaggcatgagccactgtgcctggctggttcttttatttctttctttatttatatttttattttattttgagacagagtcttgctctgtcaccctggctggagggcagtggcatgatcttggctcactgcaacctccacctcccgggttcaagccattctgctgcctcagcctcccgagtaactgggattacaggtgtacgtcagaacacctcgctaaatttttgtatttttagtagagacggggttcaccattttggccaggctggtctcaaactctcaaactcctgacctcaagtgagccgcccatctcagcctcccaaagtgctgggattataggcgtgagccactgtacctggcctgattctttcttttatcttctgtatctctcattactgtgtttatgttttccttgtctgctaattctatcatttatgtcttttctggctctgctttttaagttttttaatctaggccaggctcggtggctcacgcctgtaatcccaacactttgggaggctgaggtgggtggatcacctgaggtcaggaggtagagaccagcctggtcaacatggtaaaaccccatctctactaaaaatacaaaaactagccaggcatggtggcaagcacctataatctcagctacttgggaggctgaggcaggagaattgcttcaccctgggaggcagaggttgcagtaagccgagatcgcaccactgcactccagcctgggtgacagagcgagaccctgtcagcaaaaaaaaagggctgggcacagtggctcatgcctgtaatcccagcactttgggaggccgaggcgggcagatcacctgaggtcaggagttcgagaccagcctgaccaacatggagaaaccccatctctactaaaaatacaaaattagccaggcgtggtggcgcatgcctataatcccagctactcgggaggctgaggcaggagaatcgcttgaacccgggaggcagaggttgcggtgagccgagatcatgccattgcactccagcctgggcaacaagagcaaacctccatctcaaaaaaaaaaaaaaaatagcaatatacactggaaaataccattagactcaactatataaacacatacatgtatttccccaacagcacccctccagcacaatagctatttccatcatatgtggaatctagggttaatctgaattcaataagttaaaaagaaagagttcttaaatcagtaagaaaaaaactgaaaatctcaacagaaaaatggataacatatcagttcttgaagtgtggtctagtgacccatggaggttcctaagaactctttcggagattcccaagaactctttcggaggttctgtgattattttcataataacggtaatttttttttttttttttgagaaagagagtcttgctttgtcgcccaggctggagtgcagtggcgtgatattggctcacttcccgagttcaagccattctcctgcctcagcctcccaaatagctgggattacaggcacacggcaccatacctggctaatttttgtatttttagtagagatggaggtttcaccaagttggccaggctggtctcgaactcctgacctcaagtgatccatctgcctcagcctcgcgcctggccaatgctaagattttgtttgcctttttcagtacgttgacatttgtgctgataatgcaaaagcaacagtggcccttcacatgaatcaagaaagtggcactaaactgtactagtagtcgtgttcttcactactacatcgttttcacttaagaaagtcctcttcatctgtaaaatgggtaaatgaaaagataacagaaagaatgtccttgttgaagcagtaaaatattaattttattaattatatttgagctcacgtccttttttaatagacctattttttagagcagttttaggttcacagacaaattgagcataaggtaaaagatatttcccatatctccctgccgccacatatgtatagcttcccccactatcccccacccagcagcaaggttatatattatttgttacaatcaatgaatttacactgacaacattatcaaccaaagtccatggtttaaattgggcttcactgttggtgttgtacattctatggttttggacaaatgtgcatgacatgtatccaccgttatagtgtcatacagaagagtttcactgtcctgagaatcccctgtggtctacttgtccctcctccctcttacccctgtggcaatcactgatctttttactatcgccatactttttccagcaggtcttactgttgggatcatagagtatttaagttggcttcttcttttttttgagacagggtctctacttttctgcccaggctagactccttgggactatacaggtgcatgctactgtgactggcttcaaactggcttatttaactgtcatatgcattttaggttcctcgatgactcttcctggcttgatagctcattcatttttgcactgaataatattccattctctggacataccagtttgtttatccattcacctactgaagactatcttagttgcttccatgttttggcaattatgaataaagctgctatagatcatccgtgtgcatgtgtggttttttttttttttttttttttttgagatggagtctcgctctgtcgcccaggctggagtgcagtggcgccatcttggctcactgcaagctctgcctcccgggttcacaccattctcctgcctcagcctcccgagtagctgggacacaggcacccaccaccacgcccagctaattttttgtatttttagtagagacggggtttcactgtgttagccaggatggtctcaatctcctgacctcgtgatcagcccgcctcagcctcccaaagtgctgggattacaggcgtgtgccaccgcacccagccatctgtgtgcaggtttttgtgtgaatgtgttttcatctcatttgggtaaataccaagggagtgcaattaatggactgcatggtaagagtgtgtttagggctgggcatggtgcttacgcctgtaatcccagtgctttgggaggcagaggtgggaggatcacttgagaccaggagtttgagaccagcctggacaacatattgagacttgtctctacaaaaaataaaaaattagctgggtgtggtggtgtgcacctgtggtcccagctacttgggaggctgaggtgggaggatcccttgagcctgggaggtcaagactgcagtgagccttgatcatgccactgcactccagcctgggtgacagagcaatacttttgtctcaaaaaaaaaaaaaaaaaaagtttagttttgtaagaaaccaccaaactatcttccaaagtagccataccattttgcattcccactagcaatgaatgacatgaatgaatgaatgttttaatttgcaattccctaatgacatatgatgttgagcatctttttatacactcacttttcatctatatatcttatttagtggggtgtctgttcatatctgttgtccatttttcaattgtgttgttcatcttcttcttgtaatttaatttttttttttttttttttgacagagtcttgctctgtcacccaggctggagtgcagtggtgtgatccattctctgcaacttctgcctcccgggttcaatcgattctcctgcctcagctcctggagtagctgggattacgggtatgcgcaaccacacccagctaatttttgtatattcagtagagacggggttttaccacgttggccaggctggtctagaactcctgacctcaaatgatacacccgccttggcctcccaaagtgctgagattacaggcatgagccaccgtggccagcttttgttttaagacagagactcgcccagacgggctggagtgcagtggcacgatctccgctcactgcaacctccaccttctggttgaagccattctcctgcctcagcctcctgaatagctgggattacaggcatgtgccaccaggcccagctactttttgcatttttagtagagacaggatttcaccatgttggccaggctggtctcgaactcgtgacctcaaataatccacccacctcagcctcccaaagtgctgggattacaggagtgagccactgtgcctggtcaataattctttgtattttttgggtaacagtcccttaacagatgtctttttttattatttttattttttttgcgacgaagtctccctctgtcacccaggatggagtacagtggcacaatctcggctcactgcaacctctgcctcccaggttctgggttcaagtgattctcctgcctcagcctcccaagtagctgggattacaggcgtccaccaccatgcccggcttatttttgtatttttagtagagacaggatttcaccatgttggccaggctggtcttaaactcctgacctcaggtgatctgcctgcctcggcctcccgaagtgctgggattacaggcatgagccactgcacccagccaaaatatagtatatgtttagtaaattactgttgaatggaaaactgaatgggtgttctgagtgaggagaaagtctaaccatgggaaattggagagaggtgggttgagtccctgacagtaaccttcattccagcaccagctggtcaggcccctctgagacccatgtgatttccaaataggatcaagcaaccccttctgagcctgagattgacctggaagctctcatggatctatccacagaggagcagaagactcagctggaggtaggatgggggctagaagctggccttgggtcagtgggaacccagaaacccaggttctgcctcctttggtggagtgcagagaaccaatccagaggggagaattcttgggagattggtggggacttgcgggaaagtgctgtgacttggggccctgtctgtgttctctcctatctaggccattcttgggaactgcccccgccccacagaggtaagggatgttcttctgctggtctggggtaagaggaggcccaatgggggaggtagctaatgaggagtatttgaagggaaggcttggctgtgggtccttctcccttctctggggagtcaggggcaggggaagattagggagggcagggtggggggtgaattgtgaccccaagcctggtctcactcctgtttctccctcaggcttttatctctgagctgctcagtcaactcaagaaactccggagactcagccggcctcagaaataagcctgagagaccatctttagcagcctcagcactgccaggcctgccctgaaactccagatcctggctaagagggaaatagctccttgggacacaaacaagaaatgtggacaaggagggacatttgcatactcctactgtctgtgtggtcacagctagtttctgtcagctgggctctctgggagaaagctggctgttgtccaatgccttccttggcagccaagtggataaaacctttaggagcccc

SEQ ID NO: 573 - DNA, 295557 bp, Homo sapiens
cgcgagcccgccgggggtctcaggctctgggcgtcctcggcgagcgagcccgggcagagggaggcgcacgagcgcgcgcgacagaaggaggcggggaaaggagggggcgaggcggaggcgagcgaacagagggagggacccgcccgccgcgccccggccgctgggcatgtgtgtccgcaggcgcccgacgctgccgatgtcccggggctgagccgcgcccaggtgtcccggacagtgcgtgcgagcgtgtgtgtccgcgcaggcgagcaccgcgccggccctgagcctcccgctcgctccccacggccgcggtgcatgttcgcctcctgccactgtgtgccgagaggcaggaggaccatgaaaatgatccactttcggagctccagcgtcaaatcgctcagccaggagatgagatgcaccatccggctgctggacgactcggagatctcctgccacatccaggtgcgcgtggaaccgggcgagggcgcggggcacacgccgggagcagggcggggggcctttgcggtgggcatgcgagaacaaggaacccactcccggaggggattgggggactgctagaaagccagatttcgattcctcaggcctctgagggtggggggccttatcctggcatggaggggcatggtgccctgcaagcgccaggcacgcgttatccgcgcccagtctccttcccctcgcgtgcaccctgcgcgcgcgtctcactgcgcccgggctaggggcgcggggcagctgcctccggagggactctggcccctctgggccctactccgccaggagatgggagctccgagggctgagaggggcacctgcatgtcgcccactggtatttcctcccttcttccacgtggagaaggcatgcatcagctgggttcactcatttctgtctcccgcgcccaggctccggagacgccctcagtcccggaacctgctttccgctccgtgtcggtccccctcaccctccgccggtggtctttagttctccgcgtggggcggtggcgaagtttccccagagtgagagaggccgggctgccctgggcgccagccttgagggatggagcgcgcgctgcgccggactggagctacctcgaaaggaatgtgtgaagtctgagtgtttcggagaaaggaaaagggattgtgaggccagcaagtggggagccctgcaggaacctgggtcctgggtaaaagagccccgtggaatcttggtggacattcactgtcgcccaagttggaggagaaggcgagttgtttgggagaaggcagctttgctggcagccctgtcctcgggtagtaagtgcctctgggctgtcaggagagctagtgtgaggtgcaaaggtgtgtgtgtgcatgtggttgcgcgtgcgtgtgcatatttgctgtgggtgaatatgtaggcaggtgggagcccctcttccaggaccccaaagatgccccactcggtgcgcacacaatcaggaaaggttgtgtcagggctcagcacaattaacttctgacttctaaatctatttaactgtttatctctgggatttcctttctcacctaccctagtcgagtcttgaggctctgggactgagctttttttttttttttttttttttagtgtaatacagggcacaccacccatgtcagtgggaggtgagtggggcagcatctcccagagtaggaatcagcctctaggctgtgcaaaccatgaaggaatgaaaggactttccctgttttatttttatttaatttttgttagtgggagtgtgtgacatgttgggggcagttgcaattaatttgtaacctgacagccggacaagtgtcaaggtaggaatgtgatgccccatgatctcccaggaaagtaggctcccattgaattttctgggggagcttgaatttcattctgagctaagcagcactgctaaacttaataataaaaggattagcaggataggcagtgtttctactgccacaagggttgcacagaagcatctggcatgtactaatagtcttgtgatccagagagtgtggactgtgcactttgctttaagtcctaaagtgggtgtacaggtcctttaacccataatgaatgtgtagatgatggaggggccgtcagggagagaggctgttgagttctcctctgtctctcagccctcttctgccctgtaccacttggtgttgacatttttttcccctccctcaggatgaagtcttccttagaataataaatattccccaaaggacatgtatttgttgtcttgtgttttgagaaacaataaattgtagccagtctaacaacagtttgaaaaactccagtgcttatgacccaactagtgccaaagaggttaaaatgttatgtttcaaaatgttggcttgggcactgatttttaaaaaattatgatgtttcattttgtgatttgtctttttctgccctttctgcccccaaattacaattattatttaaccaattaaaataaattaaaatattttatttggataactttagacctcacactttcctagagtactccagaccaggaattgaaattgcccttccgggtatcaggtaacaaagacttcccatttgcttagagtgagaacaaaaggattaaaaaacaatgcgaaacaaaaccatttggaattactggcacttgttctgggtgaatccatctgtgtttgcttccttccttctatagaactacaaagttaaaggattgtatatattgtcacagaatgtcaccctctctccatagcccacatctgcctgtctgcgttaggagctctcatccctggtgtctgcctggctctggagcaggggtgtccaattttctggcttccctgggccacattggaagaagaagaattgtcttgggccacacataaaatacactaacgctaacgatagctgatgagctaaaaaaaaaaaaatcacaaaaagtctcataatgttttaagaaagtttatgaatttctgttgggctgcatccaaagctgtcctgggccatgggttggatgagcttgatctagaggctctgtaggaggagcaggagctcttggacatgtgttagttgttcactcctgttcactacaggagtgctgcctatggagccccaaaataagtaggggaaactcaagccacacatccttgggagctcattagtctgtgttctctagtaggtaagcattccagattcaaagaaaaatgagccactcaaacaggtttctctagcaaggtgctggagagtggccacacatggtagatgcaagagatgatagaaaccttcaggactattgcttgagacaatgtgaatagctctaggtgccatttcttgagcatctctcatgagccagccttttccactcattatgtctgatctctaccaccaacctttgagtaggtattattcccttcttttgggtaagaaaactgagaagctaataacttaagtgacttgttcaaggccacatctctaaaaagagaatgagcagctggaattcaaatccagaattgtctggatccaaagcttatgtatgtctttgacatattaccccatagttaaaatagctgaagtttcaatgaaatttccagacatggaaagaggtaaatccaaggtaggggaatttaaaccagtgactgaaggccagttgggattcatgatctgaatggacaaagcgaccctatttgccagtttgcaaacttaatgtgtcctgggtcttccagggaggctggcatctcagagctgattggaatcccacaatccaaatgtcactgggggccatttccaccccccagaaacatggtatttgcctttaaagaaactatatgcataaatgccttgttaggtttgatacactgtgtccttatatttcagacagtagtagccccaaattatgcctatgcatcaaaagatgaaccaagccagaaactaagggagaattgcctagttgtgctctgattagagggtgtgatggtgaaagggcatgtgttttgtgcctcttcagtgtgcctcccacaaggggagaaggcagagtattctccttgttacctccccaccccctaggatctttgcatttgccactgcatagaggataggaaagagcttttgcaaaataacagcttttaaataatccttttccaaatcatataattttggtagtatttggccaacgaaaactttcaaacacacaacctagtggtccagtctcagcagactggtggtcagttccaataagagatgtggaagtcactggctctgtctcttttcacagggtctgggatgctgtcccatcatatcatttgcttgtgaatgttcaggtaggatggaagatagaggaattccaaatagacagggagtaaaggggagtttgggttacaagacagaggcctggggaagggaaggagttactgaatgctccttattgggcttttccaattgagccaacccctgaagtctggattttgtaggaggatgaggtttgactctaattcttcattcagccttgctacttcaattagagtggagtcctagccatcttctatctacttttttttctttagacaccggcattgttattcacaacccttgctaatgaacttgccatttttaatactgacttttttgggttacatagatttttgacattattcatactttggcaaagcctggtaaacatggctgacatagttggaattggctgaaaatttgtatttgtatttgactaaaaatcttagcatagtgctttgcatacagtaggaacacaataaatatcgatgtagattgaataattttctttctagactgttaaattcacaagagtaggaacattctgatgttcaccgcagagtccctgatatttagaatagtgcctactattctatatagtataatatgtgcacattaaacatcagttgaatggatgagtgctaaccttcccaatatttagtctaactcattacctgtcaacatgaaggtagcatgccagcattagatcgggaatcagatgtgtggtttagttatgttaccaaccagctgtgtgatcttgagtgagtcatttgacatttggagtcaattttcttttcttttgtaaaacaaaagaatttggttagatggatgctacagtttaaaaagtctgtggttttattattgactggataaattacatgtgaatgaagcatttctgttgacaaagtggtagtgtacgtattatctcatatgaattttataactatccattatctccattttatggatgttattgtgttactgagtattatctcaatattgtattactagatatggaaaatgagattcaaagaggttagcaatttgggtaaccaagcaaataagtggatcagaacccaggtcctttgactcaaaatccagagctctttcatctctggagcactgcctcttgggactgaatgattaggctgcttttggctgcaagtaaaagagtagacaagttaaagtggcctaaataataaggacacttattatcttagctggcaaaaagtccagagagagggcaacttcagggctgttccaaagctctgcctggactcagttgctgcttcccatcttttcactctggcatcttcagtgcattaactatgtctctatagtctccatgattatgaggtggctgcagtaattttagatgtcagtcagtcactaccacatccactgtccaagaagaggtatttcctcatgcattgcctttttatcacagaggaacactttcccagagtccccatcagttttcccatcagattccattggcctggattggatcatatgcccatgccctagctgtaaaagtgtctaggaatatatgcatctggcatttttcctctctataatgggaggtggctttgccattatggaaggaatggaattatgtgtgtgtgtgtgtgtgcatgcacatgtgtgtggtggggaggaacagctgtcggctaatcatgcaggagcgtctttcagaatacgtcaaattaggttgcaattattgttacaataaacctttcatgagagtttagtaagatgtcatctcagccctggctttttttaggcaatctttgtatgatcaaattctagaacaaggaaaattatgagagagtcctttgtagtgtgtgttgttaaatatcatttctgcccttatggaatgggtgggttctgggcagctaaaaggcatcttgttcagagcaggcacagctctctatagcagacaaactttatgcttgttcaagtggcacagtggcatgaagtggttgagagcatatgttctggagcactgcttgcttgggtttgaaccctggctctgccattgactagccaggtgactttggggaagtcacttttcctcattgggcctcagtttcctcagctataaagtggaaataataataacatagccctcatggactttttgtaaggattaaataaggattatatgtcaagtgcttagcttagtacctggcacatagtgagagctgaaaaaatagtgactgttatcttaatgttttgtgaaactatattagaggtaatcctaaatagtgggaaggctttgacttagaatcaaatgactttaagcctaaactccatcactttctgatggtgcaagaccttaagccagtcactgggcctcctgttcttcaactgaaaaatgagagtaataattcctcaactgccagtctccactgtgttgttgagatggcttatgtaaaagcatgttgtaaatgttcaaatatcacccaaatacagagtactattctaatcaatttagttgaagaaaaggttagcttcttatctgttgaaatgggaatgatattatcatgtgcaaacctatatctgtgctaaatatcaggccccatgatgatcctgctggtgaaatccaagctaggtccagctggcagccacagttttctgctagtaaggacaattcaacacttttctctaccaagctcttctggaatgccattcagagtctactgaaaatcagacacaaaaggaatagaggagagaggcagtttgttaaatactgtggcacagctctgacgtttttagacctatattatatgggccagctctttatattaagtatatcctaaaaaaatgtaatgttattccaatggtctgctaagatcttatctcttgatattttcaaagcaaaggcaaagtgtattgacttcagggagaatacaataatattagctgcacattgacggtgtatcagctagaattcttttaactacatgcaacaaattctaattcaaactggctttaacattaaggacatttactgactcatatattcagaagtcttgaattatatatttaattcaaggactgtggctctgtttctctggggttcctttgcctcttcttgccatttgggatggctctatcctcagactggtagtgaaatagttatagtagtgccagttctcacattttcataggataccctccagaggaagagagaagccacttccaattcagcatcccaaacagaagtgtgcagtcattctgatgggacctcccaggtcacatgcttacccctgaagcagtgaccctgaccaggggaagataatgtgctgattagcttaaggtgcagagcttgaccctgggactcagggtgggatcaacttcccctgtggtgatgttctgcctggggaagagcaaatacctaaaatcagataggaggaagggggaaatggctcctaaaaagataacccacaatacctactgtagatgctttgtctagggtaggtggttctcaaagtgttgtctggggaatcctggaagtccctgtgatcatttcatggagtccatgctattaaaaaaaaactattttcaaaataatactaagatattgtttgcctttttggataacagttttattgagatgtagttcacattccttgtagtacgcccacttaaggtatacaatttttaatatattcagagagtagtgcagtcatcaccacaattaattttagaatattttcatcatccccaaaatgaacctttgccctttagcagtcatacctccatttccctccagacctcccagtcctaggcaaccactaatctacttcctgtctgtatagatttgtctattctggacatttgataaaaatggaatcataaaatatgtgaacttttgtgtctggcttctttcacttagcacaatgttttcaaggtttatccatattgtagcatgggtcagtacctccttcctttttcttgttgaatagtagtccagtccattgcatagatatatcacattttgttgatccattcattagttgaacatttgggttgatggacattttggctattatgaataatgttgctatgaacattcctgaaaaagttgctctctagacatgtttcatttctcttgggtgtatacctagaagtgaaattactagtcatatggtaactctgtgtttaatcttttgaataactgtcaaacagtttttcaaagtggctgcaccattttacattcccaccagcagtgtagcagggtttcaatttcttcacatcctctccaatacttgttattatctatctgtttgattataaccatcctaagtgggtgtggagtgggatctcattgtggttttgatttgcatttctctggtggctaaagttgagcatcttttcatgtgtctattagccatttgtatatcttcttcagacagctgcccatttagatcctttgcccattttaaaattgggttgtcttttattattaagttgtaagagttcttcatatattctggacacaaaccctttatataataagtgatttgcaaatattttttcccattctgtgggatatcttttactttcttgatggggtcaaaaaagcttttaattttgataaagtccaatttatatataatttttgttgcttgtatttgtgatgtcatagctaagaactattgcccaattcaaggtaataaggacttatgcctatgttttcattaaacagttttatagttttagctcttacatttaggactttgatccatttttaaaattgatacatagtttgcataccataaaattcatcattttaaagtgcacaattcagctgattttcatatattcataagactttgcaactacaatcactccctaattccagaacattttcatcaccccagaataaatctgtatctattaacagctactcccatatttgatccattttgtgtcaatttttgtgtatggtgtgaggtaggggtctaactttatccttttgcatgtggatatccagttgtcccagcaccatttgttgaaaaaagcaactcttttccctgttgaattgtcttgtcactctgatgaggtgttgtttaccttttccactttcagtctttcagaagtgtacagtggaattttctagaggctacaagatgtgtgatattgcaacagattgaatgaagaagcatatgtgagaatacacctctttgttgagtcagacattaaagatatttgcaaaacaatgctgcttttatcactactttattttgtacaatatagctatttttaaacaaaaatatgttttttacattaatgtacagtgggtttattgttatttttaaatgaatcaataatcgaatattttaaataattctgtctatatataatataaacaaaggttttacagatactcagtaggtaaaggagttttgaggccaacatgctgaagaattgctgggtgcagtggctcatgcctgtaatcccagcactttgggaggccgaagtgagcagattgcatgagcccaggagcttgagaccagcctgggcaacatggtgaaaccctgtgtttacaaaaaaatacaaaaattagctgggcttggtgcgtgcctgtagtcccagctacttgggaggctgaggtgggaggattgcttaagctagggagatggaggctgcagtgagctgtgactgtgccactgcactccagcctgggtgacagtgaggccctgtctcaaaaaaaaaaattgctggtttaggtgactgtccatttactgaacttcctgaaaaattaaaaaaaacaaacccaaacctaaataaaacaaaatagaacttatatgcttcttctttgcctccaagatcataagttacaagtgccccaagtgatgtcaattaaataaaaaacactgcatgttcacagaaaatatgtatgttatatttggaattcttagtagtaactatgcacgtgtgtgtgtgtgtgtgtgtgtgtctgcgtttatattcaaaatattaagagtagaaggacaaggctaggctctagtgtaataagcattttctaatttcacttgctctctaactgaatcctaactttttaaactctaataattgcataaagctgtgtcttgttttgagacccttcttttgatcatggaaaatatacagctaaacatgaagtgtttaaactgtaaaccatttgaatcaggcccattagtcacttgaattattaagttgttacttctttttctgagtaggcattttgggaaaacagaaaaatgttgcaggaatggaaatatcagaatttatcgcataagaatctgagattcacatggcataagtgttatgcattgggaggataacatggccctcttttagttctcactctgtgatggagaatttcaagttgctcttctcatgaagtagcagagagccagatgcggagtccagaggcaggaaaaataataggactagggtcaggagccagttgggcagattttgcagctgaggtttgaacttgactcaggctcagaagagttaagttcagcattgagccctgggagaagtgtgtaagtgcttctcggttggatgtttctgtggattttctgtgctcttgttcaaatgcagactcggattcaggaagtcttgggaagggccctgaaatttgacattcttagcacgcttccaggtggtgcttgtgtggctggtctgtggaccacatctggaatagtcagacatcagtggaatttacctttctcctaataatattgttaagttcctcgagtggaggagtctgttccttttgttcctccctcgattgtgcctcactgggcgcatttctttgagtagatgttcaatgagtgtgggtaagtgagtgaataaataaagaaatccatcctggtgtgtctatcacaggtataatgaagtgctgattagacactgttgctgggtatggaatgattctgtttgactatttgttccaaccaaatcgagagattgttttttcaaacaggatttcccatggcaaatctgatgaagtgttgcatgtccatgagagcacacaggactaggcttagtgactgccttctcgtccctctgggccaggcttcccagtcttgctttcctgtaccctggactcctggtggtatttctgaaaagctctggcaatatctcggcacaaacaagtcattgtgtataagccagcagtgcctggaagcccctggaggcataggggccccagctgttcttacttgcagaagtgactctgagggacaatgaccctggagggccatgcaaaatgcattccagttgtaacttaagctctggagctgagctgtttgctttgttgattctccccgaaggtgcaggatggaaaggaggggaccactttagcaaaaagaaaaaaaaaaaaaaagaagcttattctaaaaaggaagagcatttgttttgatcaagaagttaggttttcaaaagtaaattaaagtttgtttgaaacatcatcaatcttattcaataaacatttgttaaatatctcctatattcctagcacagagctggaagtagagatacaaaagaaaataaaatcagccgtcatcaaggagctcgcagtcagttgggggaagatagaaaagatagtgatgcgaggatgaaatgatggatgtagagacaggtaaatgcaggtggaggactaagaggaggcaccaagtgcaggctggggcatcagtaagtatctctgttacagatgaatcttgattaataattaaaggacaagtggaagtaaactctttcagaaggagaaaaagggcattacaagtaaagtgatctcttgcttgcttggtgtaaaaccctaggcatgaaacaggatgactgaatctgggagttaaggaaaggagaatctgggatgagttccacatggttagtttcaatgactgggtaatggcgatgccattccaggagagacagtcctggtcacataacttgtgtggtcctgtgcaaaatgaaaatgcagagctccttgttaaaaaattattaagaatttcaaagtgatgatagcagaccattacgccaagtacagggtccttttaggcacgggtccctaagcaaatgtgcaagtcacacacctgtgaagctgacactgaggagatagactagaggagaagcaggttgggggaacagagaatgagttccattttgggtacgttgattttgaagtgcctgtagggcgtctgagtggagaattctcaatagacagttggatataaggaatgaaagttaccagagacacaggtctgacatagagacagaagtaagggagttgttaatgttcttgcaagtggtggcagaaaccatgtggtatgaataaaacttccatgacaggtcttccttttttgtctgtatttctggttggggcaggcttgtagatcactgaattgtgagctctggaattctttccaatagtacttgatcgtttttcctttgttaggcaactctcacctgaaccagagctggtctctattttcttctacaaatggggcagccacaccagggttgtcagtggaaaagcacttttctgtccttaatcttcatgtcctagcttggacttgcaaatgaaaaagacctctttcagttttcaagttctgagtgtcaaagcatacgattttctttctagggaagttgccctttgagacagtgtcaggagcattaagtagataatacattttaaaatcctatcaacatgctacaaaattaaacatgttatatgaggagcagctttgcaagttatgctgcaataatttatctttatttagtatttatttatatctcagatacctcttgtggcaaattttgttttgtatatagttttcagggggttattgtgaaaattaaaataattcaagttctacaaaattgctcaaacaacaataatctaatattaataatgcaatgacctgaatcttaaatgtacaatagagttttatctgaatatatctatgttttatgctaacgtttgaaatatgattattctgtagcaggggaaagcaattaacgtgttaacagatcagggtatggcttataatctctcacctcagaagtataatttgttgctttaaaactctagtccgtgatgctaaacgttaatctggaaagtcaagattaaccaaaccaaggtctttacacgtaaactgagaattcaaacacaatattatttactaatgaatataatgataaaaatcaagcagtctttaaaaaatcagtaactaattagccttattaatagaagagaggacaaacacctaattaactagttggctaataattcttccttgatgtttctagctaatgttattttttggccggtcgatacacatattactgtccattgttctgaaaataataatgctagtctttgtcatctgtaccttgtgtaggtattgtctacaatgttatgataagtggagtatttattggttctttgtttagcagcaagctttctatatacttatagtcctcttgatatcctcgagtataataatgataatatgtattaattgattaaattgaggttgatttaaacagagatgttataggattggtccaatgtctcatatttagcaagattaggatggggtattgtgtcttgtattttaggtttgctcttattacactaaataccaccattattttgtttttgaatgttctcagtagtctaaatgatataatttctttccactgacaacttttttaatagctcaagagaaaagccatacacagatcacacctctgggtagaaaaagcacattgatgtcttggaactgtcatccaaggacacagtctaaattctttccatgtctactttctttttgtaacctgtggctgaatgtacatccaaataaaattgcaatcaacttaccatggttatatgagtattttgtcatctaacataagtagacaattgaaaactacctcccctttccttttacatgtttggcatggtacaaatattgcttgtagtttgaaatttcaaattagctccccagaagttgtaaaaagagaaaaaggaagggtaatgctaatgaaattttctatctgccctttaatgtaatttaccttgtagttttgagattgactctgaaagtcaaaatctagcaatgcagagcatggtatttagaggacttttagaaaaataggaaaacaatgtattactattatttttgcttaggcactagccactgccatgtcaggctctctctgttttgaaggcttaggcagaagagtaataaactctgtggagtagggatggaaaatacacttcaggttattttatgccacctggaaccttatcaaggatatcttcacctcctgtgttcccaaacctcaggggagaagtatttctgctgagggtcatcctgacacaagggggcaccttgagtgacaccttttgcctccaagtttgaagacatagtttttccaccatgtatagatggcactttcttggttcagtgctgattaaaaggaaaaaaaagaggaaaagttatacagtaattcaaaggcagctgtgaagcctgagtttgcagtgccagcagcagtgtggtaatttgagaatagtaagttagacagacaaagcagattttaatcatatgccacagagaggaaggtggtttaggtttatctccaaattgtacctccatagagaaagggaagcttttaatgcgattattcaacatatattgttaaagattacttttttcctttccccaacctttctttagtgtgtttactgggttagaaatggcagcctttttttctctcttagtgtattgagcagttgttaaatataaaatataaaacattttcttggtgttatgggaaatgcagagagagatagagagggagagattgtgagattctagtctgaagacagagctgaagacttaagaaaatattttcatccatctatctatctatctattcatccatctaactatccattaattcattcatcatttatccactcttccactcacccaccaacccacccatccactcatccactcttccatccactcatccgtaaatctatccatccgtccgtccgtccatccatccatccatccatccatccatccatccatccatcctccatccattcaccaaacaaacatttattgaatacctctgttggggactgctgtgagtagcagagatacaaaaagacaaataataattaatccttgccaatctagtagaaaagacagacagacacataaacagattcagcatagcactattgtgatagaaaaatactaggatgttattggagctcataaaggggccaatagtagagccagagtgtggcttgggggaaggcataacctttctttaacctctagtggctctcctccaatgttactactttaaaaaatatatcgggctgggcgcggtggctcacgcctgtaatcccagcgctttgggaggccgaggcgggcagattaagaggtcaggagatcgagatcatcctggctagcaccgtgaaaccccgtctctactaaaaatacaaaaaattagccgggcggggtggcgggcgcctgtagtcccagctactcgggaggctgaggcaggagaatggtgtgaacctgggaggcggagcttgcagtgagccgagatcgctacactgcactccagcctaggcgacagaacaagactccatctcaaaaaaaaaaaaaaattatatatatatatataaaatttgtggtttatttctttctccttatttatttttattgcagtaaaaaatgtatgtaacagaatttaccatgttagccattaaaaaaaatctttttcttttgcagtgcctgtgcctcgcacagctctgggacaggcacagctccctgcccccccagccgctgaaggcttctctacgcccctgttctggcctccgcgagcagaggagcttgaggcgggcaaagcttaaggcgacaccatgttagccatttttaagtgtgcagtttagtggcattaagtaaatcacattgttgtgcaaccgtaatcaccttccaaagttactacttataaaagagatattctttgaaatggattactgatattttgtcactcacatttcaagtgtgaataagagaatctttaaaagctttgttctttttcttgcaaatgtctcagccaaaattgtatcttgctataaaatgtgatttcaagagacgtcccacacccccttccttggttcctactagacgttcaccctcagcgtgtctcctgtatagatatgctggagcagccactgaggggccctaatccagcctgggaagggccaagaagattttctggagtagatgatacctgagatgagctataaggaaaatgtagacattgtctggctaataaatggggaaatgtgttgagaaaaggtgcagttagggaaagaaggacattctagcaaaggttgagcatagaggaagacataacatttatgaggaactgaaagaaatgcattatacttttctaaatcaagaaagagttccttactgtgcagtgggaagttggcattacctgctcagactgtgcagacagtggagtgggggtcagagtctggaaaacaatgatgaccactgtttattagggaataattaagacaactcctccattgagtcatggtttgtgactagcttggctcacacttgggcaagattcgttgggtgttttgtttcagactttgaatgcctcagtgctttttgaaaagccccaccctgaggcaaattggcgtttgccagttctttttttctggagaggtggtgacagggtctcattttttcacccaggctagagggcagtggcgccatcatagctcactgcggccttgaattcctgggctcaagtgatcctcctgctccagcctcatgagtagttgggactacaagtggtgccactatgccaggctaattttctttttaacttttatttgtagagaaggggttttgctatgttgcccaggctgagtttgccagttctttagttaaggttttaaatttctgtgtgctgttgggatggtgatagtttcacaacttgtgaccttcagtgatgaagcaagtctttcttaatataggccaggaaattaggagaccttttccttttttttttgagatggagtcttgtgcttgtcacccagactagagtgcagtggtgtgatctcggctcactgcaacctccatctcccaggttcaagtgattctcctgcctcagcctcctgagtagctgggattacaggtgccaacaaccatgcctggcttttttttttttttttttttttgtatttttagtagacacagggtttcaccatgttggccaggctggtctcaaactcctgatctcaggtggtccacccacctcagcttcccaaagtcttgggattacaggcgtgagccactgtgccagccggagaccttttcaaagcaacttaccccattaagctgttagagtagtcatgagcccagctagagagggtctgatgtaagcaattgcagaaattccaggaaataagtatcgaacagtattgaaaagcctccttatgcatagtagaccagtgctgtctggtagaacttttgcagtggtaacactgttctgtatctgtgctgtccagtttggtagccactagcctcagatggctatcgagcccttgcaatgtgactggtatgactgaggaactgaattttcatagctatttaatttcaactcattaaaatttgtttacatagttacacatgctagtggctaccacactggacagtgcagcaatagtctcttaatggtagctaactctggaagcagagaggaattgagtaaagatgggagcaatgcagggaagctttgcattacatacatctgtgtcatctgagcctttggtaagcatgtgttactttcataatttcaaaactataagaaatttttcagcaaatacatatgcctttattttcagagagaacttagaaagttggaagggattttagagttttaatccaatgcctgcatgtttctcagggagcatctgaagtccagggggggaaggaattagcctggtgagtgacacacagattgggacccaggcatctggaccccattttcatatttccttttttaaattatactttaagttctgggatacatgtgcagaacgtgcaggtttgttacataggtatacatgtgccatggtggtttgctgcacccatcaactcgtcatctacattaggtatttctcctaatgctatccttccccttttcccccatcccccaacaggccccagtgtgtgatgttcccctccctgtgcccatatgttctcattgttcaactcccacttatgagtgagaacatgcagtgtttggttttctgttcgtgtgttaatttgctaagaattacggtttccagcttcatccatgtccctgaaaaggacatgaactcattcttttttatggctgcatagtattccatcgtgtataagtgccacattttctttatcaagtctaacattgatgggtatttgggttggttccaagtctttgctattgtgaatagtgctacaataaacatatgtgtgcatgtgtctttatagtagaatgatttataatcctttgggtatatacccagtaatgggattgctgggtcaaattatatattctagttctagatccttgaggaatcatcacactgtcttccacaatggttgaactaatttacactcacaccaacagtgcaaaagcgttcctatttctccacatcctctccagcatatgttgtttcatgactttttaataatcaccattctaactggcatgagatggtatctcattgtggttttgatttgcatttctctaatgaccagtgatgatgagctttttttcatgtgtttggcggccgcataaatgtcttcttttgagaagtgtctgttcatatcccttgcccactttttgatggggttgtttgtttttttcttgttatttgtttaagttccttgtagattctggatattagccctttgtcagatggatagattgcaaaaattttctcccattctgtaggttgcctgttcactctgatgatagtttcttttgctatgcagaagcgctttagtttaactagatcccatttgtcaattttggcttttgttgccattgcttttggtgttttagtcatgaagtctttgtccatgcctatgtcctgaatggtattgcctaggttttcttctagggtttttatggttttagggcttacatttaaatctttaatccatcttgagttaatttttgtataaggtgtaaggaaggggtccagtttcaggtttctgcatatggctagccagttttcccaacatcatttattaaatagggaatcctttccccgttgcttgtttttgtcaggtttgtcaaagatcagatggttgtagatgtgtggtattatttctgaggcctctgttctgttccattggtctatatgtctgttttggtaccagtaccatgctgttttggttactgtaggctggtagtatagtttgaagtcaggtagcgtgatgcttccagctttgtttttttttgcttagaattgtcttaactatgcaggctctttttttggttccacatgaaatttaaagtagttttttctaattctgtgaagaaagtcaatggcagcttgatgggagtagcattgaatctataaattactttgggcagtatagccatttttacaatattgattcttcctatccatgagcatggaatgtttttccatttgtttgtgtcctctcttatttccttgagtagtggtttgtagttctccttcaagaggtccttcatatcccttgtaagttgtattcctaggtatgttattttctttgtagcaattgtgaatgggagtttgctcatgatttggctctcagtttgtctattattggtgtataggaatgcttgtgatctttgcacactgattttgtatgctgagactttgttaaagttgcttattagcttaaggagtttttgggctgagatgatggggttttctaaatatacaatcatgtcatctgcaaacagagataatttcacttcctctcttccaatttgaacatgctttatttctttctcttgcctgattgccctggccagaacttccaatactgtcaaacaggagtggtgaaagagggcatccttgtcttgggcaggttttcaaagggaatgcttccagcttttgcccattcagtatgatattggctgtgtgtttgtcataaataatagctcttattattttgagatatgttccatcaatacctagtttattgagtgcttttagcatggaggtgtgttgaattttatcaaagaccttttctgcatctattgagagaatcatgtagtttttgtcattggttctgtttatgtgatggattatgtttattgatttgcatatgttgaatcagcgttgcatcccagggatgaagctgacttgatcgtggtggataagcttttcgatgtgctgctggattcggtttgccagtattttattgaggattttcgcatcaatgttcataagggatattggcctgaaattttctttgttgtgtctctgccaggttttaatgtaagggtgatgctggcctcatatattgagttagggatgagtccctctttttttattgcttgtaatagttttaggaggaatggtaccgggtgctttttgtacctctggtagaattcgcctgtgaatccatcggtcctaggttgttttttttttttttttttttttttggattggtaggctattagttactgcctcaatttcagaacttgttattggtctattcagggattcgacttcttcctggtttagtcttggaagggtgtatgtgtccaggaatttgtccatttcttctaggttttctagtttatttgcatagaggtgtttatagtattctctgatggtagtttgtatttctatgggatccgtggtgatcttccctatatcactttttattgtgtctatttgactcttctctcttttcttctttattagcctggctagtggtctatctattttgttgatctttccaaaaaaccagctcctggtttcattgatttttttgaagggtttttcatgtctctatctccttcagttctgctctgattttagttatgtcttgtcttctgctagcttttgaacttgtttgcccttgcttctctagttcttttaattgtgatgttagggtgacaattttagatcttccccactttctcctgtgggcatctagtgctctaaatttccctctaaacagtgctttagctgtatcccagagattctggtacattgtgtctgttctcattggtttcaaataacttatttatttctaccttaatttcattatttacccagtagaaattcaggagcaggttgttcagttcccatgtagttgtgcagttttgattgagtttcttaatcctgagttctaatttgattgcactgtggtctgagaaactgtttgttatgatttccattctttttcatttgctgaggagtgttttgcttccaattatgtgattgattttagaataagtgctatgtggtgctgagaagaatgtatattctgttgttttggggtggagagttctgaagatgtctattaggttcgcttggtccaaagctgagttcaagtcctgaatatccttgttaattttctgtctcgttgatctgttgaatattgacagtgtggtgttaaagtctcccactattattgtgtgggagtctaagtctctttgtagttctctaagaacttgctttatgaatctgggtgctcctgtattggatgcatatatatttagcatagttaactcttcttgttgcattgatccctttaccattatgtaatgcccttctttgtcttttttgatctttgttggtttaaagtctgttttattagagactaggattgcaacccctgcttttttttttttctttctatttgcttggtaaatcttcctccatccctttattttgagcctatgtgtgtctttgcatgtgagatgggtctcctgaatacaacacactgatgggtcgtgactctatccaaatttgccagtctgtgtcttttaattggggcatttagctcgtttacatttaaggtttatattgttatgtgtgaatttgatcctgtcattatgatgctagctggttattttgcccattagttgttgcagtttcttcatagtatcaatggtctttacattttggtttgtttttgtagtggctggtatcggtttttccttcccatagttagtgcttccttcaggagctcttgtaaggcaggcctgggggtgacaaaatccttcagcatttgcttgcctgtaaaggattttatttctccttcacttaatgaagcttagtttggctggatatgaaattctggattgaaaattcttttctttaagaatgttaatattggcccccactctcttctggcttgtggggtttctgccaagaaatccactgttagtctgatgggcttccctttgtgggtaacccgacttttctctctggctgcccttaacattttttcctttatttcaaccttggtgaatctgaagattatgtgtcttggggttgctcttattgaggagtatctttgtggcattctctgtatttcctgaatttgaatgttggcctgtcttgctaggttggggaagttctcctggataatatcctgaagagtattttctaatttgattccattctcccatcactttcagttacatcaatcaaatgtaggttggtcttttcacatagtcccagatttcttggaggctttgttcattccttttcattcttttttctctaatcttgtcttcatgctttatttcattaaattgatcttcaatctccaatatccttttttccgcttgattgattcacctattgattctcgtgtatgcttcacgaagctttcgtgctgtgtttttcagctccatcaggtcatttatgttattctctaaacttgttattctagttagcaattcttctaaccttttatcaacgttcttagcttccttgcattaggttagaacatgctcttttagctcagaggagtttgttattactcaccaccttctgaagcctacttctgtcaatttgtcaaactcattctccatccagttttttgctcttgctggtgaggagttgtgatcctttttgaagagaagagatattctggtttttggaactttcagcctttttgcgctgttttttcctcttcttcatggatttatctacctttggtctttgcttttggtgacctttggatggagttattgcgtggtcagcctttttgttgatgttgatgctattgctttctgtttgttagttttccttctaacagtcatgcctctcttctgcaggtctgctggagtttgttgggggtccactccagaccccatttgcctgggtatcaccagtggtggctgcagaacagcaaagattgctgcttgctccttcctctggaagctttgtcttagaggggcatctgccagatgccagccagagcgctcctgtatgggatgtctgtcaacccttgctggggggagtctccccatcagtaggcatgggggtcagggacctacttgaggaggcagtctgtcccttagcagagctcgagcactgtgctaggagatccctgctctcttcagagttggcaggctggaacgtttaagtctgctgaagctgcgcccacaaccaccccttccccagggtgctctgtcccagggagatgggagttttagatataaatccctgactggagctgctgcctttctttcagagatggcctgcccagagacgaggaatctagagagtcagtctggctacagcagctttgctgagcttcggtgggctctgtccagttcaaacttcctagcagctttgtttacactgtgaggggaaaaccgcctagtcaagcctcagtaatggtggacgtccctctccccaccaagctcgagcattccaggtcaacttcagactgctgtgctggcagtgagaatttcaagccagtagatcttagcttgttgggctccatgggggtgggatccgctgagcaagacctattggctccctggcttcagccccctttccaggggagtgaatagttctgtcttgttggtgctccaggtgccactggggtatgaaaaaaactcctgcagctagctcggtgtctgcccaaatggctgcccagctatgtgcttgaaacccagggcccttgtggtgtaggcacccaagggaatctcctggtctgcaggttgtgaagaccatgggaaaagtgtagtatctgggccagaatgcaccattcttcaaggcacagtccctcagggcttcccttggctaggggagggagttccccaaccccttgggttttctgggtgaggcgacacctcaccctgcttctgctcaccttctgtgggctgcacccactgtctaaccagttccaatgagatgaactgggtacctcagttggaaatgtagaaatcacccaccctctgtgttggtctcactgggagctgcagaccggagctgttcctatttggccctcttgcctggaaatcccattttcatatttctttctacttcatgataaggcattattatatgactttggttaatgttgtaatgttttctctttgtatgaagaaataaaggacatataatgattaagcaaaaggaagttaactcttcaaacttgtaattattgataagttaaccataccttttaatcagcagtttctctttttcatttattttgaagataaaatctcttctttgataataattataaacataataaaaatcaaataatacaaaaggtaatccagtgaaaagtaaatcatcttcctacatctgaccctagacgtgctcctcagaggttagtactctctgcagatattttgggtggaaccttccagaatttcctttttccttccagaaaacaatattggccatcagttagtaggaagtaatactaactccactgaggtgtagttttgtgtggccaaatgacctggagaaatgctttgtagggctaggttggctcacacttccagatctagaggtaagatctgttgggtttttgtctcaggctctgaatgcctctatgaatgtgggagcccacttgatatttatgtttctctatgtttctctaagcacccttattctctctggtgggcttgtatttgcgacagatggttgatagtcactcctggtttttggggagtgtctttaccacttctttcatcgtgtcattttatttccctgcttcacagtgtgactgggatccatgaagaatcatctgtgtgctcccctttctctgctcacttccgtgtcttgcagacttaggatgtcttcaaagtggacctttcctcccaaaggccctgtttaaaattccactgtctcagtgatgtgtgaagaacagtcagagatgctgaaagacaccggaagtgtaagattcctcccaggaaatagtgactttctcagcacccaggggactccagagagtagggataaggggaagggagtgctggccttcaagaagaggtgagcagaagggaagggctggagatttgttttgctcaggtggtacatgagtgtgacatgcagccaagtgggctaggggtatatgctaccacagtagtccctacggtcatttccgcagatgggtttagaaaggttctgcgatcagtggatggatcagccagtaaccattaactaaatcaacaaagttttaatgccccaagacacacactatgtgagtcttctctctaaagtgatactcccagccactctccatcacattaccatctgtcactttttatggttgttcattaacttgttcaccccttgtgtgcctgtttgttttctgtcttccccatagactggcagctccatgaaggcagggatgttcctgcaccccagtgtctagaatatccccagtgcctggaacactgtgggggcttaataaaaatattggttagctgaaagaataaataaatgagcacactttaccaaataataataatagcagcaatctgttgagcacttagtatgtgccaatccctgtgctttcatctcatttaatcctcaaaagcagttctaggaagtgggaattgatgtccctattttacaggtgtggaaaatgagtcccagagctggtgggtaccctgtcttcggtcacatagccagtaagcagtagactgagatttgaacctgagtctgtccaagatcttgaagtttaacatattaaggtgtaatttctagagatgtcaatctaagccgtcacttcagaaaggggccctgcaaaagaagcaggtttctgcattccaggtgagtgctggacagtcgggagcagactaggcaccacctgctcctcaggattttagctggagacacccccacaaccctgtcaacgtggtcctgggagtgggttcatccctgacatgcgtccctggtattttgagcagttgtgaattatttaggtgttgtggcagacgtgcttccctgcattgaattctaactgaaaactgtgctgaaatgaaagccaagaggtacagcagctacttctttatttatttattttctgttaatgaatgggggagaaaaaacaactctgaagccatcagccagatacttcaccttcttggcgctctttcctggctctccaaatggcaccttggtgcttgtgagtatttttatttttatggtatcatattttgcaaaatacctgagagccattttcaacactctggctacccagagagcacttcgtttgatccattttcctaccaggagggcttaagtggaaagaaaggagaggcctaacaagcaccctgggctcagctaactccctccttctcagcctccccccttctctgggccctctctgagcttcactgctttctctctggctgttatgctactggggaaatcaacagaacctattattgtgagtgtgtacagtgcattatattttgtaaaatgactcaggttctgtttattagtcatttcctaagtaagtcactaaatagggaagtagaacctggtaacatccaccaggcatagattaatgagttagccctggccagggaaaaacttctcaaagagatcaagtgcctcttcttaaggaaggttggtgctgttgggagtctgtgagtgggatcctcccacatctcttttttgaacagctttattgggatctaatacacgtaacgtacaattcacctaaagtgtataattccacggtggttagtatattcacagaattgtgtatccatcaacacagtcaattttaggacatttcatccttccagaagaaaacccatatggatcttaattgtcactccctccaccctcttcatttcccccaatcctagggggaatttaccttatgttactgtagatttgtttttcttggacatttcatggaaacggaatgatacagtatgtggtctttgggattggcttcttccatttagcataggattttcaaggttcactcatgtttagtgtttatcagtatttcctttctttttattgccaaatactatttcgttatatggacgtaccgcagttagttgatccattcactggtcgatggacatttgagttgtttctactttttgactactaggaatagtgctgctatgagtatttgtgtatgggtttttgtgtggacatatgctttcattcttctaggagtggaattgctggggcatgtggtaactctatgtttaacctctcgaggaactgccagactgctttctagagcagctgcaccatgttaccttacccgccagccatgcatagggatcctgacatctccacatgcccatcagtaacactggttattatctgactttttgagtgtagtcatcctagtggatttgaagtggtaaagtggattggcattgtggtttggatttggctttccctgataacttccatctgcatcttgactatacattttttccttaggtagctgggaggtcttttaggggttaacatttgaaccggtgagaagactctctctggagccctcctcttcccaggctgcctcaagactatggggcatcttcatgctgaaacctctttcatctgcggggctgggggacactgtgacccaaccactgccccgaacttcacaccttcaaggttggcttcctgctttccagtggccttttttaattattacactatctgtatgaaaaatgaagatttaaagcaaattgctttcaaaagtcagttacagatgtcatcctctgttatatttacaatctaagtcatgaaagtttctaaggtcacgagcttattttttttaagacactgtacaccaagcccaccacacagagaatgtgcgttttccatcttttctaggctctcaaagaatgattacagcccaatctttggaactgtgtgtgtgtgtgtgtgtgcgcgcgcgtgtgcgtattttaattaaactgtattttgaggtaattgtagattcacatgcagtagtaagaagcaatgccaagagatcccatccttggaactgttttgttgtgggagaaagtgaagacttactgaggactgcaaaataactctgggagtgtgccaggaatccaaactatttctgttgccatcagctccctgctttttcccaggataaggaccacaggacgaaacaattaaacgagctgctcctggggagtggtttcttattgacagcagctattcagctttgtgatttatttcagcttaaagtagacaaacctaataacgttacccattctctttcctcccctttttgctaatattgcatctttttggctgtggctactgctgctgctgccataccattgaacttttgaaagaaattgagcctgccagagatctcgtttgaatttaaacctaacccatattgaaaaagtcttctagatgtggcaaagaatgtaaatgagctaaagattgtaaaataggtcagtgtagcacctggtataacatctgagtttgctgtgctcatcaattcaacacataagtgactgagtatctgctctgtgttaggcactgcttgaggtgctagggatacagctacggaaaaaacacacagaaattccggtcctcatggagcttacattctcctgaagggaggcaaaaataagtaaaatattaagtatgtctgttgttggtaaatgctttgaataaaagttggggaggaggcaaggaggggagggggggaaggaaaggcattgggggtgattccagttttaaatgaggtggtcaaggaagacttccctgggaatgggatattggagcaggggttggcaagctttttctgtaacagaccagatagtacacattttagacttggccagccagctactcaacaagtcatgtggtgcaaaagcagctgtagacagtgcacaaaggaacaagtgtggccgtatgcctgtaaaacttgattttcagaaataggtgaaggctgggattgggcacgtgctgcagtttgtcactccctgcattagaataaaatggcaagggaggtgagaaaccaggcactgtggtgtctcctggggtgggggcagggagagcattccaagcagaagagacagccagtgcaaaggccctgagctggctttgaggctggcttaagaacaggaagagagtcaagcattaaacagagtagaaggacacaaggtcagagagatgattagggccaattctgtgggagtttgtaggccagtgtgcactcacaaaccatttgttaacaatagtcaaaagaataatctataaactacttttttttctaaacagtcgaagtaggatgtgcatacagtaaagtatgcaaagttatatgtgtgcgtacagcatgatgtttttataaagtgcatattcttgatgacagcacctagctccagaaacacagcatgcctaacacccaggcagtccctgttatgcctcctcacaggcaccacttcctgagagtaaccactgtcttggcttctgacatcataggttagtgcttcctgttgttgaacttcatgtaattttacgtaaaaagcattgggcagtatatgcctttctgtcttctcacatttggcttcttgcgctcagcattatattggtgagattcatccttgttgcttatagttgtaattctttaattctcactggtgtatgggagtagattctataaatgcagtcaggcaccagactgcatataggacactgtaccgttgtagctcaatgtgttactcacctggtgttaaacctattgcactgccagtcatacaaaatatagcacatataattatgtacagtacgtagtacttgataatgataataaatgactatgttactggttcatgtatttaatataaatacatatactataatatactatactttttcttgttattttggagtgtactccttctacttatatacaaaatgttaactgtaaaacagcccctgggatgtccttcaggaaatattccagaagatatatatatatatatatatatatatatatatatatatatatatatatgtatgtatatttttttttgtttgagacggagtttcgctgtgtcgcccaggctggagtgcagtggcgcgatcatggctcactgcaagctctgcctcccaggttcatgccattctcctgcctcagcctcccaagtaactgggactacaggcgcccgccaccacacctggctaattttttctttattttttagtagagacggggtttcaccttgttagccaggatggtctcgatctcctgaccttgtgatccacccgcctcggcctcccaaagtgctgggattacaggcgtgagccaccacacccagcctttttttttttttttttttgagacggagtcttgctctgttgcccaggctggagttcagtggcacaatcttggctcactgaaacctctgcctcccaggttcaagcaattgtcctgtctcagcctcctgagtagctgggattacaggcatgtgccaccacacccagctaatttttgtatttttagtagagacgggatttcagtttcaccatgttggccaggctggtctcgaactcctgacgtcaagtgatccacccgccttggcctcccaaagtgctgggattacaggtgtgagccactgcacctggtcgatatattgttatcataggagatgacaacttcatgcgtgttattgcctctgaaggcctttcagtgggataaaatatggaggtgcaagactagtgatattgacactcttgatcctgtgtaggcctaggctaatgtgtctgtgtcttagattttaataaaaaagtttaaaaagaaaaaaagtttaaaaatacaaaaatagaacaaagcttatagaataaggatattaagaaaatattatgtgcagctgtacaatgtttttgttttaagctaagtattattacaaaagtcaaaaagttaaaaagttaaaaagcttataaagtaaaaatgtcacagtaagctaaggttaatttacttttgaagaaagaaaattaaaaaattaattgagtgtagcctaagtgtacagtgtttataaagtctacagtggtgtagcgtaatgtcctaggccttcacacccagtcaccacgcactcacccagagcaacttccagtcctgcaagctccattcatggtaagtgccctagataggggagccattttaagtcgatttttactgtaccttttctatgtttagatacacaagtgcttcccattgtgttacagttgcctacagtattcagtacagtcacatgctatacagatctgtagcccaggagcaataggctctaccacatagcacatagcctgggtgcatagtagtctgtacagctgggtttgtacaatgaaattgcctaacaacatatttctcagaatgtaacccccttgataaataacacatgactgtattccattatttggtttctttaaaacattattgatagacatttaggttgcttctagttttggctattacaaactactttgctagctttaactttaaaaaaaaatcataaactcttatatgtacagtgccagccatatttagaggctttgggaatttttgaaaaataactgcaaatgtgtgagaacaaccgactcatccagggatgaagttatctactcttcctactgcagctcaagagttcagagctgaccagcgcagctgaccagctgcgtggtgggtgttcatggggcgttggtgcagtttgcacaagttcttgttgggggactccatcttcccttttgcatttctctagcagatgattgtctgttccagaatgaagctcctaggtggaggggcctctggactctcaagagctcttctgcagccatgatctccgggatcacggaggaccttcattctccaaatctgtaaacatgcgatgcaggaaaattatgctaaggccacaacactttcttccctcatcctaggagggaacttaattatttaggcagctcaggatggaatctacctatagaagggaaaactgtgcttgtgaatgttcttcatgaagtgctcaggcagcaccacgagcaggtcactttttgatgattttgaagctgacctttttggaaacacagttgttgtgctgaacctgcaggccaggtgcactttgcagctgtagagtcaggaggtggaaatctgatcactttgttaggaggaccttggtggctctccccttcctcccagctctctcaggccacctgtcctatcgcctctctactcagcacccccatctgtaagtaatcctcttagtaaacaaaacggccccagctgccaatctggtggcctcagcacttggctgatcttagaggacttgccaactggggcttatgtagccttcagtgtccttctcgagcactttcaagtagataaatacagaaaattagtaggctggcaaaaataagagagaagtcagccttttgagtagcagttctgagctctctcacctgtttacagatttatattgtattttacaagatttcacattagaatggatatttctagactgttccattgcttctatgtgaatcattgtaaaacacccattgatattttacctggtgcattattgtaggagggggactttcctgctgtgtggaagaaaatctcatgacaggcatagacacatggcacagagtaaatgcatgaacattttttttgccataagaatgaatcaagaaagtagcaactctgatacctcactattttgggatcttgaacccaatattgcgtgttgtttgatgtgagctgacccaatctgaggacccaacatctcccagaagatctcctgccattaattcattcatttatcaatatttactgtgcaaggtaccgtgagaggatgttgaaatacagatgtaaacaacacacatgcatggagcttatattctagtagggagaggctgacaataagcaaacactcatacaaataaaaattatcacaggtgatgtgatgagttctatgtagaaaaataaagttgagtaagggggattagaggatgaagaggtagggaagcggtactgttctttatagagtggtcagggaaggtgtccctgataaggtggtatttgaggagaggcctgaaagaagtggtggggggggaagtcaaatgaatacctgggagaagaacatttcagaaagagaacagatgtaaaggtcttgaggcagaagggagcttggcgagtgtgaggaatgtgagggaggaggagaggactgggaaagaagccaagagagggggtggcagacaacctgagggtcttataggtcacttgaagagctttggaagccattggaaagctttggtagagaatggcatggtctgtcttgtgtttttaaagaggatcatgcacttgctctgttgagaataggccctagggagagaagagcaaacacagggagacccattaggaggtgaaaactgtgcccttggatagtgagaagttttaggaagcccaagaccacttgaatgtctacagtcattggtggtgctttccgtttgtgtgaaagtcaagctcaggagatgataagcactggcctggccttgaaggggaagctggcaagggctgatccctcttcctttccaagggctatcaccacagagcagtacaaacccgaaggccatgtagcatctggcttcagcagcactcagtgcacaccccaaactgcagcaggatgcggagtgtattctcttccgttaccacctccccactcccgcccttgtcaccagctacagagcagctggttcccctgagttgcaggagagttctagctagtgttaatcacacaggaccttctcaagctatatcttccttttccttcttgcacgaatgagttgtgccttttctgtccatgatttcaactgtggtgctgctttcctcaggcttctctgaatctggactcatctggcccacttggctggtggagatgtggccctggagtgttggcccttctgatccaatgtctaatttacagtgcttcatgatcaccctttggattctgccttggttatctattgctgtgtaagaaatgtctgcgcactcagtggcttaaaccaacacccacttagttagctctgtagacctagactggtgtctagaccaggattctgggcaggcttggctgggttctatactcagggtatcacaaatctgtactcaaggtgtcagcagagctgggcttttcactgaaagctgggaggcagaatctatttccaaggttgttcaggttggtggtagaattcagttctttgcagttgtagaactgatgtctccattttcttactggttgtcagcttctagaggtcaccacagtccttatcacatgcccctctctaacatcaagccagcagcgatgcatgaaatccgtcttgtgctttgaatctctctgaattctcttctgtcgtcagctggagaaagctctctgcttttaaggactatagggtatatgacccaccaggataatgcagataatttccctatctgatggccaattgtgccatgtaacatagcatagtaactgtgccatgcaacatagcacaatcataggataggttctgtcgtcatgttgataggttctgggggttagggcaggacatcattaaggggccattttagaaattctgcccttcccaatagtcttttgcagccaatatcagtagtattagcagtactactgctaattacactgtagtaattaccaaagtaaatcagtcatgagggcctatctttgcccttatagtaattactacagtgtgcttgtatttccagaaccccagtttctccttttccagagaggcagttggcattttgaagccacatggtgcactggaacccagcataaccatcagaaatcagtgtttagtgtttctgtctgactctgaatggcagaggacaaaggaaatgatggccttttatatcaatatatgatcattaaagcttctcattaaagctaaaattatgagggccgagattttcaaagcatttctgtggtttgatttggagtccactgaatcatgaaattggaggtaacctctgctgccctttgcctctgcttcttcccctcacagcaagcttccgggtaccatcctgatttgtctgcccacctcttctggaacacctcacttgacctcttccattctttaacaggcccatttattaagaaattctttcttctattgggcccatgtaagtttccttctgactttcgcacagtgtacctatttatggcttatagctgtaccaaataactcatttcttttcataaaatatggtgattcagatacttagaggcagatatcaagtctcagaacatctcttctacaaactaaactttagctttagcaggcacctggcacgtcacctctacttctggtactgggaacatgcctttagaatgtaccctccatcaaaaaggcaggaaccttctctgttgcactcaccactgtgtccttagctcctagcacactacccggtacacagcagggaccagtgcatatttattaactgggatgcaattgccctttggaactgaattcgaagtggcgcatgcttaggtatttgcgtgttctccctaattggcactgcccagtcttgtgatccaccccaggtccatacctaaaaacagttaatattttctgtctcacatttgttccagaacaagacacataactagataaataaaacaagttaatgattcatgcacttaaaggagttgcttccataagtaacaaattttggtgcttgacttaaattgtacttcatttagagttgcagcagaaaggaggaggtaaatgcattgcagagaaaagaggatattaaacgtagagttggctttccttttccctctctactcaaatgcatggagtcacttaatcagatgcatctcttcatgtgagcactggctgcagggatgaaaatgaagccctgctagcaataagaaattcctctcaagaacaaacaggagatgtggttgccttgccgcttgttacataccaatcatcttgttacctagaggcagcaaatacaggttttcatggtgtgcattcgttgtaatattctaatgttctggctcagtttaaaatgcatagttttgtataatgtaattatcaacacatttgtatcatttttgtgtgggaaaaatgtaggtaattatatctgtaagaaattacaaattatatcccctggctttgtagctcagctctatagcctgaatgtattatagtgctctcatggaagaacactccgtgtttataaaaatttcaggatgtagtctgctctctgaaaaattattggggtaccttatatgtatataaggagtcttgccctgtcttcttgacatttatctttcctcctttcaacacatacttactgattcctgctatatgcaaagaagtgtagtttttttttttgagatggagtctcgctctgtcacccaggctggagtgcagtggcaccatctcggctcactgcaagctccgcctcccgggttcatgccattctcctgcctcagcctcccgagtagctgggactacagaaggaagtgtagtttttaagtaggattttcaaagaaaaatctctagttgtatcatgtaagatctatagaaaagcaattacagaagacaattgtttattgacttttaacattgataaacatcagaataactaaatttctttgtttttggcaactttgatttggacataatgtatttcgcatatattatgcaaattaatttttaaagtagagccagcccttctaggcagggaatttcagttaattctttctttgttacctctcccaagagtgtgcctaataattaactggcagatgattatataaagcattaaactgtaagttagaaaatgctgcagagaagctaacccctattctccactcttttcctcgcctccaaactcatattttgctgtctctagatatttgcatcttgttagagtccacaggatgtattaatttggcaacatttttttgcattgactaattgaatctgtcattcagcagatatgcattggggctccctggtgtctagactggagtgctagagatgaagagaagataaagctctaaaagagatagaggagccttacccttaatgatcctatagactgatggttctcaaagtgtggccactcctcaatattgacattgtgtgtgtgtgtgtgtgtgtgtgtgtgtgtgtgtgtgcgcgcatacacgccaagcactctatgcaggcttatagccctgaaatatgttagagtaggaaatggatattcaagatgattaaaaaaattaataccatatgtttaagagcagttgtaggcatatagaaaaattaggtatataagtatatggagagtacagagggttcccatctaccctctctcctattactaccatcttgtgttagtgtgatacatttgttgtaattgacaaacttttataaatacatgattattaactaaagttcatagcttacattagggttcactcttggtggtgtacatttctgtgggttttgacaaatgtaatatgtcctgtatccaccattacaggattatacaggatagtttctctgccctaaaaattcttagtgctctacctattcatccctccgttcttctccactgacccctggaaaccactgatctctttactgtcaccatatttttgtataatatattgctagaatcaaaagttagtcttctcagactagtttcttttatttagcaacacacatttaaggttcctccaggtctttttgtggcttgataactcatttctttttattgctgaacaatattccattgtctggatgtaccacagtttgtgtaactattcacctattaaaggacagcttcattgcttccaagttttgacaattatgaataaggcttctataaacattcatgtgtaggtttaaaaaccttatgtggacatacattttaattcactgctggatcatatggtaagacaatttttagcttgtaagaaacagccaaaccattttacattcccaccaacagtgaatgaagcttctgctgctccagatcctcaccagaatttggtggcgtcagcattctgggttttagacaaaatggtgtaaaatggtatctcattgtaggatgaatttttttgtactgtaggataattttacaagtcaactgaggcacttgagcatcataaatgcactgcacaggtaggcaggagtggaaagtgatggcatactaatgcattctgtttctgggtcccacacgtttcagaaaatacttttcatcatcatttttactcattaagttagatgttttcagtcaagagtcagacagctgatgaggccccctcatcagctgtcctgttcatatggagttcttttttctacagcctctccttcacagctcctccgtttgaaagcactggccctgttggaattttcatcttcttgtcagtgtggtgagattgcagctgatctgccctcaggggaaaaacatctgtcaggtgtatcctagtgtcattttggacagtactgcacccagaatttttgtttacatagacactcccgtgccattctctcagttgggtttgcttgggtgccctggccagtcagtgtcagcaacagttatgatcatcagcttcaccagcttttcctgtttcaggaagatttttgcatcttggtgacaaaacccaaggacccaatacaaggatattgccacgttagaggtaacatactcattttgcaaacatgcctcatctcgaaagcctgaagagctattatcatatggtagatcttacagtaaagcctttctttatctagtagatatttctctcaagtgttgctttactcagttttagctcattaatattaatgataatattagttgggaaagaggatggaaggtcttgtctaagagctgttttgagtggaaaatacactgttttttctttgattatatgttttcttttcttttttttaaaggggtgatagctttgagggtagatattgaaagggtattctaaactagagctgttcagtagaaatgttcatgatgatggaactattttgccctgttcaagatggtagtcaccagtcacacttgtctcttgaacatatgaaatacagctagtatgactgaggaagtattttttcattttatttagtttaaattaattttgatagccccaggtagccagtggctgagaagtgtaggggagcacatgaactacttgttgactgtgcattagttcctttggcagaatgatagagattttatggaaggtgctaaattaaagtggataaacctttggcctattatcttctatcatggaatttgagatggttctttaaaaatgtttcttgatttgattttctgtgtcaagtttggtctctacatgagtggatattatctgggcaaagtcattgaagtaattccctctgctctggagagacttctgagttggaaaccagagaagtcaagtgattgacaagtgtactagtcaggattgcttaggttatgctgtgacaacaaatttttttttttttggagacggagtcttgctctgtcttccaggcgagagtgcagtggcacactctcagctcactgcagcctctgcctctgctcactgcaacctccacctcctgggttcaagcgattctcctgtctcagcctcccaaggagctgggattacaggtgcccaccaccatgcctggctaatttttgtatttttagtagagacgaagtttcaccatgttgaccaggctggtctcaaactcctgacctcaggtgatccaccagccttggcctcccaaagtgctaggattacaggcatgagctatcgctcctggccaaaaaattcatcctaaaatctcagcgtcttaacaccccaaagtctcctctgatgcaaccgggcaactgtgaagagcagttgttctccaggcagtcactcagctatcctggctgtttccatcttgtgtcttcatggaagccaccaaagtccctacaaaagagaagcagagagtggaaggttgcacaccagctcataaatgtttagatccagaaatgacacagtcccttctgctcacaccccattggttgtacatgacagatggccctgccaactgcaagaaggctgggcaatgtggaggagcccacgggtatttggtaagtagtaaatgtcttttccatacccaatccttacactcaaaaaatttaaatacattggaataattttgaaattgtaagctatttccattacgccacttagaagtaatttgggaggctttgcaaaatattttatttctagcttttagtcttactttgaaatttaaccagataccctatttctcagtaattttcacttccatttcattttgaacgtttggtggtacaatgctaatttaccttgagatcttttgggcacaggtgctcataaataaaaaagttatggtaataatttcattatctagctgaacaatttttagttcacatcttttgggatgtgaactgaaacacaaatggaaagagtattgtgcataattcccttcagcatgtactgaatttgggtattactctgacattttatttatttatttacttttgagacacagtttcactcttgttgcccaggctggagtgcaatggtacaatcttggttcactgcaacctccacctcccaggttcgagtgattctcctgcctcagcctcctgagtagcagggattacaggtgcccgccaccacacccggctaatttttgtatttttagtagagatggggtttcaccatgttggtcaggctggtctcgaacttctgacctcaggtaatccgcctgcctcggcctcccaaagtgctagaattacaggtgtgagccaccgcacccagtctacactgacattttataagtacactcatttgttttgtttgtttttagttttgtaaaacccttgtgctacagaccctggggaaacaacagtgttcattcataagaaccagatttaaagtggcaaacatggagaaaccacctatgttttcctaaatctcctctctcatcagctatcattttttttttaatctgctttcaaggggaacttacatggatgtactttctgtcattatatccctgatttctctagtcctagaaatcaccagggcatttatcaaaagtgcagatttcttgttgccagcggatctgagatagggtctaagagtgtttattttagcaaatgctccttggtgattttttaaaacattggggtagtttgggaacttcatcttattttaaggtaatcaagttggttgagtgatggggagtaggatttttgtcacatatgcaggttaatgatgaaacaccagctagtgtccttgatgaagaacagttgatgaacaaggttgtatttcatcagcttcccaaacttcagtttttactcttccattttcacaatttttgcaatagtctcatactatttatacagttatttatttagtattttttcattcacataaatcaacttatttgaatttgaaatatcatgtgaaatcatgcctttaccattaaaaaatttgtgtgtcacttataataattttagatacttcttgtggagcaggcaccagatttgaggcacatggtgtaaaataattcattatgctagtgtaagaaggtctcatacttctaaagtactagcttatggatttgttgactgaactgtgtgtgccatgtaagctcgagacaggcaaacatgcttgcccagattcaagaatttactttcaattttcagccattggtagttttaaatcagaatgtttttggtaatggtaataaatactcagacttgataataaattgtcattccaaccataatttgtgaatttactcatgtgttagtcctgccttgagctgcatgcatccatctctgtgtttatggtgaccacacagaaaaaatactgtttcaaatagccatgttgttttggtcctttttcatgagtactatgtccattcaccatgacttttgtcacagaaaagatgcttactatacctatcattaagtacatgcaggtactatgtccagacagggaacattttctgtgttttgtggaagcttcagtgaggtaaatttaaatgtatgcactgttgacatttttgttaatttgaaataatacgtaataactccagcttagctgacagctaccccctttctattttcttgtatttgccgttattctaacaccctcccttgaccttactttcccctcagttacctccaattataacaaaattccttgacagacgatttcacttctcctacattttattaacctgctccagtctggctctgtccccttaccaagggcaccagcgacttccactttcttcaatgcggtggtcagttcttggatctcatcttactgacccatggcagttttggacacagatggccacttgctcctcctggaaacttgtcctcttcttgcttccaggaccctccccattgcctgaatttcctcctcccctctttgtcccccaactctgcttcccagcctctttgtctcttcagctcctttttgggctggactcagaaaaagagagtgcaatcatgacaaagataaatgtagagggagttttgtagcctaatttatataactaaacaattggaaacagtaggagaatggttaagtaaatcataaaaatgttcatatggtagaatattgtgcaactggtgaaatatattttctaagaaaaattgatgacattggaaatatttatgatcttttgttttattaaagtagggtatacaactgtgtatacaatgatatgattttgtaaaatatcatatatatacacacgcacatgcgcgcgcgcacacacacacacacacacacacacataaatgcacagaaaaaacaccagtataaatgtagctgggactacaggcacatgccactatgcccagctagttaaaacattttttttgttgttgttgagacaggggtctcactatgttgcccaggcttgtcttgaactcctggggtcaagcaatcctccccaccttgggttcccaaagtgttgggattaccagtgtgagccattgtgtccagccagatgttaactattttaaaacattctaaaaggaacatgtgtcactattgtaaagaaaataatttttaaaaagaatgaaagcaaaacctgcaaaaatctgagaaagacctcagatggggtgggtttccagggaagagtatggcagggggccagtgggggaaacatcccagatttttctgaatcacatcttttaatttaaaaaacaaccaaattggcatgaacttcaagcatattatgcacattttcattctaatgtgagaagaaaaatccatgtggaaaaacttcatttttctgagtattcactatcttagaatattttgctccatttcattaatgcaagtaactgtaaagtactataccacctccacacactgtggagaacagagaatgatgaaatgcattcatctcatccgttctcccacgtttatgtgttactagtgaggcaggaagaatgagggttggcttagcctttcccagttgcccccagctgactgtcacacccatttcattgttggcactgctacacccatggattcttctacggaggaggctaggatagtggctatttggtttttccagcctccatagtggaaatgacaagggaagagttggaagtggcttttgggtcagcgggtgataagtgtagcgcatgagatctatgcagctgtacctatgagttcactaaggctggtgggaggcgccatcacagcatgtgctccacaaaggagagcatgactgtggcctggccaggaggggatggggaggctgggtgcaagggttcctgaagattccctgaagggagggacttgagctgcgtgtgaagggattaataggactgggtaagagctgcctttcccaagtctgatctatgcgatctgatccttgagatgtttatgggggttctgtgagcaataagtttgagaactgctgcctgtcatatccctgtcttggaaactcacaagtcacgtttacatcttaaaggctctgagaagtcctgaagttaaaacaaacaaacaaaaccacctatttagctatcaactgcttaactatgtttttaactcggagcttcccaaaagtatctggccactggggccctcttcataggtatcaactgtaaggtttcagtggagccagtgcttcgtggaagacattttgggaagcgccaggttagctggagagtaaaggatggcagggactacaggaatgcacagatcacctatttctctgtatgacaatttgcaagtgagattctgccttgttttcctgcacctgaatctggagaacaaagctgaggataaaagatattgagctcctcatttcctaaacttgaggaagttctggtggagggggccagccacctccctgcaggtcttactgaaaagtgtcagtttagaaaaggggccctgccaccaacatagcccccagtgctccctcctcccttccaactcctgggactgtaaggagatgatggaaagaaggtatgtgtgtgggttttgtgtgtgaggtcagcggctttttggggaggggagtgttcacagacacagggagaggcagtgggtgcttctcctccccaaagtcaagggagggattctagaaggatcatttgtaaagctggaggcatctgcaagagtggcgactggtatttcattttcctggagaatgtctcggcccctggacttgctgtcccacttctctgctccctgagtagaggagaagggaatgggagatggtgaagaggggagagctatgaggacgagcttgacgaattttccatcaacccatacagtgactctgaaggttgctgaacttgagtgcattgttgccaccccaccagaaggctgctggtgaggccaggagacccatgcaaattgtgagtggtggaggctgaggaactgggtcgaggtggacacagctggaactgagtggagaggagactctggcagaacccttcaaggactgcattaatgctgagagttggggcacctgccccccagaggccccggtggccagacagggttaggtggatgaacagtagccactaagagaaaaggggctgcagtcctgctcccccgttcctcctgcctgccctggccccaggggagcacgggcggaaaggaggtgcaggtgggaaggaagccttccattctgtgctgcgaccatcctgggtggtggtgatgcagtacatttggggccagttttggggtaaaaaaaattccccaaactcgtgccacatttttagcccaataagacgagttttctttttaaaaatagctcataatgtttttgttatgaatgagatttcttaatggacgtgccttattgtcatctccatgcagcacttctgcatcagccaggcctcgtggtgtagtttaatcttaatgctgtcaactctatcagttttaggttctagtggaaagaggctttcatcaaatcatcctctgttaggacattaatgaatgtagggctgaagtgtcctggaatgacctatggcatgacagaaggtcctgattcactcttagtgtctatgggactttttcccttgggggcccagggtgtgttgcacacacatttttacattcaaaattagattgtatattttacaaataaagacaagagtagataacaacaaacaccatgaactgccatctggcttgggaaggagtccattaacaaacaccatcaacagccccctgtggacgcctgtctcttctcatttcttgttttctcctccccagggttacttgctatcctgaatttggtgctgcaaatgcatatcactgtaatacgctttgagtaggacaacttttccaggcaactatgcccagttaaatagaagagagctcaagataccatttcctgactgagtgtaacataatccctttcctaccagaggtcaggtcaggaggcatccgaggtggttttcctggctaaccttccctttttccatcgtgctggccctgtgaggatttttgtggaaggacagggtcaccaaaacctgtggagttgctgatgtggcagaatcttccagacaagtgactctggatggctcatcacagacttgaagtgccctatgctgacccctgggcatgtggcatctctctcccaggtggtcgaaaggcttgtggcctgcctgtgtcctgaggattcattactcaggtagggcacagcaaggctcaggtatgtgctggaggaggctctccagtgtgctctgtgtctccaggtccctgacagagaacattaagcacccacggagtaagaaaactcggcaagcactgtttttatattgtctcaaacacatttatgatcttttcttgatcagggctcaatttattattgcaacccttccttcttacacacccatagtggaacagaaaacgaattactgagttttccttttatctcaagttctgatactcaaatgtcgtagttgaggtagctaagaggaggcagagtgggtgaaattgcatttctggaagtgttctaggtattacacagaaaaagagatttttatgggagactcagggttaaataaactcattaaccacaacaactgcaggacttcacagagacttcaataggctaatatttattgtgattatcctagagtgaaatataaatgtggtggttgtcaaagtcatttgaccatagaagtttaaaaaatgaagcatcttatgaaaccttgagctcaggacatattttgggattggctggattaaaatatttgattttccttacattttcacttgttatgttagctttctaaatggctgctattggcactgacaaggaatggtgtgtgtgtgtgtgtgtgtgtgtgtgtgtgagagagagagagagagagagagagagagagagagaagagagtaaaaaactggattttttataagctatttaatctatcagtctgtatattatagaaagctcattaaaggcaattttccccctaaagtattctgtttttctagtatccaagtttcctacgaatcttttttgtgccaaatagattaaaagttaattccattaaagaatgtagaactacaggctgggcaccatggctcatgtctgtaatcccagcactttgggaggccgaggtgggcagatcacttgaagtcatgagttcaaaaccatccttggcgaaatcctgtctctactaaaaatacaaaaaatttgccaggtgtggtggtgggcgcctgtaatcccaactactcaggaggctaaggcatgagaatcacttgaaccaggaaggcagaggtttcaatgagctgaaagtgccattggcactccaccctgggtaataaagcaagactctgtccccaaaaataaaaaatttttaaaaagaaagaatgtaggactacaaaaggaagttagaaaaatgcctgtttgtttttccattgcaaccatccccaggggtgtccatctttgaatggactcttttgctaatggtctagggcttttgacagatttgtagttctgtttctgagatgagcaagccatgggaaagtgcctgtaatgactgagggaaggcacaactagcagataaaaagcaaggtgatagaacagaaaagaggggctgggcgccagtgtatattaaagttgggggaattcaagttctctagggcaggaaacacacatcacatttattaggattagaataaaacttggttgccctcttgtgtttgaaatctcagtgacctggcctactgagtgtgtgtgaccttcgaggctgaacaaaagtcataggtccttcatttctctgtgtttatcgtactggttgccatattgattgagattttgcttagtgaattacctactctgatgataatggcagggaataacagctattaaacgtgattttttctacagatatttgaggtttgattcaaaaagaataatcttaaacgttttaagttctttgagaaatcttcgaactgctttccacaatggctgaactaatttggattcccaccagcagtgtataagcattccctttactctacagccttgctagcatctgttattttttgattttttaataatagccatctgactggtgtgagatggtatcctcattgtggtttttatttgcatttctctgataattagtgatgttgagcattttttcacatgtttgtcggttgcttctatgttgtgttttgaaaactgtcagttcatgtccttcattcattttttaatggggttgtttgttttttgcttgttgaattgtttaagttcctcatagattccagatattaggtctttgtcagatgcatagtttgagaatattttcttccactctgtaggttgtctgtttactctgttgatagtttcttttgctgtgaaaaagctctttagtttaattaggtcccacttgtcaattttgcttgtgttgcaattgcttttaaagatgtagccataaatctttgatgtttaccaaggctgatgtcaagaaatgtatttcctagattttcttctaggatttttatagtttgaggtcttacattgaaatatttaatccatattgaattcacttttgtatatggtaaatagatacctcctgtcattttaaacacacacatacacacatgtgtaggtgcgcacacacaagcacacacacacacacacacacacacacacacacacacacacacaaaggtatagggggctaagctccagctgaggggaaaatgggagacattctgatgacttgacaatcaactcagcctctggtagcctacttaatttatttcccccattttccttgtcgtgttttcttcattatttaatgtggacaatgtctaaagtcatttatcattcatgctctttaattaatcagtcaacatttaatggggcggtgttgatggtcccagttaggcctgggaacttggaaggagatttgtcaatgaatgagacaaggtccctgcccttaaaaacctcaccattgagtgggtaaacttgtgattagccacggaggtctttgtggagaaagtgaattttgagtgtgaaataaagtgaggagaataattcaaatattaggaaagtggaagtattggcatctgattttttaaaacggggtccccttttctatattgtaggcattctgtttatgacttcatcttttgtaatcccacctgtcctaatccatagttttaagtagttgggtgcttcctttcactgttgatcaattttcactcgagtttcatgactaaatttgcatttaaagatggctaaatcaatggaactgtgtgagattcacatgttatctcaggacaaaatgcagagtgcaatgttataaaggggctttgaataaaatgcttatatttttgtccttcctttttgtgcattagcgcattacctctgaggaaccaagtttgaaaggaagcatatcactcagatgttgtgcatcctccatgacaactatttagttgtatataaattacatagccgtaataggattgcagacaagcattactggttaagtaatttttttttgaaaaggaggccaaaggagtatatatgttgatgtatccagatgtgatccataataggtgcaaataggaaaaactgtaggagttaaaagcttggggggtctatttctattgtagctgtaacccaaaattggtaaacgtgtagtctttattgttcttgcttggaaattgaatgaaaatttattttgagccaggcttaacatcactgtgatgaacagttaacttatgataaggttctgattaaagatattttggaaaaattttattattttgggttgttggatccttgagtctacccctcgtaccaaaatcccaagcctattcatcttctaaagccttctgatatgtagttaaccctgggacatcttctcaaattttcctaagcctcttcattgttctctcctctgtgctagttcacattttcactgttgcatgttccacagggtaatatttggttaaatctctttcttcctctccaggcttataagggctctcctagcatgtctgcatccccaggaactggctagggctggcactttttcagtacttagttaacatttgttatattaaatctgttactattgtagcatttgaagttcactaactctagcagtatcttggagatctgttatttcatcccacctatggcttcagaagactttttagcagatatctaagatgaggaaaaagtggttcatattaaaataaaatttcccacaagtagagagaaatgtaataagaaagtcttaagctctttcttattctgtgagataggctgttttttgggggagggaagagaggtggtaaactcttggttttcaggaacaggagaaatatgagaaatgcttttaacaaagcctgcctgattcactttggaaggtggcttttcagtggccttttataatctattgctagtggtatttttcccacacaggtttgtgactactggcataaattttacttcttgataatgataacttgggtgacaccattaatattctcttccttgctctgctgaaaacaaatagcatgtcaagtgagatgaatggcaggggttacatgggaaataatgctatttgccatacaagcagtattacaagaatccttgctaactaaatgcttagacaaaacatgcttacagcagttcatgggagaatattcataatcagtttatggcttcatgttgattccagatgtcactgttaatgcaggagtttaatttttcatgttattaaactgaggtgtagagttgaatattcagtcattgctatcaaaggacttagtggggtatatgtgtgtgtgtgtgcacatttgaattgaaacattaactaatgttcccttatggaaaggaacagaataagccccattatgttacacattttcatggcttagaaataaagttatgggccagtggaaccaggcccatagtttcttttgtaatgaaaaagctgtttaatttaattaggtcccccttgtcaatttttgtttttgttgcaattgcttgtgaggacttagccataaatcttggtccaggcttatgttgagaaatgtatttcctaagttttcttctaggatttttatagtttgtggtcttacattgaaatctttgatctatcttaagttcatttttgtttatggtgacctcctgtcattttaaagatataaactaaatacataaactgatgtgatgggctggggaagagcttggctatttgaatgacaggccacctagagtgccatctctgggaaagtacatcttgctttgctgcctgctggctaccaaatgtatcttccaaggggctatggaggccctggtggtcaagtcctaggtgattgtaatgtggacagcttggaagagatgcttggtgacagtcatccttggtgacgtctcagcatcatgagtaggcaaagtaggtttttatagctccaatgatctcaaatttcaaaattgtgcctctgagtggaattcagtgaatatattcataggatattattcaatgttgatcaacataaataaatatgttcttgagcaaggaggtattaattctctgctgcaggattgttcattaatatattatattacatattaatgatacatcatagtagatgtattatatatacatagtatatgtatatagatacataatgtatatgatgtatgatatacaacatatacattaatatattagaatcctgtaaaatagctcttttttttccttaaatttttttgaaggtttttaagaatcattgacctggaagagaatttcgaattctctttgttaggttcacctaatttttacagataagcaatcttcatgtgtgtgcatatatgtatgtgaatgacacagtacattagtgactgaatggagttgaaagttgggtcttcagatgttttgcctaacattctttctactgcttcatactaacctgttccttctttgcccttctctggttgacctgagtcatgtctgggtcatgggaatcctggaaacaaacacttagtgattccagacggtaatttctctctgtccctgaagtggggaatcagtgcaggttgtaccagaaacccaaggggcttgacaggaaagccagctttagatgtgagacatgatgtgtctcttgttcagaatttaatgaccagaagaacttaaatacttgcaaatcatttttctcagttttaatgaaatcacttaatttaattaagtgctatgcagcaggaaagaacgatgcactgtttatagatctctcatctccttaagatcaaaaagggactggaaaatcagtcatgtgcttgctgaattatttacgaattactctgaggtctaatgagatggatgctcgtgttgaaggcaaaccagctgattttccacatcaaattactgaagggcatttcaacatcagaattattaactataagtacacggaattctacataccagggagccaatgaaatgagcgtaactcaggtttgttgtctgtatgggctttcccagcccctctggtgtggaattttgatttgggttcatctgtctggtgttgtctctaagagaatttattagtgaaaggcccagatagagctatcatcaatatttgtttctctggccgaggcctttgggacagaattacgatagacctccagtacacatggaagctaaggcattgacatgtttttatttaatatccacagaagtggactttctattatgttttcctttttgactatcacactgtgtgtctctctagactgatatgtctataagatggagtgtttctctatattgtttccttttacaacttctttgattttactaggatgcggataatattgcctaagctggcatcatttctcttttgctagatttgatactcttacatgtctattcattggtatttcattcctccttaaaattggcaacacaggctgggcacagtggctcacacatgtaatcccagcactttgagaggccaaggtgggcggatcacttgaggccgggagctcgagaccagtctgtccaacatggtgacaccctgtctctactaaaaataaaaaatttagccaggtgtgatggcgtgggcctgtaatcccagctacttgagaggctgaggcacgagaatggcttgaacctgaggggtggaagttacagagagccgagatcatgccactgcactccagcctgggtgacagagtgagaccctgccacacacacaaaaagaaaaaaattgacagtatatttgtaaagtacccatgtctatgtaggactcacaatctgtcttccccggctcttgccacatttccccttaattaatgggggaatttgataacttagaaaaaattctagtacatatgttgtattctatatattggcaaggaatattatttagaaacatgctcaaatgtgtgccccagacttccataagatccccttatggctagtgtggaaacacataatgaacacttgatctgaataaactctttaaagagattgataaaggatgtcagaggaaaggtttgcactgattattaagttggcctttaaatgtattcttttaaggaataaacacctatccttaagctctgaaatttttatcataaatttcctctctcagtgagaagaattgagcaaattctctttagtgactcagaaggcctattatgtatatatccttagaatcagaagcttttcttgaaacacttttctcatggcccttgaggaagagtacaggctcagaacatgcccttggattccttatagccaacacatttttattttatttttgagataagatcttgctctgtcacccaggctggagtgcagtgatatgatcacagcacactgcagtctcaacttcttgggctcaagtgatcctcccacctcagcctcttgggtagctaggactacaggtgcataccaccatgcccagctaatttttctaattttttgtagtgatggggtcccagtatgttgcgcaggctggtctcaaactcctggtctcaagcgataactcccatcttggtctctcaaagtgccatatcctctcactgtccatggtgccacaagttacatttgtatcagataaggttttagtttcagacgttataatccacaatagctcatttaagcacacaaggatttaatcagtggtgtagatagctggccatctcactggcggggtggaaaatgtagatcctgagctgagctctaggaatgactctgttttagttcattctcacactgctataaagaactacctgagactgagtaatttatgaagagaagaggttgaattgactcacaattctgcaggctctacaggaagcctggttgggaaggccttaggaaacttacagtcatggcagaagggcaaaggggaagcaaataccttcacatggcagagtaggaggaaaagagcaaagggggaagcgctacacaatttaaaaacaaccagatcttgtgagaactcattcactgtcacgagaacagcaaggggaaagtctgcccccatgattcaatcacctttcaccagacccctcctccaacacgtggggattacaattcaaatcacatttgtgtggggacatagagccaaaccatatcagactccaaacccacaccccagaaccagattacccaaagtgctgccacatctgccatcaaggaggtggctgccatgccaggatgcccctgcaacagctcctggtctggaatcataccttcctgccaccttctaaacttccacttcttatatggctcctgggggagagtgtaggctcagtgttcatgcccggattctttggctcagattggttgtctggtgccatctgtgttccttcctgcctgtatgtttgtcatgcccttctagctaactggagcacctttatttcttctcttctggttgaattgccatcatctctcccttggcacatagcctaggatgtcttacttctttcaagagtctatcctcagcagcttctggcttcaggaattttcctattctataatgtcctaccatctttattgtgtataccaatcatcgtcttgtaataattttaaaaatttgcatttcttatcttactgactagcttgtaatcccacattgtacacctgtctccatcccctaaacctagcagaatttactagtaatgactgacagatatatttgctgttagtgatacagaaatataatggctaaaagtgcagagtctgatttttcttggaatatcctaacagccctctcaggcattctaaataaatgtttaatggatgctgttgaccacctgacagacagactagagtaccaatcaatgtcttcaagaaagaaaaactcttttcccgttattattttgtgaattatacacagttttttgtcgaaatcatctggtagggaattgagcaaataaatattcttcaaagttttcaaacagatggggtgctacttccaaaaatgtacccagtaggagttcgctgtaaacgaacgccttccttgtgcacaagccttgttggtgatggctgaggaccaagtaatcgtggagacagcaaagagccataaaagaagatttcctggcaaagtaatttgctgtcttttgttttcttttgttttatgtctaatttgttaggcttccctttattggtcttgtaaacttactttgttgttgttgctgtttttttttttttttgttatgaaacagcactttctatgtgtactttgtaggtaggatgttggttttctagatgctcagtaaaaaaagagttatgtggtcaagtacctttgggaaacactacagtccccctcttggtgatcacagtgcacattagcatatgaggagctcagagaagccctgctggaaagaagaaactaaaataattttattcagccttcagagtttcccttccttattagtttggtgacccctcttttccatgttacatttgaatgtcccatagaattattcttaaattgaataccctggagattttgggcaaattaaagttttacacatgcaatttgggtttaaataaactatggtaccatttagaaaatttaaaattggactctttcgaatgtgagtagtaccctcttccatattttttaaaatgtagtttatatgatcatatgttaatcgttctttcatggtgctattgtagtatttggtttgcctttatgtggatgatagccttctaaaaatctttgtaatcatcattctaaaaagttggaagcagaatttcttttatagagatatctgtacttttgaaacaatctacctggagaagtcatgttccttctttatttatttttccctaaaatccctctagctacaaaactggattaatcataatccttagttcacgacacacttgcatcattggaatatgcaaggcctcccttttacttatttgtttataataatgtaataaacatctagaaacctgctgtctaatataaaagctgggaccttaacagtaaagtgacatctaactatatgtgcccttcacaatcccatcttcttgcttccttctaccagggtaccatcaacctggattcagataattcagagttcatcattcctttgcttttctttctatttaattttcttgcatctatgtgttttcatgtaaagcatttaaaatatttagttgtttttcagtttacaaaatggctatatcctgctctatgtaatcttttggaacttaactttttttcacttaatattacagttgtccttcagcatctgtggcagattcgtttcaggacctctgaagatacaaaatccgaggatgctcaagtcccttatataaaataggttgtatctgcatataacctatgcacattctcctgtatactttaaatcatctcgtggctcatgcctgtaatcccagcactttgtgaggccgaggcaggtggatcacctgaggttgggagcttgagaccagcctgaccaacatggagaaaccctgtctctactaaaaagacagaattagctgggtgtggtggcaggtgcctgtaatcccagctacctgggagtctgaggcaggagaatcacttgaacccgggagatggaggttgtggtgagctgagatcacgccattgcactccagcctgggcaacaagagccaaactccatctcaaaaaaaaaaaaaaaatctctagtttacttataaaacctaatacaatggaaatgctatataaatagctgttacactgtattttttatttatatatttttattgttatattgttattttttgctttccagaatatctttgattagaggttggttgaattcatggatatggaaaccagggatatggagggctgactgtacaatatattgttacaattcagtcacaatgctgcaggttgttttagttcatttgttttgactgctgaataatactctgttatatgaatagactacagtttattcatttgctgccctatttatgggcatcatgattgtttctaggattttactgtatgaaagtgatgctatgaacatttttgtacatgtctcctattgtatttcaacaataatttcttatggcatatatctaagaatggaatggcattgctagagtgaaaatattctactttaggagataatatcaaaccatttcctcaaaggttgcactaatttatatgcttaccagaagcatgtaaaagatcctgtggatcgacatctctccaacacttagtattgtgagacttttgatatttttgcctattgaatcatttaaagtgatatctcactgtggccttgacttacattttcctattcactactgattgcgattagcttttcattttcccttccttccttccttccttccttccttccttccttccttccttccctccctccctccctccctccctcccttcttcttctcttttctttttctttctttccctttcttttctttctttctttctttctttctttctttctttctttctttctttctttccttccttccttccttccttccttccttccttccttccttccttcctttcttcagggtcttgctatccctcaggctggagtacagtggcacaatcatagctatttgcagcctcgaacccccaggctgaaagatcctcctgcctcagcctcccaagttatctgggactacaggcatgtaccaccatggatggctaacttttccttccttccttcctccctccctccctcccttccttccttctttccctcctttcatccttccctccctccctcctttcttcctttttctcctcctcctcctcttcttcttcctcctcctcctcctccttcttcctcttcttccccttcttctcctccttctccttctccttcttcttcttcttcttttagagacacagtctcactttgttgcccaggctggtcttaaactcctggtttcaagagatcctctcacctcattctcctaaagtgctcagattacaggtgtgagccactgcaactggctagcttttctttttgcattggccgtatttgtttcctctcctgtgacatgcctgtgtgtgcctagttcctagtttggtactgtgttgtttgtatttttcttattgatgtatagttttttatataatttttaaataatcttagtttattcattcttttattcaattattcatttaatgaccattgattaagccatgttctagggacccgtagtgcataggtacagtctctgtattccagggttcactttctagtacagacaaataaataattacaacataatatgcagaagctctgtccaaggaactctgggaaactgagggagatgccttactctgcttgaaggcaatcctgtttaaagctgaattatattgcattgtatgtgtataccacattttgaaatttatttgccagtggatatttgtgttgtttccacttactggcttttctgaataatgtggctgtgaacactcctgtacacatatcttttctagttccactgcttaattcttttgggcatataccctgaagtgggattgctggatcctatggtaattctgtgtttaattttttgaggaagtgccatactgttttccacagtggctgcaccattttacattcccatcagcaatacacaatttctccacaccctttccaacacttgtagtttttggctgttgttgttttcataatagctatcctaatggggtgaagtggtatctcattatggttttgatttgcatttttccaattgattagtgatgtcgagcatcattttatgtgtctcaagactcttgaaaattatgggtttctggatagaagagtatgcatatgttcattacattttgcataacaactaaggggaaggcatcacaaacccctgaagcccataggaaaacaactgagttaggtttagagcccttcttatgggaggaacactgtggttaggtggctgtctccaagccattgctataaagagaatgaactgcatggttttaacttttgttaagatgtgtgagaaactgactgttctaaattgaaatgcaagtcttttgacacaggagcttttgttcttcatgatgtagtttttggggtgagagacaagagacagaagggaagccagtcctgggaaaatgagtagggctctagttcaatggaagtttgtctaaacaacagagaagggcaaatgttttgtattttaggatgaactcctgtaaggaggtgagagtctgctgccttttttcaaaccaagagctcaagccataccgggaaaggacaagtaatatgtgaattcttctaaggaaaggtccaagcaaggtctaaggcttggaatgtctaagctgagtgaggaaagtgtgggtagcctgaaaacagagatgggaagcccaggcaacggagactggagattcagtcaattagtcaattagtcaagcagctaagtgagtcatggaggaggtctggaagcactggagcaagacagaatactcttcctctccaggatcaatcaaataatcctaggggatgagacaaaaaaccttttcttcagtagtaatagaaccttgatttgggacggccttggtgattgcaggagctggttatctggggaggtggttctcaaccttgggcgtacattataattacctggggagctttgcaaatcccagtggcccagacaggctgcagactcattaaatcagaatctctgtggaggggaggtgggaaccaggcattagtattttctaaagctctccaggtgactctgaaatgcagccaaagtgagaacctctgatttaggggcagacagtcagacagtcattatgccatcctgattggttctcaaataattctgaatgtggttgaaaccaggctactcagtcgaatcatttcttgcatctctctccactcattcaggggaaggctttcttggcctagttgtcaaaagttcctacactgggccggtgcttttcaaacttttatgtgcagacgaaacatctatgggttgtaatgtagtaggtccagcctgataattggcatttctcacaagcactcaggtgatgctgttgctgctgcaccatactgtgagtagcagcattctagactcataaccattgagttgattttacttattgttttattcatcagattattgaaaggtgcttactacctgcaagatactgtgctagttaggtactggggatgtggttatggacacaaaagagacaccacctgccctcaaggatcataaaatctaggagaaaaggcaatgaacctattatttcaccaaaaaattacctaaatacaattagagtaagggccacaaaggaaaagtgtaggctgctatgaaatcctgtgataaggagccttgatctcgttagtaggacatgattacgactcaagggataaagaaagccccaggagacccatgttatgttctgatgctcactctggctgtgggaacccattgacttcttccagttgcactggctatatttagtttattgacccttctttcctgcggtacattttcccatggtggcctcagccattccttggctttatctacccgatctcaacttctgcctctcctctgggctctagctttgggtttctaattattgaggcacatctccaactagtggacatgctagcatctaaaacccaaactattctgggacaaactcttcaccttcttcactaaaccagcacttcttcaatatttctgacagtgtcaccaccattctttaagccagtgaggcaaaattcaacatatccttttttttttttttttgagagagagtcttgctctgtctcctaggctggagtgtaatggagtgatcttggctcactgcaacctctgcttcccaggttcaagcgattctcctgcctcagcctcctgattagctgggattacaggtgtgcaccaccatgctcggctaatttttgtatttttagtagggacggggttttgccatgttggccaggctggtctcaaaatcctgacctcaggtgacccgcctgccttggcctcccaaagtgctgggattacaggtgtgagccatggtgcctggccaacatattcttttaactatatactttactattgtcggcccaaggatacagcacttatttttgatatgggacctgaaatagatgtatattgcatttgcttgattcataggtgactaagttgaataaatagcccactgtagacactcagcaaatgttatttacgtaagtgaggcctggggggaggaggaaagggacctaacactcattttttccatgtattcttgctagatattttatgtatcttcgctcatttattcctcccaatagctttctagaactttattaagtgaggcttgtagagtgtccagagagtgcgtgatagcagcatgtaaacgtagtttttttcagtttcagaaaacatcatgttcttttgctaggcttcataccttgtacatggtaaagtgatctctaaactcttattattataaatatgttttgaaaaataaaagctctttcaaatattagctatgaatttttttcctcaaatttggaaaatgtattaataaactgtatctgatgaaatgaagcttagttactttaaaacaactgtgtctagcctgcttcatgtactcaatacatatgagttccctttcatagattcaaatactctgttttggttttctttgtatttttctgtctttttccttttcgtgttttaccctgggcattttctattgaactattatcttctagatcaccaattctctcttcagctgggtctttttgctgtaacccatctatagcattcttaatttcttctattacattgtatttttcagttctagaatttccatctgactcatatatatgaatatatatgtattatatatattctagttctttggtgaaattgtcacccattttcttaaacatgttaattattttaaagtctatgcctgataatcccaatatctagatcacctgtgaatctgtttctgttgtctgcttttttttcctattggttctatctcttggtatgcccggtaatttttaattgaatgttgggcactgtaaataaaaaatgatggaggctcttgatggtgtattcttcaaccgaggagtgttctttttgagcttctggtaggcagttaaaatttttataatctcaactcaatctccctacccaggtgtagccttttaggagtcccaaatgaaagcccagattagatacccaggtctgtccactttggtaggccctgaactccaattattgtctcttcatcagtggggacagctgtgcttagtttatcatccctctagcagctgttttctcctttgcttccctttctgcttgtgaaatttacacatcagtaaatacctcagtggtggtggtggggagagagtgttgggtggcttctgtgtgtccttactctgggagtttggactttcaggttatggttgtcttggtaacacctagatgccctcaaagagatgttaatgtttaaattttatccagtttttaaaatatgcttatctattattgctggaatgagacatgtattctctgttttttaggctttaaaatttaagtaaggagacttgcttttgattcatcacagtgccccagaaacaggtgtcatttaaacgtgcaggtgagagatcattgtttgccttgcagtctagtctgctccctgctcatcccacaagaacctttgatttttcataactttttgctttgcattctgaggaagaaacttgacaattagtgaattgaatattattgatgttatcagatgtagaatggttgctttatttagcagggaacagggttaaataaatgatagagacaataactcaggaggctcagatccctattttcatcttccagatagtaagaaagaacagtaattcttccacaaaggaagtgaaggccatgatgatttctagtggctttgtcatgctgatgtttttgctatactctgtacttttgaggggttgcaaatttgaaggatgcggtagtgattttttgaagtgtttttcatgttacttttctgcatttatatatatgcatagataatgtgtatgtatataaatgcacatactgtacacagctccttgttttgtgtccccttttctcaaaaaagcattgaatgcaaaaacataagttctcctcagtcacaacctctaagaaaggaaagaaaatttagagccagaagttgttaacctcagcaggagtttatgactgtaagatttcatcaccttactgtcttatctggtatagttacatctgccccaatttatttattttcctgcttccttctctgccagtaatgagcctggaacttgaaggagggcaaggtacattccttgtggtatttatgagggaggagacccatgtctttggaaagtggacgttggcataaatgctttccttcatggggggtgaattttcctacttaagttcactagctagcccgtgcattcgccctcttcctcctctccatgttattcttgttggcgaaagtgtatgatgtactttctgtttctaagatagaaaatatgatgtactttctgtttctaagatagaaagtgtatgatgtactttctgtttctaagatagaaagtgtatgatgtactttctgtttctacgaaacttggagtttacttgtggggaaagtcaaagacacatgaacattgaaatattagtagaaacaattaaatagcaacagaagttaataaaaggcgaagggctaaatggaatgcacagaacctgctgtggaaggtaggtgaggggaggactggaccggagtcatgtggaatgattctgtggacctaagtattgggagttcttgtggatttagagttggcaagagtgggtggacaaacttggcagggagactggtgtgcacagaggcagggggttgggaagaggcaaggtgggccaggggcttgagatgtcggtgtaagagtctaggggctggagtcctgtgggagagaaagctcaaatgccagtagccaggttgagtttgggtattccatatacaaagggggaacatctaagtctttgaggaatataataatgattgattttggaggttaaactggcaggatgcagaaagcgttggaaggggaaatattgtaagcatggagcctgggaggtttcgccacaatcctggtgagtgtggcagggttggtggctgtagaagggaaatgaagaggcagattagagaatagttttgaaagaacactcgtgacttgactgcctatgaggaaagcctactggcattttatgcaagtataaattatgtgcatttgaggtagtccagcataaaactatcgaaaaagatattttatatgagaaatttagaaataaccccaaatcctttcttctcatcggtggcagagtcaactctcatggcacaggttttcacactttgaaaaattgatccattcacacaaaaagtgattctttcagtaagaaaatctgacttttctgttgacagtatgctttataaaggtagagatatgttctcatgaaataaaagtcaccgaatggatattgtgctggcccctagtgaggaggagctgggctgggctggtgtggcgttcctttgggtggtgttctactttcctggtagcattatcattgtttctggctccagaatgtctcctctgtcacctaggtaaacaccagtcaggaaatgtcagatcccatggggtgactgggtgagccactcactcccatgtattactaacctttgttcctgatgagcgtttcctgaactctttgggggcatgtttcacgtgtgtgtcataacagatgttccttgaagaattatgcttgagaaatgctgcaggttttatttccctcaccctgatcttctctgcagctcatagcacacatcagcttatttatggctcttgggcaagtgagcaaactagtttgacgttgttgactccagcttttcctatacttatttgaccatggaccactatttttgcactatgcttactaaaatctgagcggtgagttctggggaaaatagggctgggaatggagtttttcccagtggcatctctggtagcaccctagtcccttcaatgaatgagcaaatgaatgttcacgaggcccttgctctgtgttgtcactatacaaggtgatttgcttgtattctcacattcaaacctcaacaagcctcttaggtggatttaaggatacaaggctcacatgagttaggacacttgcccaaagttacatagttaggaaatgacaggcccagagctggagtccagatcaactccaagtccagtgtgggacgccattgctagctccctggtgagaattttgggttcagtcagtaaaacagcagccatttcatcacagaggtttcatacttcaccacttaaacaaatacaaatgtttctgttggtaaaataaacctcccaggtcttctcagagaccatctagcccattgtggtcagaaaagaagctttgaacaaggtgaatttgcaatgattggtttttagcccttttccagggagaggatgagtccctgttcttcctgatgctctctcttcctttgtgtggagcagtacgggctttcctggacctgctcatccagccttgcctccctgcattcagtttcccaagccggtgtcccacccaccctcactgacctgcaactgtgtcctcatgcccttcccttgtgaatgatagctcaaaatggtgaaagaggaactcagtcatctgctgagcattattgtgtaacgctagatattgatatgagaaaatggagcagagccgtgaagatagttgcctgtttttccagttgcctaatgggttgttagactccctgatagacctaggaatttacaagttgcccagaatgtttcaatttctttttcctgcttcatcttttcagtatttgtgccagtttgaccagcagagcagaaggccagagccgttctctgtgctgtcaaatctgttctgagtgtatcatcttgagggagtacgtgttggtccatcttttattctcaatttcctctcacctgtctagaggcagagggatgtcaccttctcccccctaaaactggagttttatgagacagagttagctgtgagcagttttcctctagtactgaggcaggaccattaaattgttctctactgctgtttgcttctatgttttgttagtaaccattaattagttttaaagatttagaaactaaaacagatgggggaaaatgctccagcttgtgtaagatcacattcttcagtcacttttattgcatgtgaagaaaaaggagaatcaccctaaagtgaaattcacaggttaactccaagtcttctttgaataatccagcctgcaaatattcatttattattcatctgcaatgtgcaaggcaccatgaaacatctttgacatcaaaaatcattgtaccacatcctaccagattagcttgtgtattctattcatgaatccagaccttctgatcgggacccttctgggacatcaaaggtcagcctcagggttaggcacacattggtgtgcagaggattggagagctatcacaaggcaaggggatttttgaggctgacaattcaaatccagtctctggcagcagcatagtcccttaaacaaattaacaaataaacgtttactaggccccctgccctgtgtgccactctgcaagctgatttacatgtgttctctctcaaatctcaaaacaaccctctgagagagatctgaggtaactgaggctcagataagttagggaacttgtctaagcttatatagaaaatggcagggtgaggactgcagcccagatcaacactaagttcagcgtgtaagccatcgccccctctctaatgggaagtttgggttcagttcagtaagtgcagtggggtgaggtccagaaccttctctgggcttttctaaatgtgctccagtggagagggaactatagatggaacttcagagcagctggaatctggggctgtggtgcttaggtgttccctgagtggtagaacctctccttatttaaaaaaaattcttttaaatttgctacatcagtttcttctggaaaactgggaatggttatgagttcatagctcctctcagccagatttaatggtttcaacacaccggatcaactgtactttaaaaagtacaaatgcctgggtcctatccccagagctcttcagcctgggaatctctacttttatacagctctagggaattcaaacgtgcgtaagagtttgagaactagtggaccagcagctgctcctgcgggctttctccccgccccccatcttagttttctgagatctctcattggtgagaagacactggctgcatgagttttaattatgtatgaccacggagcctttacctgacaatagccggtttctaattcccatctgagctttgaattcaggcatttccctctcctccagtttaatgtgttttttttttctctttgtctcaaataaaaaaggacgttgttgctcttatttaattccatgttttccatgaggtggttcatacatccttatcaatgactttgaaaaggtgcaattatttggtcttaagtttctcctccacaagtgagtgatagcctcatgaataagagatgactcctttttctcaccaggcacttccctgttgcccctgtactctctcatttgactttgacattttgacaattcgaattctccctggcaggtgtgaaatcatgaagttccttgacctgtaggtataccatctaatgattgtctacgaagcatctgactttcttagaagtggctttgtcaggttttgagtggatccctactggattgcttttggcatagttgagctctgttagagtgacctgaatagcagaccctcagcagcgaactgctacttaccactctggggataagatttaatttttgtttgcctctgtctttgatttgggtggctttatttgcttggcgatggactgtctccagccagtgtaagtcttcatccctgctctcgtctgtatcttgcctcattttagtttaacctcatttgaatgctttactgtgtagttgggcatttgtagaacatattggggcagcatgcctggattagctttcatggtagctgcctcccagctctgagcattccagtactgatcccttttatctgactggagtgtttggatacattcatttggtcatgatactgtctgggtttcaaggtggagctggaagtcaaagccacggccattatatggctagctggctgctctcatgggcttggccccaaagaggagcttccctgctcttctccaccctcctcccagatcccatgttgccagggctgtctagtcctccccttctccaatagctgagcaaaggtctatggtgataaattgctgtattcttcctttctgttaattgccataaagtttccacggacacatttactaatcctgctattgggaaggatgggagcaacttaccaagcctcaaatattctgaggaatctgggacagtagggatttacatagccagtgacagagctgagaactaaatctagcagtacttgacttgtctgggccataagcctaattaattccttattgttaataaagagaagaaatgaaccgtttaggaacctgaagttctgtccgactcaattgacctcactgtactgctctttgtggtactgctctcatgtgcttccagaatcatttgcttctgaaatctgcccacctgaaattcctggcttggttacttctctccatatagcagggattcatttaacataatttgagaatgcagcttcaggtggttgttttggtttttgtgggtgatatacctagaaaagacatataaatagaatgacttaagtcacatctattttcttatacagataaagtttgtaagaaaggaatggtttctgaccttgaatctatctttcaatttcttacagaaatgatttcaaatgaatataaaacctgtaatttaatttcttatagaattgattcaatcaacttatatatccatatttaatcaattgggcttagctctatgcagtgccactgtagcctgttgtctaacaagatatgttatgaacaatgaactcattttttggctgatgtctttattcccactgattttttttttttagaattttcctaaggatagctgggagtgaggcctaagtatgatccatccctgtctgatgttgtctgatagagaaacagaaaagcttgcatcttaatatccagcaggttcttgaacaattaaaagcatctcatgtttgtaacttttttaaaaaaccatcaacctatttactgtgacagaaattaggaaataggatcttggtggcagcaagatttctataggtaaacaatgcagtattcaaactgcagcgagcttagattggagccctagagctcccagagacagaagacgagatggcagtattttaaggcactagcagatcacggcactgcaaatcctttttgtcttggcaaggcacaaggagacctgcttatgcagctttcaaaggtatgtgtcagtcagctaaaatgtaatcaactcaggtacgcttttatttaacataatgcatgtcatgagttactatgcaatgttttgaattattttcactgaaacaaattagaaggggatgtgaaattcgggagggtctcttttgtagagcttctgaccagtatcttagaggagccttttagttccacttaatggcctttcaagaaaccaaaccagagctctctgttttattatctttccccttagaggaacatttctccaaatccctttggtaataatggttctgaaggtggttcctttcctgaccaaagcacagacaacagccctcaactcctgggcttcctgctgaggtcaagatcaagatgtaattatttaaaattggccagacaatgtattttggtttggataacacctgccattttctccataatttgtaagagaaatctttttaccatgaatgttttctgttatctgcatagcaaatagtttggtggttttccaaaggattaacaaatttgaaattcttttgattgttttaagagcctgctcaatattaagatgcaaggctgacagttcctctgtcagacctaggtctgggtgtctgttacttatttgcagtgagggaaaaggtaggtggagccttgcctgtcgatgtgcaatgtgatatttctagctcctcttgtttatttcggcagaaccagcatctttttgggtgttccagattgtactattttaaacattctcccaaacattcaccatctttgccttacttaccgagcaactggaccttttgtagttaacctcccacacatgacctatacacaggtgcaagaaggtagaaagatgttggaattgccgaattctaaactgctcacagggaatcacagttaaagttcaacatggcagaggtctgttttgaaatgatacacctccaggcactgtttccagctctcattatttgcctgcaccagctggtacacatttccttcacagtcttttctagggtacctagaaaggttggctctgagagagtgacttggtggaatgcagcgtctgttaggcaaacgctcagcacatggcgtttaaatttgctatttttcctgatgaacatactgagattcctttcttagaaatgtgtagcaaaaaaggtgcaactgaaacctgggactttgggcttagcgagatcgtggaactcggctttctagcctttctgtttacagcagaaatttgaaacaaaacagttttcccaccctggtaggcagtctttgttgccagaagaagagcatcatgtctttttgatgtatttgccctaaaccaaaatgcaaattcttgaagaagtaaaatgcagaaaaacctaacccacctctactgatcatggtaatttcctagacaggagttctgcttccctcggggatcccttggtagttacagggaaggctactaggggccagactgaattccagagtcctgatagcaatgcttgtcttctcttattttgttcctttttgttctccccttggactggatgctcatggtgctcatgttgttatggggtattgatgaacccaggtgctgcaggaagcccagctgttggtggatgtgaacggagatgaggaaattccaagtggtaactacttcttgttgaaagtcccagaacagtctaagtagatgggtccttgcaggcacttcctgatttatctaaagagcctaattgtgagttttgttgttgatcagtttaaagctcatgattaagactttctcaaattaaattttttttaatgagttggatacagctccaattgattcaatggaaaataaacaatagtttctagtactttcttccctattatctactgactttaaagctgagagatttaatttcagtgcagcggacgtagctggctggcagggtatagcatgtataccggtcccactgttaggttcttatatgatttttatatcacctttatttctgtgagttatgtgcagatttgccctctccaagaaattcaggcatatagagaatgtaaattgtacagaaatctggaaaaatgaaaaacaaaggaaaatcaaaaggcctggtgtttttctgtactttggagaaggatttgtgtggaatctgtgctggagaaggaagacagaggaaggaaagaagggggactggagttttgttatttatttatttattaacaagatacagggtctctctgtgttgccccaagctggtctcaaactcctgggctcaagtgatcctcctgcctcggcctcccaaaattctgagcttacaggcatgagccactgcacctgcctgggactagagttctgggaagagcactgggaccggagtcaggacacggctgtcgtggacttgctgcgcactcctggggtcatgacagtttcctcatctgtaaaatatggttcatctctgtgttgccctgtgaacctcacatattgttggtgagatcgaatggatgatgtgtgtaaaatacagaatgaagggccagttcagcttaaaagattccctaggagctgctagttccatctcaaagacatctcattaagctgctgcttcttcttcttttttttttttttctttttgagacagagtttctctctgttacccaggctggagtgcagtggtgcaatattggctcactgcaacctcaatctcctgggttcaaacaattctcctgcctcagcctcccgagtcgctgggattacaggtgcacaccaccaagcctggctaatttttttattttttagtagagatcgggtttcgctatgttcgccaggctggtcttgaattcctgacctcaagtggtccgcccaccttggcgtcccaaagtgctgggattacatgtgcaagccactgtgcctggccaggaacctcaattatctttgaccagtttaaatgtccaagtgggagagaccctctcacagtgaatgaaaacccacaacccaggaacgaggtgtccaccagaaagagttgtaggtcattaaattgcctctctgacactgatcatgggtttcgatcagattgaggtgtgtttggggagcttgcttcaactttttgcatcttccctcctcaggaagtgctaagcactgtgattcgggaccttttgggagagtgagaggatttgctgttagagcaaagaggggtgatggtgacccttaccatcgtccaccatctaatgggacagtgcatgagccagaacctagctggcccccttgggatagattgctggttcctgaaccagcagctgtgaccatggatttgggcttatatctggaggcgactgctggtactcatagagaatttggaaggcagtgggtgaatgagtcctgtttgatcaggacactacagcctctgatcagaacacaccgttctttgccagcccagataaagaagctgttaaataattcatgaggcttaccgtcagcattaacaatgggaatgctccaatatgaagttcaaagagtggtggctgctcctggcaaggtgatggcaggaagtctgatggcctttgttgccagtgaataatgatcattcatgcagggggtgtgtacagttagagttgggtacttggacagatatgccaagtgtcagggaaaagctcaggaatcctgaaacaagagggatggcagcagggctgggaggaacaggaggaagaggctgaatcaattcttatgagatgtagtgaccaggaagaggtgtctacatgtcagatgacatgttctctccttgccctgcctggcagaaggtaaaaattcagatgacacactggccatcaatgggcaagggcccaatttctttatggggtgggcagcaggtaagcattctaccagagatgagctgctttgtcaataatgttgcactgattctgaatgtggggtgggcagagcactttctttctaggctggaatagatcttcttggcaagagcaaaatggttattattattactgatatggtttggctgtgtcccacccaaatctcatcttgaattgtagttcccataatccccatgtgttgtgggagggacctggtgggaggtaattgaatcatgggggcgtttacccctatgctactgttctcatgatagtgagtgagttctcgtgagatctgatggctttgtgaggggctttccacccttttactcattcttttttctgccactatgtgaagaaggatgtgtttgcttccccttctgccatgattataagtttcctgaggccttcccagtcctgtggaactgtgagtcaattaaacctctttcctttataaattacccagtctcacatatgtctttattagtagcatgagaatagactaatacaatcattattatcattattattttgagagacagggagaaactattgttttaccaacaaggaatcctgaatatttcagtatgtaatgttaacaacatcttgagcaagatagaaaaatcctcagaacaaaatgcttgctgattggctctgagtccccccattctggtattctaatttcctttccttctctttgctatcagagaatccccagaacatcatggtgcaatttttgcatccttcttttgcaatctagcaagattagggtatttctgtggcttgccaaccaccaaggagacatgaccatgtgtttggattatataatactgagagattattattattttggggataatattttttaatgaagtcaattttatggccataaatgctgaagtagtgttgttccctattgagggaaaacaaaaaattatcatccctgtttctgaaacataggtgtgccaggacagttcattgagatattaatgaataaacatgtggtcttcttctattccctattttcctctctgatctgattagggaggcagccgaaattgctggaagatggcagctcttcctttcttctgtgaaaggtgaaactcttagaaagagatatctccaagtgttcctgatggatggaaataagagcctttgagatgcagaggggagtaagaggagggagattccaggaacctggaaagcggttaccatggaaacaatgtactagggatgtggtggtaccatggaggagatggcaccatagtaattccactgaggatggatctaggaatatggactcccagccttgccacagagcatgggaccctaaaggtatcagaaccactggacctgagatgccagctgggaaaatgggcatcttagctgtaatcattgaggactagaggataagacccccaggggcctccttgatgcttagatgcttcagagaccgtaggaccttggcataaccttggccaaggtacagggcatgtatatgcatcagtaataactgagatcaaatttccttccagcccggtggtatgggggaccagagccagatttatatggcaaaaatgagaactgttgtatttcttgcacacctgagtttatctgctaagtagtcatggataggcttatggttcacctaatctaacttccttatttcacaaatgaagacagacaaacccaggactgtgtaacttttgcaggtttttcaacttctccaggtcttttattcaggctctgtaaaatgaagtgagttggctaatagtattcctaagagaatctttgagaaattgctgccaggcattggtggcttactcctgtaattccagcactttgggagtctgaggtggttggataacttgaagtcaggagtttgagaccagactgtccaacatggcgaaacccatctctactaaaaatacaaaaattagctgggtgtggtggcaggtgcctgtaatcccagttacttgggaggctgaggcaggagaattgcttgaaccctgaagcagaggttgcaatgagctgagatcgtgccactgcgctccagcatggatgacagagtgagactccatctcaaaaaaaaaaaaaaaaaaaaaaaaaaaaaaaaaaaaaaaaagggaaattcctgaaggaattaagatttttgctgcttttaaatgccttgaacttccctgaataccacaaggccttttcatatgctgctttttcttggacctcccaccccacaaacccagttcatcctttaggactcagccaaatgtcatcttccctgggaagccttccctgataccctgtgttccctcaagactggcatcctgggtttatcccatgtgttagttttacactgatgctgtagcaaattgccataaacttagtggcttgaaacttagtgggtctcagtgggctaaaaatcacagtgtcaatagggctgtgttccttctggaagctctaggggagaacctcttatcttttccagcttctagaggttacttgcattccttggcttgtggcccctgcctccatcttcaaagccagcatcttcaaattttccctctgattgtgaactcctctgttcccttcttccacgtctaaggaccctgtgattactttgggcctatgtgtatgatccatggtaattgggttagtaactttaatcccagctgcaactttccttctcctttgggcattcatgagttgcagggataaggatatggccatctttggggccattgctcttcctctgaccctattggtgcacttgtcacactgtgtggtaagtgcctctcaccctggctgtccccacctctacactccaagagctcaggggctgtttttttttttcctgctgcctcctcagaaatgtgtacagatgtgtcaaactagaagctctaagatgatggtgtgatctgtattgtataataaatagatttaaattagttactaacatttaaaaattgggatactttgcttatatatttttaagtggaagaataaacaaaaaaatctaataaagttacccatgaagggcaagggaaaaacagatggaaaggatggaaattagtcttttctgaatgtacctttttggtatatttgactttgaaaccatgtacatgttttacatcattataaaacaaagttaagttaaaatgagacaaaatgaaaacggatcccttattcaatgaaaataaaaagttcccatttttaaatgaaaattatggaactggacacaggacacaagggatcttgctccgcttggccctgtacccccgacacattaactgcttgggacctatgggcatttgcactaggatctgggcttgtaataggaacccagtgaatgtatgtgttgaataacttgatggtgaacttaaagtatagatgataggtgggttaaattgggagagggttgagaacagaagatgagcttggggagagggattagtattagattggcagagaacatctggccaggtggcatcagagtaccatgtcaggagatgtgctgttttagctgggatcttgaaagcagggcccaagaagaagccttatgtgcaggtgatttatttgggaggtgattccaggaagcaagagtgagggagtggggatactgaggcagggaaagagtagaactgaggcagggaaggagtaaggatgctgttatggactagatgtttgtgtccccagcaaactgatatgttgagtcataactcctcaatgtggagcctctaaggaagtaattaaggttaaatgaggtcctgagggtggggccctgcccgatggaattaatgtccgcataagaagagacaccagagagcttgtcctctttctcttctccagtgcgcatgcactgaggcaaggctatgtgaggacagagtgagaaggcagctgtctgcaagacaaccgagggccctggccaggcccccatcctactggctccttgaccctggactcctagtctccagaactgtgagaaagtaaatttctgctgtttgagccacccagtctgtcatattttgttatggcagcctgagccgactaagacggatgcatggttgaggtcactgctgtgggccatggcagttcaacccagctgacttctgaggaggcttcagaattgtcagccctgaggccaggaggccagggcagcgtttgccatcagtttctctcccctgttggttgagtgtgggccctgagagtgttcattctcctgcacttgtgaactgtgcatgtgcacaggcctaggcatctctcagtagcctctgtggtcttggggacgcccctggggagaaccgaggctgcgaggtacatgtaagatattatcatcttgaagtgagctgaaacctccacacaatggtccacccagacatggctgaaattaggggtgaggctgagagcatgtgagtcatggtagcagatgtgtctgcttgtggatacctgctccaggtggggagtcagaattcaggaggccgggctaggaagttggaagtgaacaagccagatgcttggtgggacgttaaggccaggtcaaatggccagagttctagggagtgtcagtggagttaacagccacacaggctcttaagtgatggacaaatggaatctattgattctctacaagactcaatttcagtttttcctcttcctgcctcttgcatgatgtcacacagccttttactgttgttacttacatgagtaagatcaacttccaggagttttaatttttctctctgtttactctattgggtgggtccaattaatgaacaataaaataacttgatgaacaggtggcagaaaggtagctgagtataacaaaatgtctagaataataaacatgtattaagcaaatgagtaattaattcataagtagaaaatggtgcttggccaactgactaccttcttattttaggtcttcagttttgtttctttaattttttttctgcaccaagtcccttttttcatttagtgtctgttttttggctgatggaatttctgtatttgataaaaatgaccattatgcctgtatcttgatttggatattttctgatgacttgcattttgctggcttttgagtttgtagatgtactcttcttgttttctgaatctccttgcttttcatttctgtggatgtacacctctgcagggcatccttaggaccagtccgcctgtcacaggctttgtagctgatgatgtggaaggaagctcatttagtggaggttttctcttcggctttatggtaggtgtaattagacatgcaatacccagtaccattgcaagggtcttgagctgagtaaatttcttgtcccactgattttaatcctcatcggccttattgataccagatttcagattgttttgtctcatccctctcagtcatggtatgtgatccaacagatatgcctgtcaatggactctttggccagatcctggggttacagtacctttacttaatgcttgtagaaatctctgttctttggcttcagtggttactgaccttgtgtccagctatagctttgtgtccagcaaatgcatgttagaatgaaggtgagcgaagcccctgtccattttcattcttggaaaagccacttatcatctattaatcagtagttccagtggtgtctttcatctgggaaggaccttaaaaatccacttcaatcttttcattttaatagacaaggagccagtggccaaggggctcaagcaacttgacaggattcacttgagccaagccctgtttcagaatctaggtgacccagctcctgttttttttttttttttttttttgagaggtaatatgctcattttatttttttcatggttacttattttatttactttttcagctttattgaggtatacttgaggaataacaattatatatgtttgaagtgtacaatgtgatgttttgatatatgtatacatggtgaagtgattaccacaataaagataacatactcatcatctcacatagttacaattttttgtggtgagaacactcaagatcaggtcttaggaaatttcaagaatacagttagccctccatacccatgggttctgcatctgtggagccaaccaaccacggataaaaaatactcagaaaaaaattgcctttgtggtgaacagtacagacttttttccttgtcattatttcctaaacaatgctgtataacaactatttacatagcatttacattatattaagcactataaggaatctagagatgttttaaagtctgtgtgaggatgtccacaaattatatgaaaatactatgccatcctatgtcaggtacatgaacagtcatggatcttggtatccacaggatccacccccactgttgatgtgaaggacaggacaatcatggggtcaatgagggtgtgtgtgacattgagaagaaccactttcttttacccttaatttgcccttcatcttcctttcttcatctttttcaccagttaagtccaggaatgctatacagcctaaatcagccactcatctatagtgttgatatttctgagtagttgaacttcagaccagtgctggatggttctctctgtatgtgagaacacgtcctgagtttttataaagtgtgtatgcgtgtcaacaatctgaattagtttatataagaggttgggcaatattgtaagtagatatttgtctttattgcccagatgaagctaataaacctctttatggtatagtgtcatgccttgagttttatagcaccttccttttaacaaactcggtgtttcattctttaagcttattatatctcttagtttgcgttgtttttattaatttttttttgagacaggatcttactgtgatgcccaggctggagtgtggtggcatgatcacagcccactgcagcctcgaccttctgggtccaagcaatcctcccacctcagcctctcgagtagctgggactacaggtatatgccaccatgcccagctaatttttgtattttttgtagagacagggtcttgccattttgcccaggttggtctcaaacttctgagctcaggctatctgcccaccttggcctcccaaagtgctgggattacaggtgtgagccactgtgcccggcctgtattgttttaagttacacttattccttttaaaattcagaatttgttaagcatttaaaacaaattcataaattaaaacctccttgagataccatttaccatgtagtttgatgaacataatacatggtgcattacattggcaaaagcagtggggaaaaagatgcttttataaatgtctggtgggagttaaattgtgtaacttctattacacttttgtaatagctaccaaaatatgttatttctatctacctctctctctctgactcaacagttccatttctaggttttgtgttgtggatattcttgaacattgtgaaatgtatacagggaggcttcacagcagcactgtttgtttcaaatgatttgaaaacaacctctccataaacgaaataggctaaatcaagcatggcacacctatacaatggatgcggccattaaaaagaacaaggcagctcatatgcatcaatataaaaaggtctataaactatactatcaaatgaaaatagcaagatgctaccatttatattaaaaagaggacaaaatattaatatattcatggttgcttgtctatgtggaatatttctggatatatacataagaagttacattggttacctatgggcaggttactactgggtggcttgtgggtgagggcaggaggaggcttactttccatggtaaacctttttgtatattttgcagcattcaaaaattctaatttaaagtttattttagaaaaatgcccccatgtatacaagtgatttccaagttcctccttcaatatttttaatgattatggaacacactgaacttcttttttattattctagctgtgaactctatctgctgtctacatgcacatatataatctatgcaatatttaaatttatatcctttatatgtcagttgggtggtgagtaaaagaaaaatatatttttatcagcaaacttggtaaattgttgaggtttctgatatagtcagaggtagttgcttatcacaacattaggtaagtttttaaaaacacctatttaaaacacactgatgtatatatatattagtctgttttcatgctgctgataaagacatatccaagactgggaagaaaaagaggtttaattgggcttatagttccacatggctggggaggcctcagaatcattgcgggaggcaaaaggcacttcttacatggcagtggcaagagaaaaaatgaggaagaagcaaaagtggcaacccctgataagcccatcagagcacgtgagacttaattcactatcatgagaatggcacgggaaagaccagcccccatgattcaattacctccccctgggtacctcccacaacatgtgggaattctgggagatacaattcaagttgagatttgggaggggacacagccaaaccatatcaatatacaatttaaaaacatgtcaagccacatattgcttagggatatgtggctatgtagtaaaagtataaagaagtgcacagacctaatacacattaattcagtggggtcaaggtgggaagaaataggatatggaattcaagagggatgggtacatgattgtttgttacatttttctttatatcttcttgcatatttcaaacattgcataattaaaaagtaagtgttactaacttgtcagatataggcagagttcttttaacaaactcggtatttctttctttaggcttcttatatctcttagcttgtattgtttttattaatttttttttgagacaggatcttactgtgatgcctaagcctgagtatggtggcatgataaaaagatgcagaaacaatataggcatcaatgatctgtattttccttgttctctgtcacattacactagtacctaaaacagagcctgacagagggtgggccttaaaaaatgtttgcaaagatgaatagacaggcataaaagccctgcaagctactgaagtggtggctggtgggttgtgtgatgttccagtgtgccatcttgtataatgggaccccaggagaagaaggggacatacctgatgatgtctacaacctttctggtgggtaagaaaaaagaacttgggaatttctcaacaaccagaaataaacatgaaatatagagatgtgattgggtctataataaaattcagatgctacctgtactccagaatacatcgtttgcaaaaggccttttcatggctctcagtaaggctggtattttgtcttcatacgtcacactcaatggccccctttgtgaatatatttggttaagatggcaaatgtgggtgtaactcttgattccccttagcattgctgttgctgcctttcatgtatctgtgcccagccaagagccaggttgtatgggagtgattggaatgactggcatttactgctgcccactggcagtggtagaataaatcacctttgtttcttaggatagccatcagccatttggtttctatatttgtttaatatttagacatagaatgaaaggagtgtgggaaaataattaacattgtaatcctacaatagctacaaaagatgtactaatatgtaatgacaataaatgaataacatgctattattgttagttaccccaccatatttagcaagctagagcagtgctgttgaataaaattataacataagccacatacataatttaatattttcttgtagctacattaagacattaaaagagctgggcgcggtggctcacacctgtaatcccagcactttagtaggccgaggcagatggatcacgaggtcaggagatcgagaccatcctggctaacacggcaaaaccccgtctctactaaaaatacaaaaaattagccaggcgtggtggcagacgcctgtagtcccagctacttgggaggctgaggcaagagaatggcgtgaacctgggaggcagagcttgcagtgagccaagatcatgccactgcactctagcctgtgtgacaaagtgagactccatctcaaaaaaaaaaaaaaaaaaaaaattaaaacaaacaggaaacaggtggaaattaatttgaattaacccaatctaaaaaattttcattttaatacataaccaatgttaaaaaattatgaatgagattttatattctttttatctggactaagtctttgaaattctgtgcatactttatatcttcagtaggatgctaaattttcattagaaatactttatctgtatctagattttacaaaatttacagttgaaaaagtaggttaacatatcccgtatccaaactattccatcatatgtgatagtggctaccctattggacagggcagagttagaacttatccataaatttctatgttagattttttttaatgattctgagcatctgtttgtcagtatgcttttgaggagatataataaagcgtagacatagtcttgcacttgagaaccttataaactaatataacaaatgtatatcttgcactgtgtgaagttagttttttgaatgagtgtttcagcccttttgatggacttaattttgagaactcaaattaagatctgagatttaaggtaataaaattttaggccaggtgcagtggcttacgcctgtaatcccagcactttgggaggttgaggcaggcagatcacttgaggccaggagtttgagaccagcctgaccaacatggcgaaaccccgtgtctactaaacaatacaaaaatttaccaggtgtggtggtgcatgactgtaatcccagctactcaagaggctgaggcaagagaatcgcttgaacctgagaggcggaggctgcagtgagccgagattgcaccactgcactccagcctgggtgacagggcgagactctgtctcaaaaaaaaaaaaaaaaaaaaaaaaggcaataaaaatttggataattctttcacaagtattcttaagctctggttaaaagatctaagaagtaggccgggcgtggtggctcacgcctgtaatcctagcactttgggaggccgagacgggcggatcatgaggtcaggagatggagaccatcctggctaacacggtgaaaccccgtctctactaaaaatacaaaaaaattagctgggtgcggtggtgggcgcctgtagtcccagctgcttgggaggctgaggcaggagaatggcgtgaacccgggaggcggtgcttgcagtgagccgagatcgcaccactgcactccagcctgggcgacggagcgagactccgtctcaaaaaaaacaacaacaacaaaaaaaacaactcaagcattagttcatacggggatgagtaatttaattactgaacataaaccaggaggatttgaaattagaccaactaattttttttcttttttacgtcaggtgatgctgtgcctacgttgtaacaaggtttgagggaggcacacctcacacatgggcttgagcacccaatcaccatgcttgtgaactacaaagagatcgggccaactcattctgagtatagatttggttccagattttgacagctcccatatcacacaggaggatatcaatagtgtgtacatacggagcgtctaccgcatcaaagattgagttagctagaagagaactgttgggggaaggccacagttatttgttcccccatcagcatggctgctggaaagttctaagagcccagaaaagggggcaaggattgatagcctgccagtctccctctgttgacatcttgttaagaggaatcaagtcctgggacttggggtttatataggaaatggaattagttcttcctcttaaactcacaaaccaccaagtatctactggggatccttgacagttatgaataatttacaaatgtctattatgaactattaaattattaaatagttattagttataatagttataaattgttaaattgttagattattaatagttgttaataattcataagcagttttatctattaaggtgagaggcagagaagcgaccaagttctgatttgagtgctcttggctgggactggtcctctggccagctcattttgggtgagtgaggggataacactcttctcacctctcccctgacagctcccacttcactttcttgcctggtcataccttcagcctgatgtcacagcacatcctgtaacaagctagccacgggtattctgtgaaaaattcatgccagcatccctgtcaggctatttggccccaggctaaactgcagtgtggcagtgtcacctgaacagtgttttgcagacaatcgcctgggtaggtaatcattgctgcccattaaaataaagacggaatgggagggactagtcagtacttccgtgtgtgtgtgtgtgtgtgtgtgtgtgtgtgatgtatgtatttgtgtgcttgtgtgtgtgtgtgtgtggagtggggcagtttaacatttctatctattgctcttcttctttttttaaatttacctgctcccagcactgatatctattgctctgaaaagaaattaaaagctaccttttctaataagtacatgtgtagtatggaaaatacaatctaacctcgcttaatcccgcacctcagcataatcactgaagtagcatatttcccttcagtgtttaaaaactctttatgaaaaactctttatgaaaaattccactgacttggctaaaaaaaggtgtattttgtttttgtcataaaaacaaattgctcgtgatttagggaactcgtgttcgttgctctcgggttgaaggtaattttgcagtggattgctgatgcctcagagcacctatacatacttcacatttggggacttattaaacggacattcattaaagcctcatttcctacattttatccattcagaaagctcacccttcctccaatttggaatagtgtgtttctcacactgctccgactttgagttactccgtgagtgcaggccctcggtgtccccgctgctactctggcacttggcttgcagcacggtatttttctagagagtttaatggttttgttttccctgcccagcctttgtggttgcccatcaatacctggtgcgagtggcatggagactccagccctgccatcttcctggagtcagagccttccctttccagggagctgagggtctttgttccaggctgccacgtggggactctgctattccaaagaggaggaggaagaaggctgataatatgcattttgcctttcactgccttttgggcaacagtcttggaatgaaaacactaaaaacagatgtaaaaactgagggtgggagatatacctaatgctagatgacacattagtgggtgcagcacaccagcatggcacatgtatacatatgtaactaacctgcacaatgtgcacatgtaccctaaaacttagagtataataaaaaaaaaaaaaaaaaaaaaaactgagggtgacagttgggatctcattaacttagtggctgtcacaatatatccaggaaagaggcttgtgtgcatgcggctgtgtctgagaagctggaactgcatgtgtgtgtgtgtgtctgtgtgtgtgtgtgtgtgcgcgcacgggtgcacacacacacatgcctgtgctcctggaggtggggcaggcattccaggctttgccgtctaattttcttgcttaagctttaaaaaactgtcagttgggtggcgcaggcttggttatttttctttatgggtgcttctgtaaatatctttaaatttcagcttaggctttttagaggggcattcaatgtgaagaataaacagattatggctttgcctttttaaaaaaaaagttattgaggcatgaaatgcacccagttaagtgcttcaagtgcactctcttaatcgaacagctggatcaacatgagagtatttccatacattacagggtacagtgcctcaatttgatcattttgaaaatacatgagtttccaatcttaacatactgcccttccttaccctcagtccaactttcaattcctgaatcttcataggagcttctgagatcaagtccatcacttggttataatgtccaatcaacaaacatgagtctagagctgagatacctctgcatctgttttcacctctggcaaagctgagcttggcaaactgtgcaatgccacagacatcagaagggcctgagcaggggtgcatctgtggcctgaaggttctcagagtgggagccagaggcctgggttctggacccagctctgtcactagcctgcagaaacctcactgtgatttctgaagtcctgtcctccaatttgatggcattatgattctggtgaaaatatggctcttcatgtaaatacaataaaccccatgacctcagagttcaaccaggaagcttatgtgatcccaggaccagaccagatgtccttcttctaaaagatattttacagctgttcactggcctcattctgtcttcccggaggcagtgggcaggcctctcagcagaccagatggaagctcgtagagctgttcgtgagttctgtgttaggttttcaaaattgtaaaatgtggataataacattactttctccatgggctgttggtgcgacataccggagtccagactggtggggcaatcattttgatttggtggtcctctcttgccttcctttgttgttaaatattttgaatatcatccctggcccctgagagcctccagtgagacccctaggacatcccctccgtgaatgctgttttgcttcctgatctccttgccctctgcaatggctcagcaagctgtccactctcaaacacagcatgtttcatacagataagacccccaaggcccattttgctacatcacagagagctgagcaaggccacaggctgaaggaggcctgggaatttgcaatgaggttgctgtctaggtatgctctgacttgacttcttccaaccgtaacaataaagctgaaaagcattcgaagaggtaactgttggtcactgctctccccactgctgccaaggtaacgtgaaatttgtggaggctagaggctttgaaggtttggctagcttaaatcatcttagcgaaagcagagtggaagcttgaaaatcagatctgctttcaagcatttttttttcccgctctgtggtcttagggaggggaatggagagtggctcagaggccttgattttcctgagtaattgtttctcttctgagatacagtggagctttggaaaccgagctggtgctgacttgctacctgtattggccacccctggaagactgcaaatgcacctctattttccctccctaccttgccaaggctaccacttgcccggtgccacctgaggccttaccgctgctctgctgggttaggctctgctgccacggaactatattcaacctcagcagtggggtagtcctcatggaatcatagctgtatgatgccatgatagggttgggatgggccatatgtgctgttgctcttcacctctatttagatagggccaggagtgagacaatagggagcggtggggactgtggcagaggtgggtatgcccctcatcaaatattataatattttgaagtaggtaatatactgtttcttagagaagtgtatttaagaatgcctataggaagattagaaaggcatgaaggatgcagcaggggaagtaatgttgaaattggactctcatacactgaagcaccaactttaggtactcaaactaacaaagaaaagaagagaagcaaaacagatctacatctggcattttatttagtttggggcatggagcacttgtgacttccagtagagtcttaagagaaaaagacacatttatggagcacctgttatgtgccagataatgcattggcattttaataaataatatctcatttaattctcacagcaatcctgtgaactgggtctcttactcttattttttaaattaagaaacttgggcacaatgaggacaaatattttatttgaggtgactcggccagaacatggtggtgttaggatttgacatcctgacttctgtcttttagttcaggagctcctaccctgtgctggaaaatctattgctggattttctggcctctgtgccctctctggtctcctccattgccgatggtaacaagtgccctccctgggcctgtctgcctgctctgggctgacccttgacctcctgtgcttcaggctgtcatcggtggccgggtcgctgccaattctgactgcaggtcccctcactgcccccatgacagaactcacctgagccatcacagtgcctcgggcctacggctggcccgcatccagcctggctcctctgaaaggtctgattgcctattgtgtctcatcgaggtttggatttatctctggttggtgctggctagggcccctgtccccaacagggccacactggatgggagggcagtttccctgctgtcattgcaggagctcctcaaacatggggacttagaaaccctgatctggccgggcgcggtggctcacgcctgtaatcccagcactttgggaggccgaggtgggcagatcacaaggtcaggagtgtgagaccagcctagccaacatgatgaaaccctgtctctactaaaaatacaaaaaattagctgtgcgtggtggcgcatgcctgtaatcccagctactcgggaggctgaggcaggagaatcgcttgaaccagggaggcagagcttgcagtgagccgagatggcgccactgcagcccagcctgggtgacaaggcaagactctgtctcaaacaaaacaaaacaaaacaaaacaaaacaaaacaaaacaaaacaaaacaaaaaccctgatctgctgtctgtgaggaggagggctttgaggttgatgagtggtgtgggaggaaggtgtaatttgttgttgagagttgcattttcttctcatttcacatatactcgattataaataaattagaacatttagaatccgtaaatttagcaccccatactcaagtgccccagaaacactttcatatatgcagagtaaaggaagaacaattggtgtaaagtacaagaaaaagactttcctacttggcaaatcttttcttttctacttggcaaatctcatcttttcttccgtgtggacgtcgcagcagacagaggtttcctttttttttttttttttttttgagaccgagtcttgctctgtcgcccaggctggagtgcagtggcgcgatctcggctcactgcaagctctgcctccccgtttcacgccattctcctgcctcagcctcccgagtagctgggactacaggcgcccgccaccgcgcccggctaattttttgtatttttagtagagacggggtttcaccgtgttagccaggatggtcttgatttcctgaccttgtgatccgcccgcctcggcctccgaaagtgctgggattacatgcgtgagccaccgcgcccggccaacagaggttttcattttcgagtgtcagttatagttttgtttggagacctgttagggttacccaaaggcagactgtgtggtatgaaggccgctgggctctggcagaagggctgctggaatcagatctcacacacttcatctcccggcaagctcgaggccgggggctggcccggctgttctttcttgctgttgtgctgcatacacacgatatggatacggctcagattggccctagtgaccatgttctaatggaagggatctgtgtttttgtcttccctctgccactgaatagttgtgtactcttgggacaagtgactaacctctctgagccacagttctcatatttatggagtaaggagaataacagaaacatacagggtcattctgaagattaaatgagataatatctgaagagagctccttgtgaactctgaaatgctgtgaagtgctggctactatacacagcaaaccctcaccacagactcttaggctttggtttgggtgtttattccaaattgtgaagtaggtagagtgaattctgttctcaccccttttcttatatcaagtagccttttcacttacaagcttgcttgtctcagaaaagcaattcctcaaagtgcaaacattcctaatcctcaaacattccttaaatctttcatcaaactcaattgtcctttctcttagtgtctattttcctaaatccacacctgtgcttagctatgtatgattaaacaagatcataataaacttatttgcaaggataaataaggaggcatccttcctaagtatatttgctttactcctaagaataggagaaagccagttttgctagatgaatgaatttaaaatgtgagctgtcatgcagctgagactagagtgtggtgggaaaaagagaggccccttccggtgccctttggagcatatcttctggatggcatgcctctggtgtggctgctgtcagccagcagtatcttatctatctgtctatctatctatctatctatctatctatctatctatctatttatttttgagatagggtctagctctgtcacccaggctggagtgcagtggtgtgatctcggctcactgcaacctccgcctcctgggttcaagcacctgccaccacacccagctaatttttgtatttttagtagagacggggtttcaccatgttggctaggctagtcttgaactcctgacttcaagtgatctgacctctttggcctcccaaagcattgggattacaggcgtgagccactgtgctcagccttattaatttatatctaatagattttacacaggatttgagttggctaataggtggtgccgagtaaagtcttaagaaatagtataaagtaagaataagggtaaatataaagtaaatgaaatgttgagactacgggaaagagccaaccacaggtattgaggctgtatgacttggcatagttgttgcaggatcatgcatttggctttgaacttcctggaagcaacttgaaaagggaaatgtaatttatccatgagagagaaaatccatcagttcccgtggaagacaaggatttctcagtcttaactccaacttggggctgcacaagaaaataggtgatggaaacaacagcaccctcaagagcatcttacagcaaaggcagaagcaaatttttagcctgttgttgcttttcaggttcttgcttaaagctgagggcataggacctctagaacctgatgttagtggtagcctggtaggtgatcactttgggtcaatgtgattcaagtacacagcattctgtggccattttcgtcctgttttgggacagggagaactaacttcacttctgcagagccaaaggaaacatgaaatttgaaggaaactccgaagatagcacacatgctttctattttgcctggaaagatttgaagaggaggagacttagcttattcctggcatgaattttccaaggcaatctgggcagccccgactgtctgagataatcaccagccattactagggatgtgggaaccaagccagacctaagcttggttttatgtgtaaaaatggccactttgggaaagggcggggtcagggaggtcattggctggtcaggaggagcttggctgggcctggctctgagcccaggtctagcccgcatctcccatgtgaacaggtctaatggccctgcttctgggtctccctgtcttgtgctggagtcatgcttgtcatcacaggcccactgtggctacagttgcctgttcacaatgttgaaggaacatcaccagcactaagtgtgaagtagatgttttttctgtgcattaattgtaacatttgaacatgttaaaaaggaagcaaaaataaaagaaatataattgtagtgactgaatgacccttgtttattctggaagcaatacatgcaaatattgaaaaaaattaaaaagagcacagtggtctccttccatgattttgaaaaatatctagtgtttcctgcttgccaaagaaacatactctcaccacaatgagatgccatctcacaccagttggaatggcgatcattaaaaagtcaggaaacaacaggtgctggagaggatgtggagaaataggagcgcttttacactgttggtgggagtgtagactgcttcaacaattgtgggggacagtgtggcgattcctcgaggatctggaactagaaataccatctgacccagcgatcccattactgggtatatacccaaaggattataaatcatgctactataaagacacatgcacatgtatgtttattgcggcactattcacaatagcaaagacttggaaccaacccaaatgtccatcaatgacagactggattaagaaaatatggcacatatgcaccatggaatgctatgcagccataaaaaaggatgagttcatgtcctttgtagcgacatgggtgaagctggaaaccatcattctgagcaaactatcgcaaggatggaaaaccaaacaccgcatgttctcactcataggtgggaattgaacaatgagaacacttcgatacagggcggggtacatcacatactggggcctgttgtggagtgggggcgtaggggagggatagcattaggagaaatacctaatgtaaatgacaagttaatgggtgctgcaaaccaacatggcacatgtatgcatatgtaacaaacctgcacattgtgcacatgtatagaacttaaagtataataaaaaaagaaacatactctcaccagatgcaatacaaaaaaagtgaaagataataagaatcatttatgattccccatacagtgatattcattgctaacatttccttccactatttctatatttatatctatacatacacatctaaggccatatgtatttttatgttgacattcatatctccatagattaatgaaaagtttagtatgaacataagacataagtatagattagtatgaacataagacatgttgcagaagtctttttatgactactgaagacttttggtttagaaggaatatcaaagcatttggaaaaatgtggaaatgtgaaaggaacagaatgagatggggaggagaggggagatgaaagggaggtaactcacacaggatgtatgtggactctgtgtgagggactgtgctgctgtttcaccctgcacgctgtgattactattaccccaagaggtggtctggggttgggggtggggtggtcgtggagggggaatgtaccccccctccactgaggattcagtgctcaggctcaggagtcagacagatccaattttatacgttggctttcctccctattagtttagaaccttatttttctcctgtgtaagttccatgtgtaatcccagcactttgggaggccgaggtgggtggatcacttgaggtcaggagttggagaccagcctggccaacatggtgaaaccccgtctctactaaaaatacaaaaattagccaggtgtgctggtgtacacctgtagtcccagttacttgggaggctgaggcaggagaattgcttgaacccaggaggtggaggctgcagtgagctgagatcgcaccactgcactccagcctgggcaacagaacaagactctgtctcaaaaaaaaaaaaaaaaaaaaagatctgtataaaccaccctttatgtggtttttgtaaggacttaaagattgaatgtacacaaagctcttacatctggcactagtagactctcaccagtggtagctgttattgtcagtgttattccaaatctgagcaaactgagtctcagagagggtgacgcatctaagatcactcggctgataagtggtaaagacaggatttgaattctatcaatttgaaagatgtgtcgggctttagtgcgcacgttctttatgctgtactaggtcaatgccaaaggaaacagattatatttattcagtagtccgacatatttcattttctgcctaaaatgtctgtaaagaaatggatgctggtgctttggagttcatactggcctttttttggcagtttcaaggaaagcaaaggattctgttctctgtttgtatgtaaaggcaggaagaaaacatacctccctttctgtcatggcatctaaagctggtggcgtccgcagataacaaccgagggagggttaatgtgtgtgtttgtttttgcccaggaaaatggcaatgaatttcatgcttgggggtgctgcctactatttagcaatgaggcttttttccactagattaggaaacagatgttttctagtccattgaggagttttaaatgctggaaatacttaagagtaattttccaggactgttgacctggattcttggattatgatcattctggctggggtccagtgcccttgagcttttaatctgtagagactcttttgtgtatttatctacttggctcaatgtgactttttaaatccttaattcatggaggcatcatttagatccaggagctgagattatttattttttctccttttaagtctaaataactaatgtgtcaggatcctcgactggtgaattgccttgggatcaaccttgggatccgttcagtcggaatctgacttctcaggcattcccacgttcttttcaaaggtgatattttgaaataacaaaaacaaaattcacattatctagacttcactgggtacttagtctctcggtcagcaggggataggtgatgctgcagtgaccagaacccctcacagctcagtagccgcatagaacattgattttcttgttcgggctgtaatgttccatgagggtctgttggggcattcttctgatcgtggtcacacagtgaccctgaatgatggaggctttatcttgcatgctaccatgaccaccacagtagagggaagggtgtgtggtgagtctctcactggctctttaagcttcattggccgaaacaagtctcatggccaagacctactgcaaatggagctggaaagcacaattccgtcctgtgcctgaaggagaggagaaccagaatgcagccctaatggcccccacacctcctggcgtcagactctgcgttacatgcctcacatataccatctgtaatctttacctcaattatgcaaggcacaggcccctattcctatctgatagataagaaaacggattcagagaggtcaggcaaattgcccatggaaacacaaggctcagattggaatccagtctgtctgctaactaaatgagtgtgcttccctctctgttacactgcctttgatagcgtaggtgttccctttcttccccaactgaacaaatgaagaattggatagtaatgttgcccctcgtcctgtgatcattttttatgcagtgttgtatattgccctggaggctgggggtgacaattgctgatggccctgtgggagtggtccagctgggagctgatctattgagtcatgtctttagggatatgatatggacagtccagagcccagaagtgacagaagaagaattagggatccactggaccagtcagaaactggaccattactctctttggacattggattatagggactaccacatgactattacactgatcactgatgtattgattacatttgtatttacaaggggagctttgtgttctattaatctaaatgacagtttggtccaataagtgccttgaacatgacttggatttcagaattagagtataggtgaagtgctcttctgaccttagaaatgacccaggcataggaccactggctacaaagaaattgggtctggtttcctctgctggtagaaaccagagaatcctcttgggcagcagtctgcaccaacaaacttactgatgcccaagacttcttctggtttttgtaatggctattgtcagggaggtagtgccaccaagctggaagtgtgtgttttgagaccttgagatggatcttggaaagcagttccctgcttgaaaaattcctgaatataatgaaatatatttaatatagattagtattatatctagtctttctaccagtttctccttattttattttataactgctagcattatctttgtttacttactgcttactgctaacttactgtcactcactggctaaatatcttctgatggcttgtcattgcccacagggaaagtttaaacactttgggcaaggcacatagctctttgtgatcttgtctgtatctactaataaaataatcataatatgtatctaatgatgtgttcaggatgtttctgcaaacagagaacccattttcaactgcctgccaaatagaaagtgagaatttctgctaaaatggggtttcgtctttcctctccactcagcaatgtgctgctgctgcataaagaagccaactacaagaaagatggcggacatagaagggtcacattaggaggataggtgctttggagttctgtaaccatccagttggctgtaaccagtgaagactgaatgctttccctggcccattgcaagccatcagtaggctcctcagagcaaaccagttgtgaagaagaaatgttccatgtggtaactgagagaaaaggctccagactcagtcattatagggagcttcccttggccattggtcatgggttgttaccatgtcctcaaggatgaagaattagaaaccaatgtcctaactctctctggagcctgtatggaccctatccatttatggacattaaatgttttatggctttcatggcccaaacaatatttaaccatgttcatcaagtgttaagcgaaagataaattattatatgtagtttcctgggctgggtgtggcccccatttggtgatgagtgtcaagactctgggactcagaataggcatgtccaggtgagcagtgtcccctcacagatgcctttttaaaggaacttcacatgggtatggaggtgcagctcctgcaaaagaggtgagggttttcaggcctctccttccttcctccagaagggttttctttctctggagagagacctacggcagccatttgttttgtgggaggaaggctatgctgaggtgcagcacagaggtgggaacaacttctcatggccctctcagctgtaggacgcacagaacacacacagcagggaagactatttctacctattgcacccagcgaggttgtttggcctaatttaggggctctgccctgggtcagatctgatcgtacatctgtgtggagaaaatattctctttgctggatgcggtggctcacgcctgtaatctcagcactttgggaggcagaggcgggtggatcacctgaggttaggagttcgagaacagcctggccaatatggtgaaaccctgtctctactaaaaatacaaaaattagctgggcatggtgacaggcacctgtaatcccagctactcgggaggctgaggcaagaaaatggcttgtggtgagccaagattgtgccattgcactccagcctgggcgagagagtaagactccatctcaaaacaaaacaaaacaaaacaaaaaaaaaactctcttctgagacaggtagagtgggtagaaagaaagagtttgtgactctccctaaataccgtgtcgagacctatttaggacatcatccgtaagtcacaagtatgattttctccaaatagttagtgtttatttcagcaatttaaaagctggaatttctgggttctgtttctttggagtaatgttatattcacttcactaccccatatttttgtggcttgcttcagaaaatacattttcttttctttttttggggaaaatccaataaggtatttccttgagttagatcctttcttggtatgcttaatagtaatttagcagaaatttttagccttttactggcacttccagcctccctgggagtctgcttatagcaccaaaacagccggtgtgtgggaggggaggctgattctgcaaaactgagtgtgtttcccgcacgtgccctcacatgcccccttctctctttttatcctgcactctcttttgtgctcttgaggatccccctgcttcgctcacttagctttgcactgtcactgccagtgacgcgcatgttcttctaatatgacaagtctcatacaaactttatgtcctggagcaaaagagaaatcaagtactaggatcaggaaggtgcacatgtgtcccgtctctcttttctttgtattttgttctacttccatggaagacccacgtctgtgtgcctggtttataggctcaatctcagctgggtcagaatggtggaatctgcttggtattggttggaggaagaagcactgtgattgtggtcagtaatgatggattaatgacaactatatgagccaaatggaaccttcctaggcttcgtgatattttggaactaattttaaagctcagacttcagagcaagacagggagataggtggactaaacgataaagaaaatctcaaggtgtaattttcaataaattaaaagtatgactctcatacaaatatagaatgagcacgagtcaaaaatttatttaactcatcaatgagggaactagcaggatggcaaagctggtttatggtaagtctatatagtcaaagaaactaaacaatgctgagataaaatttgctgagacacagctgaggtatataatggacataaggtgataaaaccataaatgttgagttgcctcctctataggacagaaattatttgcaacttaccaatcttttacaagttagcatctaattttacagtctagacctttaagattagcaaatattaagtcaagccgagtttgcctccctaaagcatcaggtgacccttatgtgactttgatagacaagactccgtgtcaccttggaagagcacctcatcgtctttttgccttatttccaaattttggattttacatggtggaaccattgcagatgaggttgctgtggtcaacatctgaacagttttctgttgtcttggctgatgtttactctgaagggttatatatttcaggggcatctgtagcttgggcactgcctccattttgctctcacctctttctttccagggggtatgctgtgactgttttcagggatatggctcctaggtaaatcatctggattggtattcttttcctgtctagctgtcttgttttttttttttttttttttccccttggtccaggttggaaaacttcagccacagagtaaaaatgtatatctttaaatggaatggttatttttgggatggcataatttaaaagcaaaattgtatttttgtctaggtccaggacagagtgttaaatgaatccagtgaagtaactggtttcaatataagaaatgactcttttatgtttaagtttataagcaacatttttttttgaattgcaatatttcaaatgatctctttattgcttcctgaagcaagattttctttgctagttgatctcttgtgcatgcagacacacacacacacacacacacacacacacacatcttattaattaaaatttggcaaaggaaaaatgtgtgattaatttggacacactagattcttatttagtaaaaagctaaaaatagcaaagccctttgagccctttgtaaagcctgtcgtgcagacagttttatgtgtcaatgactttatttaattatgtttcaggagctatgatttgacccttagtgtgagagaacaacaagtggttttaatggatttccacggacatttctttcttttggagctgctttatctcaaggtggatgctgcaaagtcagagtccaagatcagaatctcaggagagggattgccgggatgaggacagggtgagctggagttaagagtgaaggtaggactgtgggtagagagaatcagtgttgtgtggggctgctagggaggctttgatgcaccatgattttcctgcctctgattcctgaacatgtgcatattctgggttctcttttttaaataattagtttgtggggatttaacttttgtctcaagccaaattaaggttctggggatttttgggtggcatatcctgatccaatttctctctattgtggtcttaggaccatgttaaagtcactagggcagagggttgatagaaaaaggtatattcttggtttccacctcatatttactgaatcagaatctggggatgggttagggaatctccatttgaaacaagcccctaaaaacatctcaattttaaacaaagtcattctcaaatcaccaaaatggatttgtcttaattctaacgccccttgcccctcaaacccaaataaaactggaacaaaacaaaaggttctttcattacaatcaacatggcttcttgttaagctatccaggttaaaataattcatgccaagaagtaactggctaaaagacagccttctcggtggtggctgtggtttagggaaggactctgtgccttctcaacgacggctgtggtttagggtaggactctgccactccagatgatgccctagtgaggccagtggtcagggagctcttgatctggaaccttgagcactccttgctggctttctggtttgtggtggctttagagctcacttttgaaaggcacaaactttctcttaagcaggatacctgatttcatgagatcctcccttttccaaactaggagggaccaaaggatctgccaggtgggcctggatatttgaattcagaagcacactgcacactgtgtgttgactaagaggaaatcaaatggaagtccatgtgtgtagcagagtggttccagtttccataagggtggctgcagagctggagaaacactgagcaaggaacactaaataaggggttccggcctggtacggtggctcacgcctgtaatcccagcactttgggaggctgaggcaggtggattgcttgagctcaggagttcgagaccagcctgaccaacatggtgaaaccccatctctacagaaaaaacccgcaaaaattagcctgccgtggtggtgtgtgcttgtggtcagctactcaggaggctgaggcaggagaatcacttgaacccaggaggcagaggctgcagtgagccgagatcgtgccactgcactccagcctgggtgacagagccagaccctgtctcaaaaaaaaaaaaaaaaaaaaaaaaagcagaggggtgggggaggggagagattcagatgttggcatcttctgttaattatagtttcctctttaaaggggaggccatacatttctgatcatgttacaacacttcttttctccttgacctccactggaaaccatgagaatcccaaggctttaagacattgggagaggactgttgataagcatgggctgtgtctcctttggtttgagctagtttgcttttaaaagcttgttaaaatgacttaatgattcagaaaacccattgttctactgctgggtaagcaggaagggatgggtgagtttaggtttattgggcttgtgagtgccatgggccaggtaggctgctgggagctttgtgtgcatcctcttgtttagtgttggacatttgtccccattcacagtcaaggaaaccaaggttcagagagccaagtggcctttcccaggtgacacaaccaggaagggccagggccaggatgtgaactgaagtccccctgtgtctaactccactgccttgcagaacaggccacattctttttcttctgcctgtggagaccacggcacagtctcctaaaagtgacctcaaactccatcagaggctcagaggactgagagtccagtggtcaaggtacacctagccaggagcaatctttattttttagtttggggagaatttgatatttactaagcaaactgccaagcctgtgagcttgaggaaggaagtttatgaagaaacactgtgcctccctgcagatgtctttcaggcttggagctccagacaggaagccctctgctgccctaaagaggaggtggtcaagagggaatttgcagaatagagcaagatggtgacttttgacacaagtcctttaaggcaggggtccccagcccctgggccacagaccagtaggaaccgggctgcacagcaggaggtgagtggtgggtgatcaagtgaagcttcatctgtatttacagccactccccatagctggcattaccacctgagctctgccacctgtcagatcagtggtgacattagattctcataggggtgcagaccctattgtggactgtgcatacaagggatctaggttgcacattccctatgagaatctaatgcctgatgatctgtcactgtctcccatcaccctcagattggactgtctagttgcaggaaaacaagctcagggctcccactgattctacattgtggtaagttgtataattatttcattatgtattacaatgtaataataatagaaataaagtgcacaataaatgtgatgtgcttgagtcatcctgaaaccaccccacttccaccttgatccgtggaaaaattgtcttccattaaactggtccctggtgccaaaaaggttggggactgctgctttgaagagtttgcctgtgaggaaaacatgagagggacaaggcatagttctgtgggaaggcctaatcccccttctctttttcttatggtgtcctaacctcctgcttccgttatgatccctgagcatgcagaattttatgatgtggtgaagtttcacttccaccaatgttctttattaatatcatgaactaagcatgcattaattgccttcctagcctcttgagatttttttataataaggaaacattttaagaatgaaaagcaattgcaaagatatggaatcaacctaatgcccatcaactgatgaatgcattgataaagaaaatgtggtatatatacaccaaggaatactactcagccactaaaaagaaaaaaatgatgtcttttttggcaacttggatggaactagaagccataattctaagtgaagtaactcaggaatggaaaaccaaaaacctagttctcacttataagtggaagctaagctataggtatgcaaaggcatgcagagttgtataatggacattggagactcagaaggagggtaaaggatgaaaaactacttactgggtacaatgtacactacttgggtgacaggtgcagtaaaatcctacttcagcactatataatttgtccacataaccaaaaatgcttgtacctctaaagctattgaaattaaaatttttttaaatctgttaaatctatttaagaaaaaaaggataatggaagaattcctttcatattaaacttatattccttttatattgaacttacaaacagatatttattcaggcattggatgagtgatctatgacctttgttttataagtttaacctgctgggctcaaagctttaaaagtcccggagggcctgaggcagtggtgacattttctgtggtggggtgctgggcttcattgaaatgcacacataaaaccttggaatgtgcgtggactgctggggagcagaggctggccaggctgagggagggggccacaccacacaaaggacacacagtcacattcctcccgggccacccagcagccttggtggctgcttgccatctggcagtgctctcggtattttcctggattccttggggcaaaggaaacatagtgacctggcagacttggctcctggctcagtggcaaggccagagctgtagaagtggtttatggaggagattgcacttaaaatatcactctagcccatccttccctgtcatcatacaagttaaccagcatcctgggacaaggctaggcatccagagggccggatgtggggaagactcttgcaatgccgtgttttaagtccattgcttccaggtgtgtggcagtgtcctttccagccactagattgggaatgcaatgagggaagggagttgggtgaagagtttagttaataaatattgggtacctaatgaggattgtctatgcctcgagctgccacgggttccttctgaagagtgctagggtttctctgaagaagcccaagtcccacattgaactaagtgtcctctctctgcagagtgctgtgccagcagctggcaagcaagcatgtttatgagttagtgatcttttgataagagctcattcctgaaaggcaaatggaaacttccacctagaactcaggccaggtcaggaggtgagagtatggaaaaataacaccaagtgcaggcacaaaactggagaagacaaaatagtaagggagctgcaattggggaagttaaaaagggcctcatggtcaacaaatcagagacaagagaaggacaagtgacacttttgacacctttataccttcagcaaaagctgatactctcagaacctaaaatagcagagaagtcaaatgtttcatctcataaaaaaaaacgctaaacttaaccacaaaactgtttaagattataccttgtgaaatacaaagtaaaaagttagaatagggaaaaaaatcagaatagaataaggaaggaaaggctagagtattaattaagataaattaaaaattttagattttaattcagtttgtcctagcatttttaagaaaacaaagatgattttggagggcataacaagtcattctaactcatatccctgaaaatgtaggagaataaattatccacatgggaataatgagcatttggaagcacatgtggtgctagtttcattgtgcaaaacacgaaatacattataccaatgtcatattcatttatggcagggagactagttagatgagggaaggcgtacatctgaactggctgatgttctcaaacatccacgctattggacattcccaagaagctggaaatgtacaatctgaaatgaacgtgctccttccatgagttcaataaagggccaatggatctcacctaaaaggatgttttgctcagaatgaacttgctggacatgctttgcctatcacagggctctaataccacggaattacaataagacctcattgtttatatgaggggccaaagcatcaaattcctacaggggtcagataggtgatctaaaggaactaagtggtgcaggcatgaatgtggccagagagcagggtgggtggcctggccacagggacagctgtttgttactcctctccagccagctccctgcacaggggtgatgccatgctgagccagtgccaagtggtcagctgagttttcaagaggccagcttttcagattttagggaaatctgtaatttttaaacatctgtttttaaacatcgaagatatggacgtggggctaccaacggctttaaactttagagtgaaaaagataggtgaatgtttgctggctcgttggtgtgaaatgaaagacatttcttaaaaaaaagcaagccattttatgaaaaaaaagtttttcttttatcatggtcattgttttataattttaacaagttaaggaacaaatatgtggagagacttatgatctgccagcttactaattactcttttctactctgagcattagtctgccttaggtctttgtcatctgcacgtgtctaaacccacatgatatacatttacatgtacttatacacatgtacagggataaaaatttctcaatatggtggctggtacagatcactcagcttccaccaaatggagcttctaccaaatggagccaatcttggggttttatttggaggttacagggggctgcagaaggaggggccagcgtgggacaagggttgtgttttaggaaggtctctctgcattggcttgtaggacaaagaggagggaagagatacaggagcagggaaggagttaggcaggtgtctcttgaagttgtttcaactagaggtgttgagaccaaggctagggataaggtatgatcagaaaggccttgattcaagcattatgtataatatagaataagacagcctttagtaagtgattagtgatgggggaacaaaggagttcatgatgattacgatatccgaattctaagaaactggcaatggtggtggtgaggagaagcagttggtgaatagtgggttctctgtgatctggggttggcttgggacctgctgacttatgcgtgaagggttaagtctggatattgagtttgagaatcattcgcatctctgcatagaggtcagagttggagccagggggctgaatgagatccctgaacaaatggcagagacaagagacgaagacccaggaccaggataaagaataaggggcaaaatggaatccaagagagagagaaaaattgttaagaaggagaagactaataatctcccactcagcacctggcatcatgcacacattctcacagaagcctcacgaaggcccaggaagaagcatgattatctcagttttgtagatgaggaaacaggattaaatgatgagaaggtggcaaggacgtgggaccttgggacaggctgggctccttctacaaggtgggcagagaagggagtgggagagagagcttagtgcataagagcatatcagagtgaaagcaaagggcatttttaaggatgtcctggggagaatgtttgtaagctgaggaaaaagatcaaagggagagggagaaacgggcgatgaaagctggagatggattaataattgatagggctgagttgccaagcagggggctggagccaggatcaagatggatcttccaagtgacaggaacctgaaaggaagctctcattgtacagagtacctgagccccaagcagtggtgagacatcacagtaggagagcttcagatgtgacgggaggcatcagctctggaagctgatggccacttgctatggcatgactacgaagagaagtattaactgcttatttcctctttatgtgaatatcttctatggatcagtcacgttaattctcatgaattatagaacctcagcacaaataaatttagcctacattcaatagagattattttaattagctttcattttttcctaaggaggccatgccgtccattatttgttgctattacatatgagttgtgtgtgtgtgtgcgtgtgtgttttagcttcaatgaagagtagatctacatatcaagggcaaggttaggaggaattaacttgctttcatgcttacatcattatcaagataatgagtaaaacatacattattgggttaaagatctttctggaaagaacttgatatggtaggaagaacttgggctttggagttaatgggtgcaaatctgagcttcagtatttccaagtggtgtgattttaggctaaaggcatcacccaacttcatcttctccaactgcagcggaatgattataccttacaaggttttaatgatgattagagatatgtaaagaacacccagcacatgccttaatacatggtataaataatgaaaattattataattactaaatgaactgaggactaaatatttataaaatacatcagaccaacatgagcacacatgtatatatatgtgtgtgtgtgtgtggtttatatgtgtggatatgtatatatgtatatatggaagtatccttccattcttttgtcaatggatgtgtgaattgtttccagttttattcaattacaaagtatgctactataaacatacttttttttttttgaggccgagtctcgctctgttgtccaggctggaatacaatggtgtgatctcggctcactgcaacttctgcctcccgggttcaagcaattcttctgcctcagcctcccaagtagctgggattacaggtgtgtaccaccatgcccagctaattttttgtatttttagtacagatggggtttcactatgttgaccaggctagtcttgaactcctgacctcaggtgatccacctgccttggcctcccaaagtgctgggattacaggtgtgagccacctcacccggcctataaacattcttatacatattttatagtcatgtttgctactcctctggggtttccatctagaagcagaagtacttactatgtacatcatcacctctgctaggtaatgacaagttgttttctaaactggtcgcgcttacttatgctcctgttagcagtgtaggacgctgtccagtttctctgcatcccaccaaaccttggaaatgtcagactttaaaaagttggccaagctcatgaataggaaatgttttttaattattgttttcccaattactgatcagttgaacatcttttcatatgcttgctggccttttaagttttatcttctgtgaaatgcttattcatgctttttgctcatttttttttctagattcatctttttaaaaggtataaagacactgagttagatatatacatatattcatatatatataaatacttatatttgtcaaagttcaagagtcagttcatactaacattaactaatactttcatctgtcagagaactcaagttttcttgcttgtacctattaggtgcctgtacctaacaggtactgaatgatgagtattgaatgaatcaaatatggagagaggaacaagtctaccattaaatatgtaagactagcacatcaagaatgacacctttctaggtcaggtaccgagcaagactgtttttcatgttctgtcccctaagggatgtgtgacctgaacaacctctataaagagcacatggagtggagtcagcaccttccaacctcttgggttattgtgacagggccagaggggaacctatgacttgctgaccacctacagtgttaggaatcaggtgctctccatccctcacccacagaccccaggtttcctgatgtgtggaatcaccctggctgcttcccaagcctatactcctcaggccattctcatgggtttctgattccacagattacactttggtctgggaacctgaattttgaacaaatgctccaggtaattcctatacttaggtgcctttaagaaaccctgcccaagccctgtgcctggactgagatcgagtagtgaaggttctttgagtgcttttctttttactctttggcacagatctagctgggaagcaatgtcattaaggggaaataagtttgtttggtttcacaaaaccagctaagttcccttctccaagttctcaagcctgtgccagacaactcttggctccctccaaaccgaagcttgtctggaccacctgatctccttggtgtcccttctgccaagtacagtgatgtgtctcaggcctgtaactcagaaggttctacctggtcttcctctccaccccttcaaagcttctctgtttaccaccttgtgcctgttagtctgtgcttcaggcatgttgatctctgcaagctgggaatgtgcaaccatccctctcacaccggtcattttgcttctgccatttcctgtcttttaaatgcctcctcccacttatcctcctttggctaactcatctgaggtgggcctgagattctgcatttccagcaagcttccaggtaatacaggatgttgctaagtctggaaaccacactttgtgccaaaagacacgatgacacagagcgtgcatcacctgctcctcttttgtgctcttagcaccggggccggcctctgccatgcctctcacattgtatcagaataactgccttgtctgtccatatgtttcttgagaacaggaattgtgcctcggttatctttacatttgcagtgccaacatgtaggagatgctcaacaaatgactggaacaatccagacagattttcgtctggctgcattttgctgttggtaactgtttccctattgaggacaatggcttgttgcttttccaggtggtgccctctggcctgaagggctggttccactttctataataccatgcagtagaccttgccaggggaggagcatgagagttgggggttagttttggcataggaagaattcaactttttttgtgtctaatttaggtcaacattagcgggtttaaaattagccccagattctgaattttcttaggatggtttgctcacgcttgtgagcacatgtgcacacatttcttatggactaagcctgtgaggtttaataatctcttcctcttctagccctgttctccacgcaagggccaggaaggttgtttttttttttttttttttttgagacggagttttactcttcttgcccaggctggagtgcagtggcatgatctcggctcactgcaacctctgcctcctgggttcaggcaattctcctgcctcagcctctcgagtagctgggattacaggcatgtgccaccatgcctggctaatttttgtatttttagtagagatgggggtttcatcatgttggccaggctggtctcgaactcctgacctcaagtgatcctcccgcctcggcctcccatagtgtggggattgcaggtgtgagccactgcgcccggcccataggaaggtctttctaaaatgcaaagttggattatgccactcatttggtggcttcctctcctttcagagaaaaatccaactccctaacatcaaggcttctgaataaggtgcctgctggacaggtttccccgggccagttcatgcatactcctgttgtctgtgagtgcccccattcactctcacaagctaggatgatgaatgctctgatggcccccacctctccccacaacctcatgactcacttttcagccaggttgcttggttgtgagaacatgctcataccagttgtcacgtcccaggttgtactctggctgctaattctcatgcaggggaccttgttacaagctcactcttggatttttctctggatggttattctataatctaggatatatatctacattaacccataattactgtaaatcctgtaaaacccagcaagattaaataatgaacatactggtttatgttttccctcagtgcttttagcagaaatctcttaatgataagattaatcttttaatggacagatgggtgagccattccacttgcaggtgagtaaactgtagctagctgggagaagaggctgccagtctgcaatagttattctgcttacagggtgtcattgccctcttctcatctacttgtaaactagtttttcatactagttggagcagtagcgcaggacaataaaaccagtatgagttgcaaagccagatagaactgggtgaaccccaggcagtttcttacttcgtctgagagttggtattcacacctgtaaaaatgaaaacagtaagacctactttgtgtggatagttatatgattaattgggatcatttggaaatgttaggttatgtacatcacagatatatctgtcttcttgtttttaaagatgaaaccgtgtgagttatttctgtttggaaactgtggcaatgctacagatagattatttggtatatttatctgtgggattttttctattgtgatgcaattttctgtttttaagcttggagagcttctttcttctttttcattactctaaatatgttgtactaatgcagccacattgaatttttgcacatgcctgtttctctttaagataccattgtgtccgaatgtacaagggctgctcttatcttctagaaacacagctgcttaaattataccgggcaggctttctcttaaggaaatctccattgcagatagtgtagcgaagatagagattcagtggtctgtatatttttgcttcgaaccctgaaatttttgaaaaccacatagtgtaagggtggaagggtagacaagggaaagtgattctgtatcgtctaacattcactgttttatagaactgcaatttgaatgtacaaggtgctctttgtgtaagagcaggagacatgtttaccattcagctcaaggccagcgttgaacagggtcattgtgcctcctccctagcctctcagcaagggccatggccacgaccgtctgcatccacctggagcttgttagaaatgcagagactcaggcccctccccagactactccataagaagctacattttaataagatcttcaagtgatttaaaggcacattaacgttcaagaagatttactcttgactggcatggtccgatagaactttctgtgatgatagagatgttctgtatttgcaacatctgataaggtagacactagccatatgtggctgggaacttgaaacagggctagcagagctcggggccgcggctcatgcctgtaatcccagcactttgggaggcagcggcaagtggatcacctgaggtcaggagtttgagaccagcctggccaacatggtgaaaccccaactctgcaaaaatacaaaaattagttgggcatggtgacacaagcctgtaattccagctacgcaggaggctgaggcaggagaatcgcttgaacctggcagacggaggttgcagtgagctgagatcacgccactgcactccagcctgagcgatgcaagcgaaactccatctcaaaaaaaaaaaaaaaaaaaaaaaaaaaagaaacagggctagtgcaactagggaactaaagtttaaattaaaatttaaatagctacatgtggttcgtggctaccaaattggggcagcaccatatgagactctaggaggctttgcttataggctttctcctgatggcagtgttggtgccccatccctgcctggaggtaatcagtcctccttgcatggcccagggttaccaccgcatgttctggggtcctcatctatgactgtggctctgtgcacagtccctgggatgagtgcaagagcctcagcattcctgacactcttgctttcctctctggagaatttcagctggttggcctcaaaattagataggaaaataaacttaacaatgaaacacctgcattaaacaaatgcaagacattcaaaactatccttgtgtaattgtgttattattccacaactttctgaagatcagagtacatactgctctaccttgctccatctataatgtatatatcttcaaaatatcgaaattggtgcttttttattggctttactcttctttatattactctgtccccatggagaactcgagttcaaataattttagttgctgttccctgaagaggccttgagaaactttggcttctaggtctttgcttaagcattcgttccctggcctggtggcctaagcaatcctccatcggaggcttctgctacctaaacatcacctttgttactgtgatggtttaagcaagttctgtaactttaagactcctttatttttcgcctcttcatgctgatcatctctaaacattgttccaaacttaaaattcttttgatcaaatttggcaacacacaacacttcccagctgttccctggtgatacatggctaagtgatgatgcaaacatctgttctggctggagtcactctcatattttaccaagcagagttctgtgatcatttgtccctccctcccaccatctgatcctggggttctgctgaggtgagggagattgaagagccatttggtgaaggaaaatgaagcttgctatgagaggaaagaacgtttattctaacattaaactatttactgacaaatgtccatttgcttacacttcagaaatgtgttttcatcaggtatagcggagcttgtcatcgccttatgtttatttttgtccttaaatattgctgctgatcaagaggcatccacacttagacataacctaagagtgggaaggggctagagtgatcatttcatcatatggaggaatgaagagctttctgggaattggtggaagagtcaggttaggaacttggatcttttgacttataggtctcttgagggtcttcaggaggcccatgggcccctgcgatttttttgttttgtttttttgagacagtctcactctgctgcccaggctggagtgcagtggcacaatcttggctcactgcagcctctgcctcccaggatccagcgattctcctgcctcagcctcccgagtagctgggattacaggcatgcaccaccacacccagctaaattttgtatttttagtcgagacggggtttcaccacgttggccaggctggtcttgaacacctgacctccggtgatccacttgcctctgcctcccaaagtgctgggattacaggcgtgagccactgcacctggctggcccctaaaattgcagcagttttgtgtgtatgttcagtgtagagagagtccattagcatgtgtgaattgcatgctatctattcttttgaattcccctgactttagtggttagtttgacctccaactccttacatttaagataaggcctacagaacatttgctgcataattatgctactcagaaaagttagatttcctgggaaataactttgtatcaaaccattctgccattggcaactgctggctccagggaggagagggcaagaatgtttacctgactgccatcagttattataagggaaaataaccctcagctgccatcttatgaatcaggggatggaagggccatcttcttacttgaagtatggctcattgcatggtttctatgggttttggagcctgacgacctattctgggagctgtgctctgctaccccctttctgtgtgactgctagcaaataattttttctgcatctcagtttctgcatataaaaatataaggctaataatgcctgtttgcaaggccatgatgaggattcaatgcaaaaatgtgaattgcaaggccatgatgaggattcaaggcaaaaatgtgaatagagtgcagggcatacagcacaccctgtatacacgattgccttagtctggttcctgttgctataaaggaatacctgaggctgggtaatttatgaagaaaagatggctcggccgggcgcggtggctcacgcctgtaatcccagcactttgggaggcagaggcgggcggatcatgaggtcaggagatcgagaccatcctggctaacacagtgaaaccccgcctctactaaaaatacaaaaaattagccgggcgtggtggcgggcgcctgtagtcccagctactcgggaggctgaggcaggagaatggcgtgaacctgggaggcggagcttgcagtgagccgagatcgcgccactgcactccagcctgggcgacagagcgagactccgtctcaaaaaaaaaaaaaaaaaaaaagaagaaagaaaaaagatggctcatggtctgtaggctgtacaggaagcatgggaccagtatttgcttctggtgagggcctcaggctgcttccactgacggtggaaagtgagagggagctgacatcacatggtgagacaggaggtgtgagagagagtgaaggaggtgccgggctctttttaacaatcagatttcactgaaactaacagagcaagaactcactcattattgtttacaagggatctatccccatgactcaaacatcttccaccagggcccacctccaacactgggactcatatttcaacatgagatcgggagggtgaaatatccaaaccatatcaatgataataaaaattttcatcactctctgccaaccattttagagctgctgaggacctgtgtctttctagatccaaaggtatcttttaggtttactgttgccattaggagaggggtgggaatcaccattcctaggaaagcctagcactgagctgatttgggaatgatcatgggatatgtatatttgttaatctgaataatgtaggaggtatgagtataactgtgtttgtttatagtgtctgattccttgaagtgtaaatcctctgacacccacgtccctgaagccaactggtcccctttttgctgttcagccttttgagggagttcaggatgatgtgggggattattctcttcttcactcactttcccactttctatcatcatccatgaggctctcccatctgcctgctagaatcccgtttctgcagtagagtttacagggtaacagagcacacgctattataggaaactaagtgccagctggacatatcattttgggaacagagccatgaaggaaccatgtttttggcaactgctgtctgttttataaagaaaaattggagatgtacatttccatcttaggctactgaggaatctttacttccaggcaacatgcaaggtttctagtccgtggtctacctgaggttgttttgtggcatagttcagctcactctcccacatctctgaaagagaattgcctccaagagctgttgtaaaagatgaatctttgctttaaaagaataataatgacaataataacaacaacaattgtaaaacaaactcaggtatagagttagggttgttgatttggtttttgttagaattaggtgaacacagaatagaaggtgtgcttcccagctctttcttgttctgtaccccagtacatagcacacacacacatcacacacactcaacacacataaacacacacacactcaatacacatgaacacatatcacacacattcaacgcacatgaacacacacatatcacacacgcagcacacatgaacacatatcacacacattcaacacacgtgaacacacacatatcacacactcagcacacatgaacacatatcacacacactcaacacacatgaacacacacactctcaacacatgaacacacacacacacacacacacactctctcacagcagcccctcaagatcatgatgcctataatgacttctccccacctaacttgctttagagattggggaaccatcataatgcctgataaaactgctcctaacaaatattttcttttttttatggttaatcttatttgggcaaacctttaaaaaattttttaatagtttttggggtacaagtgattttcggttatacagatgaattacatagtggtgaattctgagattttagtgccctgtaactagagtagtgtacattgtaccaatatgtagtttttaacccctggcccccctcctacccttccccttccgagtctctaaagtccattatatcactctgtgtgcctttgtgtactcatagcttagctcccacttacaagtgagaacatacggtttttgattttctactcctgtgttacttcacttagaataatggcctccagctccatccaagttgctgcaaaagacactgttttcttccttttaatggctgagtagaattccatggtgtatatataagaaaaacacattttatttctccactcattagttgatgggcacttaggttggttcacaaaggcttcgcaattgtgaactgtgcagctataaacatacatgtgcatgtctttttcatataatgacttcttttcctctgggtagatacccagtagtgggattgctggatcgaatgttagttctacttttagttctttagggaattgtcacactgttttccatagtggttgtactagtttacattcccaccagcagtgtaacagtgttcccttttccccatattcacaccaagatctattattttttgactttttaataatggccattcttgcaggagtaaggtagtggtatctgattgtggttttaatctgcattccctgatgattagtgatgttgagcatttttttcatacgtttactggctgtttgcatatcttcttttgaacaatgtctattcataatatttgcccactttttaatgggattatttgtttttttcttggtgatctatttgagttccttatagattctggacactagtccttcattggatacatagtttgcaattttctccctttctgtgggttgtctgtttactctgctgattatttctttttctgtgcagaagctttttagtttaactaggtcccatttatttatttttatttttgttgcatttgcttttggggtcttagtcatgaattctttgccgaggttgatgtctagaagagtttttccaacactgtctggcttttatcccttagcttcgtgaatatgtccccttctttctaatttgaaatatcccccccaccccagtgtctctcccccttctccagcgattttactggctgctcactccttcctttccctggcaagctcttcaaaagcacggtgttcacttaatatctcccattcatttctcagtcatcttcaacctagtttctccccatgtcaaattattaatgtaacttctctaggaagcagtggtcaccagatgtccctaactgccagatctaatgcatgcttgctggccttatttttatttacctctttgtaatgtgaacactatgacccttcttggaacttccttcactcctctcttccttggttttctatatgtcttggtcttcttcccctgaacattccttaaatgttggtgttcccctgggcatcccacagaagattcttaaaataatttatgcactttctttgcaacattttattcagtccatggcttcagcttgctgactcccagatttgtgtttccattctaaatttcttcctggagcttcacatctgtatatgtaaatgtctgctagacacctcctcttggatatctgcaggcacttccaggtaaggggtgcaaagtcagactcactgttttcactctctatagaactgtttccatataggaaacataggaaaatataggactagcttagtaattttcaagctatgagtcatcactcattagtgagtctggaaataatttagagggttgtgatagcattaaaacaaacaagcaaataaacaaaaaataacacacacatagacacacacatacaggtgagtttacattagaatataagctccctgagagcaggcatggtttactcttttattttgtttactgttttatttttagcacctagaacagtgcttggcacatatactggatcaacatatatttgctgaaagaatgaatgtgtactcatttgggaggtaaaatgtatatcctactgtgggttgtggtcaagaaagctgttggaccaaaagctaatgatattttcaactcaaaaaattataaatatatgattgtgttatatttttcaatgctctattgttcaagtttactggtggttaaggtctacggcaggactcttgatatttttgcttgcgtggtgaacattggagaggcctgggtgaaaggagaaaggagtggaatttggtgaatgtggttgggaataagcagtgggctagatgaaacagtgtgctcagatggatgcatgtggactcactgttgagatgactggcttagcacaatattgagtttgtgatgtgaagcaacatagtgaacactattcctgctgctggccagccagctttcagagagagtgaaagagtaagagagagagagagtgagagagagagagagagagagagagagagagagagagagagacagagagaaatgttttagggacatcctgtagtctctttgtatcacaagtggacttactataaagctggctgaattagagaggatggcagacttaaggccaggtggtcccaatggagaagtcaaagaaaggaagtcacatgaagttgcttatttatttagcatacatttagcctattaggtgccaagcccctttgctgagttgtaaggatattttctgaacaagacagataagatccctgttcacatgagtctttgttctagtgggagagacaataggcaaataaactgataaatatacgaggttattatttcagatgcagagaaggccactgcatagaacagcttggttttgatttgtgccataatacagagaggtttgtaataggaagcaagtgagtattcagtgtcccagctcaccttgtagatggaggcttgtgaaacgcaagaatccataagtgtgcttcttgattgacacttttaaaaccttttaagaaaatcaatgtagacaacatcttggatcctgcactaatggaaaccgtggttgagaactgagtaagggtgagtgacaaagtggagagagttggctcatggcaatgggcagggcagctctggaagtgtgctgtgctggaggagaaaggagaggagaggctgaaggtcccttacaggctgttcagaccaagaagtacctgttgaagaggagatttacttgctatttctaggggaacataacctttcccaagtgcccagatgctggttctgaagggagtttgtggagcaagaagaagccacatcatttactactaaggatgtctaattcacttttggacaggagtcagcaccatgtccaatcaatagaaaacaaattatgcagggcattatcttggttggatataggataatgaaccactaccttttcctgtcttccttctgcttcacaaattacatataaaaggctaatataatgtctctgaagaatttcctttctcggctgggcgcagtggctcacgcctgtaatcccagcaatttgggaggccgaggcaggtggatcacaaggtcaggagaccgagaccatcctggctaacacagtgaaactctgtctctagtaaaaatccaaaaaaaaaaaaaaaaaaagaaaattagtcagtcgtggtggtgggcacctgtagtcccagctactctggaggctgaagcaggagtatggtgtgaacccaggaggtggaacttggagtgagccgagatcgcgccactgcactccagcctgggtgacagagtgagactctgtctcaaaaaaaaaaaaaaaaaagaatttcctttctcggtctcaggaacatagttttactggttgtggtacttgttcacttatctatttcctgcgtattttaaaagggattccaggcagcttgcaatggtgttccagatctcttccatttgctcctccagagccactctctgccttctctgccccagatggctgacctgatggatggcattgaataagagctaccttgtcctttggctttcagtcgggttcaacaatggaagccccagcaaggagatcacagggaagagagagtgaggcctgagtatttctcccctggctcccctgacctgtgaggttgcctcaggctgattttattcctggcccagtgatcactcctccagaggtagcttctctgcctgaccctctccaatgggttccagtactgcccccatcccattgcacctggctattgaggggactgacatttctgttgcttctcatctggttcttgatcacctctggtggttcccctccatttaactcagacctttataaacagtccctttggaaagaaaactttcttgaattattctaagttgcacacactgtcttccttctgttgggactctggcagatacaaatatcaaaacatacaacaaggagataaaaaccattaaacaaatcaggaggcatgaagatacagaactagaaattgagagagctgtgaccatgatatttgtgtagtaaaaggtacacacatttatcagccaattggatagctatcttttgtgaactacctgttcaagtcttttgctcatttttaaattgggttgtttgtctttctgcttatgtgtaggagtttaaaaaaatatatatcctggacatgagtcttttgtcagataaaagtattgcaaatatctctccccagcttgtagcttggttcttcactaccttaatgatattctttgtttaacagacatgataattttaattaagtccattttatcattttttttcttatatagttagtgctttctgtgttccgtttaaggaatccctgtctactccaaactcatgatgatgtactcttatattttcttccagtttaattgttttacctttcacattgatgtcgatgatctatcttggattgatttttttaaaaacagcttgattgaagtttaatttacataccattaaatttactcatttaagaatacaattcagtgatttcccagtaaatttacagagttgtgcaaccatctcgccaatctaattttagaacatttccatcacccagggaaaataaaccttgtgcccatttgcagtcattcccccttcctttgcccagccccaggcaaccactaatctactttctgtctctatagatttgcctctcgaattcgtgtgtgtgtgtgtgtgttgcgtgaattttatttgaacacaagtgttaactctaagctttctggaagctgaagcaaaaagggaatttcaacactttgtatggtctcccggctggttcctgctaggactacaattctatcatttcttggaataattatttgtattcttataacattgggtaatataatagacaatgcctggctacattctggcaagagatatataaatctctaatagttttctttctgttgcttcttgctaagagttaagaaattatttgtcatctagttgagtctgtcatctagttgagattagtgaaggcagttttgtaaaaagctacaatattaagatttatgcccatggatttctgatgatctaaattaatacagtggaagaacataagaaagctacagaatgggcaggcagcatggttctgttaaataccatgaatctcaagtgggcttttggcgagtccagattacagtaattttcacagttggattctctgatgggtgagtgcccaaagtgctgaaaagcgattatccttactaaaagtaggatccatgtgctgtgtctagccaccagccatacaggtgaaagaactgacatattgttgtgacattcaggggcccgggtgcatccttgtatttctgcccatctatggctggcacatgactccctcgtgtatggatgctgggggacagtgagaagagccaacatgccccactgacaggaccttccattctgctcaggcacttggaaaaatagacagctgatggttctttagattctacaccataaagtttgagagaaaatgatttggtgagcctacctgattttgagagagtggttaccacttggccatctcaaaagatgaatttaaactttgatgtacttacaggatcagttaacttcaaaatatagttcaacatagcagaacgaattgacttgctggatagagttacctgtagcccactaaatagtgaagaatatcttccaaatgcaattattttattagaaccatatttttttctttttcttatctttcttttctgttttctttctttctctcctttttttattttttttgacagagtctcactctgttgcccaggctaaatgcagtggcatgatctcggctcactgcaacctccatctcccgggttcgagcgattctcctgtctcagcctcctgagtagctgggattacaggtgtgtgccaccatgcccggctaatttttgtatttttggtagagatgaggtttcaccatgttggccagactggtctcgaactcctgacctcaggttatccacccgcctctgcctcccaaaatgctgggattacaggcgtgagccaccgtgcccggccaggaccatattttgatgcagaatttttaaagcatcctttagtcaacaatttcagctgctcacaaaggctactcctctggttggttgcggcaaaagccgtatcactggcataaggaaagttgcccttctgtttgtcttaatagtattatagtggaatagtatccagtttatccaaaagttatgttaattaaatgttttaaaaagactttgatgcattactagtggaagtgtaaatttgtacagccactatagaaaattatctggcaatatcttctgtaaagaaactcatactatatatcttaaaaattccacttctaggcatatacctagtagaaatacttatatatgttcaccaaaggtatgtacaaatatgttgttagcagctttatttgcagttactaaaaactggaaactaccccacagtagaatggacaaatggactgtatatttatacaatggtaatgctacacagcaataatgtgactaaatgactgttcacacaacaacacgtatgaatagcagaaattattttaaactaaagaagcaggacacaaagagaacaacactgttgttgatatttaagtgaaggattccattcagttaaatatcagaaacaggcaaaactgtttgatgacaaaaatcacagtatgggtaccttctggggaggtaataactgaaagggatggatggtttgtctactttgctgcctgaataatataattccttaaaaacaagatgggcagctagaacatttctgccttatgtgttgagaattatctgataaaagtccaattctatgcagactgatcccagaaatggtgcaaatttcgaagaatcatgaataaccagaaataaactgtgaatggatagtttggctcactgggactttctgtgtataaactcaaagtttaacacagatgaatgaatgaggtgaaaaattgcatacttcaaaaattttcagtccttttcgatgagatgaaataatatataatagtgaacagtagtgaaatagttctatcactgcttacttctcatcgaagttattaaatgaagagactcgggtttgtagcccccaccccactaccactgacaagcaagggggaatccccactccactcacctagacaattagacactctagttttacaaaggagtatccagcagagtcatggtctatgcttttgaggacctcctcccttctttcttcccccaagggatgggtagataatacttcaaaccattgttagggtgaaccaagaggtgggacagtccttctttagagtgaatcagttggtgtggattgagctaaaacaatagaatctcccctccttttctctctagctattgtctctccacatcagtaaggactgacttacacattaagatatttcagaagttagttcaagatgaggatgaatacattttcatagggaaaataggctagcaccaagaaggtgaacttctaatatattaactgaaattatatagttagccccaacttatctactcccaaatgactttatgaaatgcctgggacaggaaatggcctgcagccttaggcacagaaggaaatggtctgtttaatacgccacgtctctaaggggcaggtgatgttccagccctagagaaaggtgagagatgaggatcttcgctcttgccccaaacattctgcggcactctgggaaggaactctgtcattcagagtcatgtcccaaaacaccctgagggacagcaaaatgtaccatttgcctctgaggtacagggatgagtgatttcagttactaagcaactcacccttctgagctggcctggcctcattctggtctgtagttgaggtgagccgggacgagtcagagcaaatatgttgcttttagaaagagaatttaggaggtcaaaaacaacagatgctggtgaggctgcagagaaaagggaacacttatacactgtttcatgagaatgtaaattagttcagctgcggtagaaagcagtttggagatttcttaaagaacttaaaacagaactaccattcaacccagcaatcccattactgggtatgtatccaaaagaaaataaattattctaccaaaaagacccatagacttgtatgttcatcacagcactattctcacaatagcaaagacatggaatcaacccaggtgaccatcagtggtggagcggataaagaaaatgtggtacctatacacagtggaatactattcagtcataaaaaatgaaatcatgttccttgtggcaacatgggtgcaactggaggccattatcttaatagaattaatgcaggaacagaaaaccaaattctgcatgttcgcatgtataagtggcaggtaaacattgagtacttatggacagaatgatggcaacaatgaaactggggactactgtgggggagggagggacaagggcaagggttgaaaaactacttattgggtactatactcagtacctgggtgatgggatcagtcataccccaaacctcagcatcatgcggtattcccgggtaacaaacccagaatctaaaataaatgtggaaatcatttttaaaagtaaattaattaatttaaaaagagagaatttagggtttcctggttcttccatgtgtgaaaggaaggatattgctaaaaagcagtaagacacagggatgattttgccccttgtctgatgaaagcaagattaggagtcgtctgacctggaggaaaggctgctggtagaaatggcattgagggctgggcatgcatgtatctgtccatcagtttcacacttgatccagggaatgctcaggaaaactgtgacagaccggttggttggaaaacggaagagcttattgaaaaagaagtgttctcagagtatgcacaccaatgtttgaggaccagtgacttggtggaaaagagcagaagctttaaagaggcacagaagagagttcatgtcctgggtccagctcttatttgttgcttgagcatacattttcccatctgcaaagtgggaataataatcttactatctaccagagagactgtattaacgagctaatatatgtaaatggctcagcacagtgtctggcacataatatgtgctaaaaatgtttgctcttattaagaaatttgggtggttgtaatcatacacaagcatttgctgtggccaatttcctctgaagagtctcacattctttttcaaaagtttttgtccatcctctgaactaacgtggggaaaagctagtcaaggtttccctgtgctgatggagtggttttttgtttgtttgtttttgatggaaggcagaagttgggttacaaggcagagagcctcatctggagagcaattaggagcttaataaataaaagaccagtttgataaatgctagaagggaacttgaaagttaaggacgggaagagtggggagctgatcccatttttgaacagtaacatgcaatattgagagcgagcattcagttcaatgcgcctggcttccttcttgtcctgagtttgatactgtgtgcttttaacatcttcatgagccttctgcatcacatcccacctcaaatggggctgcattctgggaacctggtggagaaaaggttgacctccatgcctggggatggacaacctttgctttcccgagtatgctgctgacctgcatggaactgattctttgggggcaatagagaggtgtatgtaatttatcgcagcattctttgagctgcctgggtagactttcaggacaatggattgcacactatgttggctctggcagggttgctgctctcttccttctcgcctctttctcaggagggaatgggaaatccatttccaaattgagctgtgtgtggtctccccaccatcttccctgcacctgaatggttaatcttccagttcacgtgtttctgcatggattgtgtccgagggtgcctgtggtagcagcttaactctgctctggtaattagtgatgaaaggagaggatgcagaaggctcaacctgagaggcagaatgacttcactgaagagtcaagtcagaagaaataaaatttaggggttgacaccaaggtcagttcccaaacccaggctggaagagatacagtaatctattttccataaatcaacctagttttcatatcaagcccctttccccctggggtagctggaaacattttcatgtgtcttttctgaactttcccccacctgggggttgtgcctagtttctggagtctcactgggtgccaagaaatgggagggaggcatgttcattattggctagatgtccacatcagcctgacccttgggcccagtgggggttcttaggacatgacaacctggtgagggcagaaagccccatgtttgtgatattttttttttcctagatagaccatatttttcctcccgaatatccttgtgccaacacagagcacatccagggagcaagcttggttcatacagcttgttcctttcttcgttttaatctgaaagaagaatcttttattcccctgtggcacattaaataaagatagccatacattctttgctttcatctcgttgagaggacatgtttaattccctttcccttgaatccaggttggccatagtgactcacttgtaatcagtagaatgcagtggaagtgacaatgtgtgaaaagcaacctctgcctggaccctttgggaatgctcatcttgcaggaggctggctgctgatggagaagtctggcttcctggagactgccatggtgtaaggaagcccaagctagctacacacatggagagctgcatggagagaaagagaaagagaaaggggagggagagagaaagatgagagagagagagagagagagagagaaagatgagagagagagagagagagagagagagagagagagactcaacaacccccctcctctgctggccagaccagtctaggcaccagacatgtgagtgaagaaatcttcagttgcttccacatcagactccagtaatatagaggaacccagacaagatccatccagttgagctcagtcaatacaaagaactgtgagagaatacttattggtttttgctcctatgttttagagtggcttgttacacaggaacagataactagaacacttctcatattctattctcagtggatttagacatatgaaaacaaaatccaagaggtctcaccagctactaattttcattctgctacatatagcctccaaggagggtagggattgtggagccgaatgcctttttaaagtgggagtggaggctgggggaaatacagagattaaaaattccctaagttatatctacacaattttctcccataatttagacttctagtagtatgcaattccaccattatatccttgttggggttggccatttttagaatttttggatttgggaagtggataggtaaaaatggtgctttgttatggtttaatgaatatttgtaccaagtatttactgtgtgtacaaattatcctgtaaagtacaatgaaaaacttgatgaaaaataagttcacttgagaaaaggaagcttaagataagtgatgaaactggaattacaccatcatgagaaatgaccgtgacagtatttcatccatttccaaatgaggtcagaggacagaaaggtcagcgagggtgtggggagtctgtgaggcctctcatgcagaagcaggatctgcagcgaactctctgccaggatcaggtgaacacatcagtgacaaaattttgataggtggtgagaagggctttattcacacaggggaatggcaagagtgaaaccaaccatggtggtggggcattttgcggagtatttggagtgataaaataaactggaggaaaatatggaaaataaattaaacagaaaacaacaacaggaacaacaacaaaataaaacccagcaacttgaagaagagatacatacagtttacatttctggatttctctgctctcttctatgggctgtgtcctcaccgatgctggctaacatttactgaccaccaaataaggacccgttgacaacatgtcaattgcccaatggcaaggaaccaactctctgagatgatgcatataacttgggggagcagcactcgtgggttgaaagttacgttctgatctgggagggttatcatcaggaccttgtcttgactcacaagagaaaaagccatccttccttcctttcctgagctctttaaaattaaccagtgagttacctgtgggaactttcctccatcctaagagccctagctggaatctttgggctgctgtttttctttgtgtgcacaaagcatatatgtataagttctgcagtggagacccggagtaaggctacccaactggtcctccagacactgcagttcattgtgaggaattccttggctctagtagcctttgacttttctccttctcatcttctaacttgtggccatgatgatgggaagaaaagattgggaggcccttcacagaaggagatgggaactaggaggtgtgggtggacggagggaggggaaagcagggaagattggtgttagtgactggaggcagaagactcagaggactactttctgtgctctgtgagatccgaagactcctgcagctccttagcaatgctgtttatctgctttctgatttccaaccccagctgccttgcattagtggcacagccaaattctcagtatgtatgctagggggcagtaggaagggagaatggaatgtgatagaattgctggaaaaaaaaaagaaattgcctatgtgaaatgaaacacaagttactgtttgctttaatctgtgaccgagtaaaattggcagaattttcgtcaggacggaaagtaagaaccaattatgcagctcagccctactccaacaaactgtcaaactaaaaacctctgccagctctggtcccaccctcactgcaggcatgggcttggagggagatgatggacactttctttctttttttttttttgactgagtttcgctcttgttgccgaggctggagtgcaatggcgcgatcttggctcaccacaagatcgggttcaagcaattctcctgcctcagcctcccaagtagctgagattacaggcatgtgccaccatgcccggctaatttttttttttttgcatttttagtggagatggggtttcttcatgttggtcaggctggtctcgaactcccaacctcaggtgatctacctgcctcggcctcccaaagtgctgggattacaggtgtgagccactgtgcccagctctatggatactttcaatccttctctctgtatcccagaaccgctccttcctcatcccatgatgcaacttttaggggacccagctgattgggttcagatgtaagtggatcactgtaagccctgggacaaagccagggtggcgctctgctaacatggcattgtggaaacccagaactgcctcagcttgggtctgaggcggagcttcaccattatccagtgcagcccactgttgcacacctgggcactgggaggcccagagaggttaatacattgccaagggctatcagttggcagaggcaggggactctaccatgcacttgtgcttaaaactgctggggtaatgttttaaaggggcctctacaaggggtccccgaaatggaactttaagatcagagatggtcggtcttcactcagcccatcgtctcttccttctctgctctccaaaatgaaaaggaagcagtacttctagataacatgagaactggaattctggtttgtgagtcttaaggatacctctagtccatcagcccttgggaatataggctgtgtcccttcagagagtaaaccagtgtcctgtgccgtgaaaaagaaacacattacctttacactgataagcaacccaatgcttgttgtttgtaggaaagctagaaaacgcaaataaaaaggcacaaagcaaaaactaaaaataacttaactcttaactctcacaaatatccccatcaacatttagctttttagccttcaaatctttactttttgtctgcatgtatatgtatgtatgtgtgtgtacatataaatatacacacaaacataaaacgtctgagttttacaaaaatggtttattctgtctattttttttcattttatatttgtcttaaatgtatgtaacttcttacgagtgcatccctgagaggggctctgattttacacccatttttagcatgcatttctgcacattcttgtgggtttatgcagttccatcaggctctgccatgatgcatttctaaacaatgggtgaaaatgttctttagaaataaagagctggtagattggatgtgatattttccttccttcaggaagctgctgtctgcctcaaagagttaaaaaaaaggcagaggatgcttaaagaagaaagctggcttgtaatagctgataatggcgattaaaattcacatcaatcttcctctacatttttagtttcataaaaatgaaacaccctcagcttgagttgctgtgtagtcagaagagatgtaaatataaccaagatgtttttcctccttagtgactaatcgcttgaagaaaggggtaggtgtgatagccggggagcccagcctacatcttccagtctttaaatatttgtgacaaatcgttcttgtgtgcgtgcctgcttgtgtgtgtgtgtgtgtgtgtgtgcgtgtgtatgcaggaattcccactgcacacagagcagttgttttaggaattccaggagctgtgtgggtcacaggcctgctaattgcctgactactgggaaccttcgggtatgacactattgaaatgagacattagaccttcacagggtggagctgtgggccatgctgggctggaagtaaggagtagggtttgagaggggaaaaaaagtagcttggaggaattagcaataaaggtgggtggaagtcttacatttctagaaggtcattcgaccaaataaggctggtgctagggttgttggaagggtaaatgacataatctctgtgcagcacttagcacaggccctcatttatagttagtgctcagtaatttgcagctgttattcctattattgttatggcctctgtcatattacttatgtgaagtacactagactgtaatttcctgtggtgtggctgtgtcgagccacatgtataccaatgaagtggaagacattctggagctaactccgtcttctcgtggggtctcctctcttcctgctcagcctgttatactcccagcctctcaaccttctcaggatcctacctaggcaagctacaccaagtataactgagatatgctttgaagcactgcagaagcccctttaaaacattatcccagcagtttcaagcacacatgcgtgttcgagccaccttctgcctgtctcccatttctctttcctcccgtttctctctcccagagaggaaagatgatttcttattgcaaaaaatgctaccattagggaagttagggatgtggagagaaaagatagtgccttatgggtttggcctgggggagggaatttggagtttttgacaattgagagtcttgctgagcgtggtggctcacgcctgtaagtccagcactttgggaggctgaggcaggcgaatcacctgaggtcaggagttcgagaccagcctggccaatatgatgaaaccccgtctctactaaaaatacaaaaattatctgggcatggtagcgggtgcctgtaatctcagctactcaggaggctaagacaggagaatcgcttgaacccgggaggcggaggttgcagtgagccaagatcgcgccattgtactacagcctgggcaacagagtgaaactccatctcaaaaaaaaaaaaaaaaaaaaaaagaaagaaagaaggaaaattgagagtctctgtagaatctcaaggctatgagaaaatttgaattggctaaagagcttttggggagtgttactgtggtttagaccgtaggctctctttaatgtttcttgaaaactaataatgaagatttgaatttcttttcaagtatttttgctactgacctgtttctctttaaaaatgtgtctgagccctgctgaggctgatacatgtggacttccatggttatattaaggctgcatgtatataatctccttctcttatcttcatttctctgcccttttttagttttcctttcttattagccttgcatgaggacattttccccctaccccagcaaagcctagctaactgtgtaaatggtaatgcatttctaaatttctccataaactattcatccatccactcttggttaggctgcttggccccatcatcctagtggggccaagagctgtattgtcagatgattctcagaaactggagaatccctcagcccaaggctcttgacagacagagtgtgcagaggttctatgcttaattggagccacaggttggttagtttgttttccttgactgttgagttcagggtagccatctcgtatgcaatttcaggaggaattctgtcttccttgttaggctcctggggcgttaagaattccacaagcagaaaccatctctttgctctctgggtgtgaatgtcagctcctaattgactgttgctgtatttttcttggagctgtatactcacaaatcatttaaaaaatatgagccacaagcaattccaattagaccatgaactctaaactcatggaatgccttaaaatgcacataatagtttaagatttattatagaaatgcctgaggcatatttgtattgattttaaaatgggtgacaatattattttaggtgcatatttaaaaaacagtcttgtggagggccaatccagcttgctatgctaattaaacccagtgttggactgagccctagtgtgatcgctattaggattatttgtaagcattctttatttcatccttttaggcacatgatgaaattttactttcttacctctctgaagttaggcaagatatgtatcttattttggccaataaaccgaagtgatgcatgtcacttccaggcagaatgtttagaagctggtgtgggactcaccacattcctttcctgctgctgtgttgactgttgaaacagctgttaagaggaatccttaatcccttcacatctcaaagagattaggagcagaattctcccctgctaatattcattggctgtgcatactaagtgagaaataaacctctgtggtgttaactcactgaccttttggaattctttgttactgcagcttaatctagcctatcctgactgatatatcttggctccagctcttgatttgaaatcttaattccagcactaatttgtattatttcatctaaaattctctgggtctcagtttccccatttctgagatgaagagtttggataagattatctctatagtaccttccaactccaacattctgtgattctacttttaaaaatctgaacattgtactgctcgctaacggttaataattctagtcttttctttctggactctgagagacctgagttcaaacctggcattttgccatttgcttgccatgtgaccttggtcaagttattcagccaccctaagttttatcttcctcttcttgaaaatgggaacgcaattagctcctggggcttacgtggatgaaatccaatgaatagttgaggtaatctaaatatagtacatagaaccaggcactaaggaagttctaagtgaatgcttgttaattaggaatctgagaagaagaggaggtgatgctagcatctcctgatgtggctcaaggagatggtgaatcccagagagtttggcctttctgtttcacaaggcttgttagagaagcaaatattccagatcacagactatactaagaaaaagaagcagatattaaatgaagatgtacttaagttcaggaagcattgattaataaagatagctcatttctgaaagcactttgcttaaaatcttgtctcagctactgtggtcaggataacttaaaaatatatattttatcctttggggactttttgtcagaaatcagttgactatatttgtgtgagtctatttctgggttctctattgtgtttcatttttctatttgcctattattttgctaataccacattgccttcatcactgtaactttatagtaagtcttgaagctgggtagcatcagtcctctgacattgtttgtcatcaatactgtgttggccactctaaatcttttgccttttcacaaaacatcagaatctgactgtcaatatcccactgggattttgatggagcttgcattgaatctatagaataaattgaaaagaactgacatcttgacaatattgagtttttctattctgttcatgggtactagaatatccatttatttagatcttttatttctttcatccaaattttggtagttttcctgatatagattttgtacatattttgttagagttatccctaagtatttcattttttggggtgctaatataaatggtcttttgtttttaatttcaactttcaattgttcattgctggtctataggaaaacaatttatttttgtatgttagctttatgtcctgcaacattgcatttattagtttattaattctaggagtgggtttttttggtagattctttgatattttttacatagacaatgagaacatctgatgtcatctgcagacaaagaaatttttatttcttccttcccaatctgcatacctttttcttttcttttctctcttctcctctcctgtcttttcttttctcttcttttttctttcttgtcttgtgttactgcattagctaggacttccagtatggtgttgaaaagaagtggtaagagaggacatctttgccttgttccctgttttaagggaaacacatctagtttctcactattaagtatgatgttagctgtatagttttaatagacattctttatcaagttgaggaagttatttatttctttttaacaattttaaaatgtggtagacgttctttatcaagttgaggaagttatttatttctttttaacaattaaaaaatgtggttataataaccaaatatagcagtcccaggtttaaatatttactctgccagtttctagctctgttgactttggataagttaattagcttctttgagccttagccttagcatgaagaaaaaaactcactttgttaaaatcatagaaaagattcaacttgtaaaatgtctagattattctgatgtgagtgctttgaagagctggacctggcacgaaaatctggaacaagaagaagaaaaagatggagaagaaagaaccttttgagcacaggctgtggcaaaaactgctaagaagagctgacaaatcaaatatgattccctgagcattgggatggacctgtgtgccagtcagaacagaaatgaccgaatgactaggaacagatacacaaggcatcttttagaatgaaagccacagtacgcagtagaggtaatggaggcagaaaacacccagaagagaaacaaaaagaggcaaacgttactaactccaagctaccttgactgattattcaactgtgacactccttcagaagacactgtttaggattcagatgaaaaactgaccaacgtattctggctgcttcatcttctcctggatgcactatttctttgtctttcttccttaggacccttttgacttctctagctttaatactattaagcctcttgctgtgatgttgactgtatgtctatcttctcatagtgtgtaggggctaccatgggcattagataagcagttgggttttcattctctaccattgggcctggctgggtaaggtggctgtttgtgtcttgcctttgtttttgtatccagtgctcactttcaggcaactattgattttgtttccctcatgggtagctggccctggtattgtttttgttgttattttctgttttttaggtcactactatagtcataatcctccaccaacttatgaatacttactgggcacaaaaacgcctttaataaaatttgcctgtatttgcaattatcttagctttagctactaattattactctaaaacagatatgtattcagaattacatatttctttcttcttttaaaaattttattattattatactttaagttttagggtacatgtgcacaacgtgcaggtttgttatgtatgtatacatgtgccatgttggtgtgctgcacccattaactcgtcatttagcattaggcatatttcatttttcccaaatcttgggtttatcttccatacatttgaaaatatttggataacacaaatcaaagaaacttttaatttctgtgtgagaaccacagattcaaccatgagaggttcctctattcttgtttttctttacatttatctcccatttaaatagctttaatatttctctcatattcttgggatgatgtaattttctgaatatatatcacagcgtaatatctaatactagttactgtttgcaataggaagaatgccagttactgtttgtaatagtaccagttactgttaacaaagcaatatattacttgctgtttaataaaggttttcttattaaagagatgcagtttttgttaaagctgtggtccctaacataacaaaatgtgtgaatttacacaaataggcttgagtttttttatagcagaatattaacagagcacttttatgttgttcaatcaagctacaatctttcttatattaataaatgcttgtccttgacaataaaagcagaactatttagttcaccagtttctcattactattctgtattcatctgcctatgaaggtaaatgaatcaaggcccttaattcaccagagaaatgtatccatctgtccctagaagacataatcctagcagcaaactgagcatttagttgctgttaagggccttgtaattggtttgaagctcctcatggagtttctgggcattcagatgattggattcttccttccaggtagaagaatcaccagagacaattctgttctttcccagatgtacatttatgaaggctgtcccttctcaaaagcaacttctgcaggcataaggtgccaagcaacagagccctttgaacaagaacctcacaaccctcataattaggaaatgaggcctcacagctcccacttctgtttatcatagaggggtcctggaggaacagtgccaaccccagagcaaactgttcccaccatcctggggctgtgcttccaactcctctggcccttgcctgcttccctcattccagcgagcctctcccatgtctctgttctgtattaagtttttcttcctccattgtgtcctaggaccccagttgttgggcagctttagagggcagcccaaagctgtgtccgctgaggatgtttcctggctctgaggatgtacttccaaggaaagctctttcaaggatcgctttctgagacctctgttattgcctcagattagggattgtaaactcaaatacctccagtgatcagggaattgagggaaatggaagaagcggaagacaacagggaaggcggaaatgtggtggactgcagagttcatttttcagggaaaggagaagccaaccagacctttacggtccagcttccacaccctccagcttttcaagggcagctagcatccagattttatgtgcagtctccccattcaaaaacaccaaaacgctatgctgactgatagaacacagcagtcaatggactctgctcctgggctcatcagtcagccatgatcagctcagttaacactatgctgactgaatagaacacagcagaacaaagagtagagtcaatggactgctcccgggctcatcagtcagccatctctgcaactgtgtttcacaccagcattactgttctctcttagctcttcttggcctgaggcattgatttaccttctctccggagtgaaaatgttgggtgcaacaaacagaaaagccaatctgtacttgctgaaataataaggaatttcatgggcatctccaaggaaattcacattaactgattgacagtttgcagacacaggctccatttctctgtgaatatttcggcttcatcctcaatcccactgcacctctgtgtatggtccagagggaagggcaagtctcttctcgaagctctttcagaagagtaaataagaattatcccagaagccctcgtaaagtattcctcatgtctcattggcctaagctgggtcatgtgtcctttcctgaaccaatcagacaagagaggtggggttaccctcataccaaccaagctagagccctcagatgcgattgggtcatagttccttgaggcttatgcctgtaccatgtgtgtgcgtgcatgtgtgtacacgcatgtgcatacctgaggaaaatctgggttcctttaagaaagataaagggatgtatggttgctaagcagttaaccaatgaagtctattataatgtgctttgtattttataaaactgccttttcccagcctggtgttgttgtgggtaacccagtgctccttcctgccagtgtccaaattctagtaattggagaacttgacattgcttccaaatcctcatattgttgttttcctctctctccacatagagaatggggacacataggccaactgagttcctagaacagattcagcataggtgtcagacctcggtttgacagccctgtaaacaaacacagaatttctgagttcatttttcctcatctgtaacatgaggagaatattaactaccccaatgggttgtcaagagatcaaatgcaaaatatgtagcaaagttcttgatatacagtaagtgttaaatgaatagtagttcttattactatgttcataccttcatccctaaaggtagctatccaaactctaaacttgtttagcaatatattcagtattttggggttggtactgttttttccacttaaccaatgtctaaaaggctgaacaaaacctcgcttggagttttaggaattggggactgaaatctgccagacttttttttttttttaattgaagaaaagctattgctgacttgggcaattgatttctttgctctttttctttaagcacaaatttattgttgttttaattttactgctgaacttgggagttgaagtaaatgcatcatcagcagttggctgcagagaatcaaggaaagttatccttagcaaactaaagcaggaacagaaaaccaaataccacctgttctcacttataagtgggagctaaatgatgagaacacatggacacaaagaggggaacaacagacatggaaacttgttgggggtggagagtgggaggagggagaggatcagaaaaaattactaatgggtactaggcttaatacctgggtgatgagataatctgtacaacaaacccccatgacacaagtttacctgtataacgaacctgcacatgtacccatgaacgtaaaataaaactcaaatgaataaaaaaaagaattgagttctttgtctttttgttcccttttttttttttttttaaatctatagaggacagttctgggaggcaaatactattccacttaacttccttatatctaaaaggatctgtaaaattgagacaaagatttaagattaagattattcttaatattattaataatgacatctaacattggtataatactttgcagtttacaaaattcattcacattttacaaagggcaggattttaagatctgtgagatgataaatttctaggtttcactctttgcttatttataatccctatctcaatgcctggtgcataataggtgtttaatagatacatgaatgagccttagaatatctaattggggatacatctggaagttaccatcattattctcccattatggaaggagaaacagtctcagaggaatttggtgactttcttaaggccacttagctgatgagtggtgaaaacaagattagaacacagtggcatcttctgttttcctagtacatactttggggtggggaggagaggtggacttttctgacaagtaggctagtttgtgattgtaaaaattaggttccatagggtgtaaaggggtaaatccaacccgttctgtgagagaatgataagctctcctgacatctgtgtttggtgggacttactactgactctggtccactcagcagcctttgaagagaaggtactgtgggcatcagaagaaacaaaatcatcatattacaaacaacaacagtatatagctgtcatttattgagcagctactgtgtgtccaacaagatatttacaaacattgtctttaatacacaggttacccattaaagactgcattatgtagagtttacagaccaggagatagagattcagagtaactaaatactttttttcactctctcaaaagggttagcccactcttacccagccatccctaatcagacatgtgattgtttcacacaaattcttttgaaatagatcctagtttgccatatcagtgagtctgtagcccagggagagaatttgccttttgagatgcccagaattatgccaagtatcctgccatacccaggagactaacactttccaccctgagggaagatgagattattgcagggggttcagcaatccaacgcacactaaaaattgtctgaaaaatgggcagagaaggtgagagagaggacacaaccccttttacactttggggcttgtggactaaagaaatcccaaacagaacccccaagcctggtggcacagtttagatcagagagtctcaaactctcaaactctctgtggggagacacaagtactagatttttattcctccagtctactttggaccaatatttgtaaaaaaaaacaacaacaacaaaaaaaaacaaaatcaaaaacacacacacaatagaattaaattgatcttaatttctgcacttgttttttggagtaggggatccaatccccgggcctcagaactgagctgcatagcagtaggtgagctgcgggcaagcaagaagcttcatctgtatttacagctgctccccatccctcgcagtactacctgagctccacctcctgtcagatcagcggcagcattagattctcatgggagtgcaaagctattgtgagctgtgcaggtgagagatctaggctgcacactccttatgagaatctaatgcctgatgatctgtcactgtctcccaccacccccagttagttgcaggaaaacaagctcagggctcccaccgcgtctacattatggtaaattgtataattatttccttatatattacaatataataataatagaaataaagtgcacaataaatgttaggtgcctgaatcatcctgaaaccatcccaccaccctgtcgttggaaaaattatcttccgtgaaactggtccctggttccaaaaaggatggtgactgctgtcttggaggaccagtcatgcactgttcatgttctggcatagtccatgggtcacatcttggctagcattggcttatagattttaacacattaaaaatattgcaattgtcttcacattattttagtacagtatttataaaaagaatcaagtcacagtgtactatagataataaggaccagtattgagacacaagttaagttgtgtagttgaacaaattctttcaaccctgtcagtgcatttctgagaccatacaacctcatttagagacagcatcaaaagtctatacttatgcacatatggattttaagcacagattatcaaatcctactgatctttgtattagaccctgctcacgcatttatatcttactacttttcacatgtattaaatactgttgtgattaataaaacataatttaggtaacagctctgaagaatttaaattagctgcttgatttttttttctctgctcaatcagtactgcacgtagagctgctatcctgtgggagaatcaacaaaagtctgacattaaaaagaaatccttttacttgaaatctttgataaccacttctgcacacagaccttgagagagatgcatgaaagttggccaattccactacatttgtggaactgccaataccaggatgctattgtctcgcccggggctctctgttagtgctgtgcgggcttgtggaaagtgcttccttctgttcccagacctcatgttttccatgagaaaaaaggaaagacttcttattcatctggtaacatccagcatgccaggcactggtttaggccgcagggaaggaacctctatcttcaggaggttcaggaggaagcatgtggaaggttcaggtcataaccactgtttactccccagtctctcttctgatgtgaggtatatgggcagtagctggacttctgcccctcatgcacctgactcctgaaccagctcttccaacctttggtactgggcgtatgcaggcttttgtttagtgcaagaactgagcttaagggacaaaaatgacaacagtgggaacttaaatggcttacagacttcggatttccaggcgaagaatgtgggactgtaagctgacttccttggcaccaagcagtgagacatggagggtctcagggtggtgaggcttgctgggcaacgtgcagaggccagggcagaactgcaaagggctattgatgtctcctgacaatggcagaggcagcttgtgtacccaaggcaggaaaggactgatttttctgagttaaggaagagacaattctcaaggaaaaggggcttttttttttttctttgtggtggtccctggagaaaggaaaattttgtgcttttcccatgttgtggaaatcctcctggaccaatgcttctcaaacttcaatgtgcatgcgaattaactggggattttgccaaaatgcagaccaggtgcagcagggctagagcagtgcctgagattctgtctccaacaggctccctcctgggtgagactgaggctgctgctctgtgatagtgttgatctgtaggctataccttcagtagcaaagacctagaatccacctggtggtctggaaccatgggaattggcctgacctggtttttggaaggcattggcccctgtttcagccacggttgcctgctctaatcactgcgttgtctgcagcagcattttcttctctcaagggtcttcagtagtcaatggagatcttgctggagggtgtatattggttgctgtgtttaatccttaaaaaaaatctttgttgtgctgttgagtacatcttctttagggcaaaatgacagcagtatctgtcatgaacaatcaaggcctgctcaatcccatattattacaatgcactgccttgacccacatatctggaatatggtagggaatacttccctatagtacatcctaatgaagagggctttgccattcaatcataaaatgatgagctcctatgttatgtttggtgaggggataatgctgcaaccttttaaagatgattggattacagagtatatgtgtaaaaggaactaaagccaatgattattttctgggcattgaattcagctgttaggtatagctttgtcatttgagactcctggattaaaaaacaattacagacatttaaaaacaaattccatttttatgttttgtctcttttgagctatatcagatggtttctcaggaaggaagttaaaaacttgaagcttattcaaaatcaaactcaaaagtgatttcaggaaaatggaggtttcatatcacactatgtgcttataaacccccgtccttcactcagtgcagcgcatcccaggctttttggaaggcattgacccctgtttcagccacgcttgcattgtctaatcactgcattgtctgcagcagcatttttttctctcaaggtcttgagtagtcaatggagatcttgctggagggtgtggctttcccatccaacttcctgagttaatggtagtggtctttaatgaaaagatcattatgtaacatagaccaaactgatctttcaaaattatttttagtggattgaaaaagtagctcacttaatgcctctaatttcttcatatattttaataggtcacatctctaaaacatttcatgggtctgtcagcgactttgattgaagcagaaattaatcttatcagatatcctgatgagggcttagaagggtctttgctctgaagagatttttgttgtagtggtatttatgttaatcagatttggctgttacatctttcacttgtagaattttagaaggaaaaataacctaactaacttagaaataatctagtccaaccaccttattttaccgaagtagaaacagctaggggtttacccaaggtcacacaggcctgtctttggatcttagtcctgggctcccctgaatctcccacactgcctttctgtgttggtttatggaagggatgcagtggctctgaggaccaaggaagcaggttccctaccattcccgctgagagccagggaatttagttaccactcacagcattgccactctcaccagatgctgcctcctggcagagctgcagtggactcgtgattgctccagggggtcaaagtggcttggaaggagcccacatactgcagccagttggcctggctcaaatcctgtcctgctccattcaagttgtgtgactttgggcaagtcactgaacctctttgtggctcagtttcctccgatataaaatgagaaccttcctggtaggatcattgtgagaactggatgaatgaatatgtaccgaggaattagaaaaagcagttaggccgttgtatgtgttacatgagagtttccaaattgtggacctccacaagttactgtgttgtgaaattagtactctgagtcataaatagcattagacaaattaaatggcatatggattattttgactgctctttttggggtccttttggttccgtgtgtgtgtgtgtgtttgtgtgtgtgtaatggctcatgatgtaaaatgtatttatcattgaggatttgtggttaaaagagtttggaagccccttcttcagggactggagtgagcacatttatttttcagaacatagacccatggtggtgaacaaggctccctgaggacgtgaatgcacaaggtgagctctggctgagacttaaatgtgcttcctttgcagagggaaaccaaagggcagtttctcattgaccacatctgcaactactacagcctgctggagaaggactactttggcattcgctatgtggacccagagaagcaaagggtaagagctgatttctatctggagccattttcagggagtgacccagactgtggtgcactgtgggggttcctctcaaagccctagtgatgcccttgttctcatagattattgggcacatgaaaccctgtgtgagcagaagaggctggcattgtcctcactggactgggtggagcaagagaagggaaaagttaccctaggcctttccagaaggctgctcccatctgcttagaagagagaatgtccctgtgccctttgaacccagggtttcccaaagtccctcaaacaatggctacataaaatttcactatggagaatatcacccctgctcaaccccactcactgtaaaaagctattgaggctgggctctgtggctcacatctgtaatcccagcactttgggaggcctagatgaatggaccacttgaacccaggagttcaagaccagtgctggcaacatggcaaaactccacctctacaaaaaatacaaaaattagctgggcatggtggcatgtgcctgtcatcacagctacttgggaggctgaggtggggcagaatagcttgagcctgggaggtcaaggctgcagtgatctgtgatggggctactacactccagcctgggttacagagcaagatcctgtctcaaaaaaaaaaaaaaaaaaaaagctattggtaggaagagtaattgagaaataactgcttaatgggtatagggttttcttttcgagggatgaacatgtttgaaacttcatattgatggtggttgccaccaaaatgtgcattttaaagtggttaatttcgttatgtgaatttcacctcagtttttttcaacaaagttttgacagatgaaaggtttaagtcacttcagaagcagctccttgggcacaactaaacttgaaagcccctgttttattcttgctcctggagacacctaccctttttggtatctgttggtggggaagagtgagcaggagtcttaccttttgagctggtatagcagcctaggtgtgttcagtgtagcatatgccagaaccacgtgatgtgtgcccttcacatccaaatgacccctggggatctccacccctggctcatggggtgggtcccagccatgggctcagagttcccagccatatgctcagaggctcagtacacacttgggtctctgcttcttactagcaggatagtgtgtgaaggggtcacctggaggtagcctggaagtggggataggacccctctgccttctttaatttgctctcctcctcctcaatgtccctgatcttcctgtctcctctttccacccccacacctcacttggctcttagtttagtgttcactgacccaataccatgaggagaggctcacagagtgtatttctgtaaataagaggatatttaaggaatagattagatttgcatctgatacatagagaatcttattttgctcttggagtcctagggacccaagtttatatgaagggatgcaatgaagtattacagctcagaaggattttggtttcctgtagtactcccagtaacctttggatggtccaggcatttacctgagtgagacgaaggtggcagggcagtggtggggatgtggggctgacatgacgtcagggatgggcgtgtgtggtgtttactgagtaacactggttcccagacctggccctgcaagaaaatcaccttagatgtttgcgtagtgtgaaccctattccagacctcttaaatcagaatccatggggttagggccagcaacatgcacttagcctattcctaatctaattttgatgcagccaagccagctttggtctggggaccatgatataaagacattcatagccataactttttatagcctgtgaagatattccactcgtataagagggaaagaagctcaaagaagttgttacttgtcccaggtttcacagttaataagtggtagagtgagtgtttgagtttaggattatacatcaaagtccctgtggaccaaataaactctggactctattagtcctctagtcaccactgcaaacaggttattttgtgcaaaattcaattctaaatgataaatggccagcctgcagacgtaattctagctactatttagttgagcatctatcatgtaccatgagtgttcttcattatagcctcgtcttgctgaaaagcctttaaggaagggggaaactaaggcccagagagggtcagtggcttccataaggcaagacattaaggaacaactggtgtcacaaaataacaatagtattggattataacccatagaatgaaataaatatccatgagtccatcctaatctaaataattaattaaacaaaaaataaagggaaaacttgggtcagctcttccatacagaagaattttaattaataaatgtagaaggaatgacggaaatagaaaatcagcatacacaataataattattgcaggcaagagctaaaattagtgtgcaaaagtttaaggagaaacaggaaatttgcaaagtaacccctcctttccaaggcattttttttattacaaagggaaaaataataactctatagtggagaaacatgacagatagcactttaaccaagataccaagattaacatcaccagtaaaaacacatgttaacatcaggtacctcctgataccatgcactgagaagtacacatcatctctgtggcattcttcccaataatgcataaccttaatcaaatattgagaaaacatcaggcaaattcaatgtgaggaacattctccaaaataactgaccttcaaaagtgtgaggtcatgaaagacaaggacagactggattcacagtcagagattggagagacacgtcaactcaaggcaatgtgggatcctgaaacatagacaagtatagtagtgggaaaactgggtgaacacagaaagtctgtagtttagttaatgctatggtagaatagcattaactaaattggctaatattggcttctcattttgatagttgtactgtgattacacaggatgctaacattaggggaagatgagtgaaggttatactttatcatttttgcaacttttttcatatgtctaaaattattaaaattttaaactaaagttataaaagagaagtctttaggttgtttattgttctttatattttgactctatttaacgtaacttttaatgcccagacttgggtagtagagtaaaggaaaggatgggggccaccctcaaaacaaaactgtcttatctcatgtagccactaaattgctcagaggtgtttctgaatacttctctctgcattatacagctgttatagccttttgattttgaggatacgatgtgagtgtagctttcacttgggttgcagggtagttgctgtgcacaactgcaaggactttggactcagaaagatatgaattaaaaatcccatctctcctgattagtaagctgtgtgatcttgaccaagctatgcagcctatctgagtctctgtcctgatggataaagcaaataacaataccaacctgtagggttgatatgagaatgaaagataaggtatatcaatgcttagcacatggtacaccttgagtatctggtatgtgttattttcactcttggttgttattattattcttacaattattatgcattggctaggtccaggtgagacatgaggaaacacactcatgattagtacctctaaaacctagaaatgtttataagaacatcttttaaaggcagggggcactactattaagatcattggagagagaaggcggaaaatgggccttggataattagaaaaatggactcaaagacataaacagagacatgctggtatggacattttaaacagatattaattgaccaacatttttttttttcaccagctcctgtatttttctgaatggcaagtaaaactgatgaattatttggatagaaagctaattaaatgagaaaatcaagtgagttagagaagctgaagtgaaagttacctttgccttgggggctggtggtttgcctacaactcgatttacagtaaaccattgttgaatattaaatatttagcacgattgcatttggaacaccatatgtttggcaagatgtctcatgccccagatgctctggaaatgggaaacactgagtcaggaaatgatgactatcttttgctattttgatgtccagggcccagcatttccattattattttttaatttgatatagggaaggataggttgaatactggccagtaaaaaatctcctcagtttctacaacattcatcttctaagaaacttgtataatcttagttgcctaagattagggaaaaagtgggtggtattctctccattttactgatagagaaaactgggacaataagtctagaagtaattctagaagaaggtagtacttggcttaagtttagatttttttttttttactccagtatattctttttaccacttctgctcaggtatttgggtaacttccctttggaaagatgaagttttgaaataattagctggatttcatagctctagtttccatagctatggttttagatgtccattgtcctgggttttccccttatgttcttctaccctttttatttccccaaatccagctaaggaagtctcccctcaccccatgccttagagctgagtgccccagctcccagctcagccagaggaagaattacactaggactgggttgtaggatgctgctttatggtctggagggaggtagtactaaatgcttttggttttaactttggaattgctaattatctgtttaacccatttccatcagtgttgttgacttttctgattttgactcacacccaaatacacgggatttactttggaaatccacacttttggggtacactcctcaagtgcccaatgataggccattgtgtcttaatgtctaccagatgctagaggatttaataggttttctgataggaggatgagctggaaatcatggatgcaaggtcatgttcagtcctgatcccccaccgtcacaaccctaatataattacagccccaaggcttttatgttggtagccagaaggaactagagagcctatcagtaagttttattaataacaggaaaagaccttgtctatgttagagcaatttgctttttctagaggcaccttggggaggacgtggaatggaataaaagctggcccagtgattggaggtttcactctggggatggtgccaggaagccagacagcattatgtcccaccagctgctcctgccattgagaggctgcttcctgcttctcgggataattacttcacagctgctcatcactaggagcaagagtggtacctaagatttagggcagccctgccctgaagaaaagggttgtgctgctgcctcaagtcactgatcacaaatttgtctgctcaatgagtcctcttttgtttacgtttcaaaaggtattaaagatcaagacttcttgggtgtctgtgtgtgtgtgtcaggggcagacaggtacaagtaacttggctttgtgggaaaggactttgacactcaggttaaaaggaagacagtactatcgtgataacttgaaaatggaatatattgtcagtgcttcaattgtggctcaaggtatgaacactgatgcatttggggaaattgtcagattgcttcagcagaaagcagtacttggtctttaactaaaaggatggctcataattgactctgtttacatctgatatcctctcctgaggagggaaatggatgcttgataaaatgttgccatctagaagtcacttagccaacggagatgtgcacattatagtggaaggggaggggcaaacacatgacctggttatctcatttgagccagaaggcaggggctgggaaaatgccattttatccttgtttgagtcaggaaaaatcaggaagctatccaaggtaagaagtttttcctgtgttggtggtgggacagcctgggtagaaatcagttagggaaacaggtttaaatgtggtggttgaagagtaaagtactcactggaggcttccagcaggcaagaacagcagggctgactagagaccagcaggtttggaagtttcaaattagtcttaaaaatatctttaagtctaactgggaagactagaatgtggctatgatgtatgacttggagaaataaaaacagtataggttagaaaatgactattttatttccttcaaggttcagtagtagttgtctgttacatgtgtggaggttaatgatgaggatctagtagttctcattatctattgctgtttaatgagccttcccaaaagtttgtgcctcaaaacaacataattttattatatcacagcattttgtggctcagggatttgagcagggctcagctgggagattcttctgccccacatggtgttgactggatcactcagcggtgtttagctagcagctagtccgatctggaggatccaagacatcttcatccatatgcctggtgccttgatgcagagggctggaaggtagggctcaggggtcctctccctctgatgtagtttcaggccctttccagatgacctctccagcagggtgtttgtacttcttacacggctgcttagagctccaagtataggtggagccacttaccaaataagttgtacaggaaagagaacaggttttgggggaaaagtgataagttctgaacgttttgagttgggatgcatgagagaagttgaggtggagatgtttagtgtatagatgacaatataggtctgaagattaaagaggaggtttgggccacagatggggatttgggagccagtgaagtctttcatgacttcaaagccctgggaagagattcaaaaccagcaaaggagatggacaaagatcagacagagcagaaagaaaagaatgtgcagagagaaacattctgggagcaaggataggtatagactcaataagagggagtgagctgcagttccaagcagggaggcaggatcaaaggactgagtcaggaaatgatgactatcttttgctattttaggaaattgttcaggtgctaaaagctttggcatcatgaagaccagggcaaatcctatctctgccacctgctggttgtaccactttgagcaggttccttacaccctctgtgtctcaatttcttcatctattaaataaggatactaatactacttatgcaatataatttttttaaatgaattaaccatactatcaatttatgtaactggtctttttactcttccatgctttaaagatgtttaaaagagctaagtcacatgattacctatgtaacaatcctgcacattctgcacatgtacccttgaacttaaaataaaagttggaaattttaaaaaaggcccatgaatctagaggctagctgatctttgactttagaacaatttggtggcaatgttgttaaatttatgtggcatgacagcaaatgctacatggtggtaaattccactgtaacaagcttgaaaaaaattccataatttcatttcatagatgattgcattttagttactagcgtactttaaaataaatagtaatacatgttttttttttacatcctatggcattttcaaactatcattttttttttgagtgtctattaaagatttcttgggagtagggactggcatgcaagggtcaggatggctttccaactgtttttgtaaataaggttttattggaactcagctaattctgttcatttacatattgtctgcagctgctttcatgctccaatagcagggttgagtagttgtgaaagagatccatgtagatcacaaagcttaaaatatttactatctggtcctttacaaaaaataaaaatttccaaaatagggaagggaatggaggttgcttaatggatgaagggacacaaatgcttttttttaaagacttcctggcccctcccctgatttgcgcagtgtttcttcttctggctgttatctctcttttgcccatccctgagaccctagaatacaaaaacatcatggctaaaggagtggaaaacactacagtgaaacaatgaagattttcttttttctttctttcttttcttttttttttgcactctgccacccagactggagtgcagtggcaggatctaggctcactgcaacctctgcctcccgggttcaagcaattctcctgcctcagcctcctgagtagctgggaatacaggcgtgtgccaccacacccggctaattttttgtatctttagtagagacagggtttcaccctgttagccaggacagtctcgatctcctgacctcaggtgatctgcccaccttggcctccgaaagtgctgggattataggcatgaaccactgtgcccagcggattttcttacatagattgatttccaaatggaaaaacatttttgagcgttcgtgatctacaggtttgttgatgttgttgttgctgttgtgtcatagatcttcttgaaactggaatggaaaccatgattattggcagctaaataactaggcctcgctatagccttataatctggaacactgataaggctacattcatcagatggcattcttttttccccagaagaggccagaggggctaggaatgacataaattggctgcatgataacacagagactaagttactctggggctttgtctaggtggatgcaagaaatcaggccatctttttagggtcgtcatgggaattgctcaaattttggatctggttactattgaggtgaaaaacaatctcttgtctggggaagtgcattcattctttttaaaagccccctgggttatttaacatatttctctgggctacaaattactctggcttagggtaccaagggctttgagaaagtaaacagagaagtgcgtaatttattctgtaatcatacactgaatcgatttcaacagaagccaaacatttgaagataactaagtgctatattgtttacttttagatgcaattttttttgtcttagcagtggccaaattaaaaatcaatcttcttagtcacaaagtaccaccccatacccaccttctttttccccaaccaagccaaaatgagaatatatgaaagatatgcaccatttgtatgataaggtagaggaaaatgatctctcagggctaagtgcagttgtgcctcgcaaaattaaaaagaaagaaacattcattggcaatatcctcatccttcaggttcatagactgtggactgttagaacaaggaaactcaggagttctggaatcggcctcccaccatctccaccaagatcacagataaggaaaccaaaacatagggttaggaatctctctgctttttcaccccctttgtgtagctcatcttctttctcttgaaactgctctcaaccaaaataaatttgttctaagaaaagtcttgaaatgtggtcaggtagatttcaacaattctgcaaactgggatctttcacaggggctttgcaggtttccagggtttaagcttaaggcaaagggaataaatacccagggaaatgattttaaacaccatggaagacagcttttagtggagagttagggaggctgttttaggtctggtttgaagaagcagaccttgagataaaaatttctgtataagtgatttgttaggaagtgtttccaggaaaagacttgtaggggagtagaggattacaggagggaggcgaaggaggccaagcaagtgtgtaatgctgggcaaagtcatgtagagggtattttgggctcaatctcataggggagttctggaatcagtgtaggccatgccttagagttgtgccatccaaggggtgagggagcagaggtatttatactaccacatctgatagtcattagttaagagctaccctggtttgtggagggtgaggtggggtaggaagtttcaattctctaccctgtggtggactccagtaaactgagggcatccttcctaaaaagcgtcaggctgctggggcttgacagtatctgctgcagatgccttcctggtaccttcaaatcatactaaggggtgaatccactggttcatcttactcccctagttcattttgtagaatcaatgatggggtcttagctttcttatagcctttggaaattttattctaaatgagagttgaggaaaagaagatttcagctacagtaaattagccacaaattcagatattttgttaccaggttctcctttttgcctttcttagggaaactcagtttccagtaaggaaaaagacttaaaaatatcagaacagcatatattccaagtagcaatcaaaaggaaaatagcaatgcaataaatgttctaagacttatatctaattaccaagcatgccacatcatggtggttattttttccctcaagtgtaatccatctgtacctccaataatagcaggagttattggtgtagtccagactccacttcactggccaactcataactctaattggaagaatgagaaaagagaggagagagaggaaggggatgaggagagaggcaaagggctaacagctggtattgcaattgtatagataattaatctcctcatgttgaacagaagggagagtgagatgaggagtcagggagaaagagaaggacaaagtcaggctgggcgtggtggctcacacagttaatcacagcactttgagaggctgaggcaggtggatcacttgaggtcaggagtttgagaccagcctggcctacatagtgaaaccccatctgtactaaaatatatatatatttatataaaatttatatatatagtgtatatatatttatataaaatttatatatagtatatatatttatataaaatttatatatagtatatatataaattatacatatataatatatattatatataatataaattatatattatatataatataaagtatatatattatatataatataaagtatacatattatatataatatataaattatatatataatataaattatacatattatatataatatataaattatatatataaattatgtataatatatataaattttatatgtatattgtatatataaattttatatgtatattttatatatataaattttatatgtatattatatatataaattttatatgtatattatatatataaattttatatgtatattatatatataaattttatatgtatattatatatatatataaattagccgggcatggtggcttgcacctgtagtcccagatactctggaggctgaggcgggagaattgcttgaacccaggaggtggaggctgcagtgagctgaaggctgctgtgagctgagattgtgccactgcactccagcctgggtgacagagcaagactctgtctcaaaaaaaacaaaaaaaacaaaaaagaaggacacagttagactcatggaaactgccatggtaccaagtgagaagtctctttcatggagcctaaagatggtaacagccagtgcttattgagccttcacgatgcaccaagctctgttttaaggccttcttcatgaattaacccatttaaacttctccatgatgctgtaagtgaggaaaccagggaactcgctctaagtccacagcttgtcagtgttagggctgggatttgaatctaggcctgctggctcctaggtctgaccacaatgtcaaccctgtgtgctcagctgggtttgatatctgcctatcatgtatgaactcattcaggctaatttacatgaaatctactttcatcctctgagtagacattagccgtctttttttaaaaagtagatttttaattatttgtgtaatgtactgtgttaggctgttcctgcattgctatgaagaaatacctgagactgggtaatttataagaaaacaggtttagttggctcatggttctgaaggctgtacaggaaccatggtgccagcatctgcttctggggaggcatcagggagcttacagtcatggtggacagcaaagggcaagcagacatctcacacagtgggagcaggagcaggagagaggaggaaggtgccacacacttttacatgaccagatcttgcaagaactcactatcacaaggacagcaccaagaggaaggtgctaaaccattaatgagaaatctgctcctgtgatccaatcactccccatcaggccccacctccaacattggggattacggttcaacatgaggtttggttggggacacacatccaaactgtatcttgcaccagtacatgtaaaaaattaaagttaaaacatcacggaaaatactgaagtcatggttttctttggttaacactcctaaatgtgtgtttccctctcctattatccttccattagtctcattttactgtgtatcatttcggatctttacaaatatatttagatgcttacatatatattttttgaatgtatgataatgtttatattttttattttgaaagaaaacatattaaagatatggtaaagtagttcaaagcctcccaaactttcccaatttctggctgtctcttagtatcttagtgattatttcatggcctccataggccaggagaatacctaacagtttcatctaataagagttagatccaagcaagtagttatgtcctaaaattttagtagttatgtaagacattatacatataaattgcagaaaaaatagtattttcatttcattcttaaacaaccacaatttcttaataacgggtgccggttgggcacccctaggatcatattggacacactaccatgctcattgcttgttgcacacctatttctatgtggtacttgcctattatcacagcaactgctagaaaccaagctttgcaaaatatatgtatatattttatcaaatatacatatttgataccatatatacatataatatcaaaaggaatatagcacagccaggtgtggtggctcatgcctgtaatcctagcactttgggagaccaaggtgggaggattgcttgagcccaggcttttgagacaagcctgggcaacatagaaagccctgccaaaaaaaaaaaaaaaaggaatatagcacaatctaatgttggaactgtgtactcctttgagttcataattcacatggcgctgactgatgtctactgtggctgtgtttctctggggtgacttagtgcacaatttgagaactgattgcaggtataatgataaatttttcagttcactttttgtatcccacaatatgccttagagatctgtccatgttacacataaagatctccctcatagaaaacactgctgcagaatcatccagaatatgaacagatcacagtctatttacccattttcctgatgatggccattaatgttatttctaatattttgtaattttatataatattgcagtgaagattcttgttgggtacctctttgtccacatgggtaagttggagaataaagaacttactgggccatggacctgtcaggtggtttttttttttaacttttttttttttttttaaacagaatcttgctcttgtggcccaggctggagtgcaatggcgccatcttggctcactgcaacctttgcctcctgggttcaagcgattctcctgtctcagcctcccgagaagctgggattacaggcacctgccaccacgccaggctaatttttgtatttttagtagagatggggtttcaccatgttggccaggctggtctcgaactcctgacctcaggcggtccacccaccttggcctcccaaaatgttgggattacaggtgtgagccactgcgcccggtcttttttaacttttaagttaggggtacatgtgcaggtttgttatataggtaaacttttgtcataggggtttgttgtacagattatttcatcacacaggtattaagcctagttcccattagttattttgcctgatcctgtccctcctcccaccctccaccctctgataggccccagtgtgtgttgttcccctctatgtgcccatgtattctcatcattagctcccatttataagtgagaacatgtggtattggtatttggttttctgtttctgtgttagcagtttaatgaatactaacaagttgaacttggccctctttgaagaaatgatttcctgtaattccttgaaacattattgctggcttatttttcctaggactgcatacctcatgactctccctttggggaagaatagctgttctggaaaagtgtgtagagatcaccttgtagaagtgggtaactgagatacaccaggcctgaaaggcaaatgtagggtgtggttaggctaagaggaaaaggatgatagaaactgatctgaaactgcaaggtgtgtttcttaggacaataaggaggccagtttatttagagtaaataacttatttaggacacagatggcaaatacctttcaggcatgccttacatgttccctgtctcctccgtggcagacatcgccaatctatagtggcatggcagacatagccaatccatcatggcactcattctctcagagcctgcacctggttttggaatcctcctcacagccctggtgtgggcacacaaaatgaaactgacttgtcacccctggagtcagagacaagttggagaagcaggatcaagttaggcaagaaagggccgaggagttgaaagaatgccaaacaaggagaatttggaaaacatatttatatttcagactttattagcaaaataactggtgattctcctctgcaaaacaattgcagtaagtattgatattttgctgctatttgttttcttaccttagttctaaatgatcctatttatttatttctagaaaagtaatttaaccaccaggggcctcttttattcttcttctccatgaagcacatatattgaaagatgcggtctaccaattaaactgtacctattaaataataagaactgcatcggccaacaatcattttattgagtattttcacatttcatgcactgtgtatattacatttgttaactttttaaatcctcgcaatggccctaagaggtggatgtgattactgttcccattttatagtcgaggaaactgagacacagagagattaagcatcttgtacaaggtttataactggtaagtggtataatcaatgtgtcttccactgttcagttatagctatataacttctaattagaaggcaataacgagggtcctcaaatgagttgatataattttagccagaagcaaaaagacttgttttttcagtttgtctgtgcaacctggtcggggtaaatatatgtttttttgtgtgtgtgactttccataatgttgaaactcttataagactcccattattgtttttgaagactgcagagatttgacaccctcagtggtttctagattagaaaccactaatttgacgattcagtttttcagctcctgagaaagtagggagtgctcaccgagaagaatatgcattttagagcaaatgatcagccaggaggccatacagttgagaggttaagggcccatgcaccagaatcctgctgcatggttggcttcactgtttatcagcagagtgaccttagtcaagctgtttaacatcctgagccccaggcttcttatttgtaagtggagtggtagggaggactacataagatagcacatggaaatgtttgaacggcacttggcgtttagtaagcgctcagcaaatgccagctcttattatggttatgcatttacatcaaagaatatggataacacaggacctgaggcttactggataacacaaaggagatagagtgaggtgcaagagctcaatggacggtaaatttgctcttctgatttcctctccggcatcaagcaggtgggatgcctccagaaggagagctccctgacctcaggatgggtaccccaggacaccccctgtatcatctctaaactacaggtgtataaagtgactctaagtgacattccctgagcagcttcagggacctcatggttagtgatctcaaaagctgcccagctctcagcatgtcgaagtgatctttgtatgtgctgtagagagggccagccactgggaccagcgtggtgcctacttcaaatgcctgtcagtaacatggttctgaactcccccagtcttttggcttctttattttgtgatagagctgatttttcttcttgatgacctcaggcctctgaaaatgagatatttaagatcatttactcctccctactgtaaaggaagaattgcctctgcatatgatagggctaatgctggcttggcccaatattcctcttaagggaatttgtcccggaagcaggactggatgctgatgctgccttggactgtgattctttgaggtcgtggatgtcaaatgctaaaagtctttagccatatgcggctttcacagaaccatgcagctcaaagaatcacctaggagtcaattaggggtactagaacatcccatttgagagcatattctctctcttgtccttctctcctagcaactgtctgactcacatattacttggaaaatgttaactctgtaatttatatccttgtctgcgctatgattattgccaagttgtttatgttggtcttcagagtgtggaattctggagagtatctatggaaaccgaggctgtactttggaattccttttagttattaggtattcgttgtatggtccagcaatttgacccctgatctctgcttttttttttttcctccctagcactggcttgaacctaacaagtccatcttcaagcaaatgaaaagtaagtgtcaatctgtgactttacttttgctacaatgtgtccaaagatagatactgttccctgacaaactttctcctgccaggggaataatagagttgaagaggtgttggggggtgtgggggcttctctctccccaggagagctctgtattttctcccctctttttctatgaccctcgtctgcaccagcatcctatagtctcctgggcctctctccctcccccccatcttgccctcatatttgatatctgagcaggggctttggaattggatggttaaatacctcttaaacacagccaccaggtacctggttccttttgattatgagggttgctggttagtcattaagtgtgggagggggtgcagtattaaggaagatgggagaagcagatgtgtttggaaactaaaattttaccaatgactttgctgaagactgtatcattattttccattccttgaactccccaaaatgaaaaacaattttttcttctaggcaattgttttaaatctccgatgttctgaacttcttttttttttttttttcgtctctctctctttttaaccagtgagctcttggggaagttggcttggataacaacatctctctagcaccccctggtcatccacctgggaccctgtgaggagggtgttcactggtagtcctgggtgacatgatgttttgttctggtcactcatgccaggctgtagccaacctgcttttatttatggtttggaggagaacttctgaaatgcacctcagaaacttactgcctgcccccaaatccacttatccctccacgtccactttcccagggctctgaaatgcaggtgatgaatcagtttctcgtcagagattaggttaatgcatattatgtcacttgtcgtcattcaagggattctttcattttttgaatatgaagaaattgttctgggcagggttttcaggtgaaagaaggaagaaactgaacatggacgacaaactagcaggcagcgtatctcttctttaactttcttctttttccctgcctccctgtccctttctccctctcttcctcccttcccattcctccttcccttggtccttttcttttccttcccctccctcttccatccttcaagggcaaactctgtctggttagtgaggaaggatggttcagattgcacaagtgcagcagtgggtgtggaaagtccagggaggccaggctgctggagcaaggctggaacagagttggggtggggctggagcagaattggggcaagagcggaagagagttgggatgtgcatccagatagaaataataggacgggccaggctcacgcctgtaatcccagcactttaggaggcgtgaggcaggcggatcaggaggtcaagagattgagaccatcctggccaacatggtaaaaccccgtctttactaaaaatacaaaaattagctgggtgtggtggtggttgcctgtagtcccagctactcaggaggctgaggcaggagaatcgcttgaactcaggaggtagaggttgcagtgagcagagatcatgccactgcattccagcctgggccacagaccaggactccgtttaaaaaaaaaaaaaagtaataagacaggggtcccaggaggctatatagtatgatatgcaggataatgagaatgagctaaaatgcctgagaaaaaaattgctgattcctagcttttattccttaactacaaaatattgatatttttgtttatatatttgaaaatatttagactatttttcagtataacaaatggttctttgactttggttcttattaaataaatgccatgcaatattttccttttgttcttaagccatacccagttttgaaatagaaatttatctttgaaggcatttcaatacttaatagaagcaaaaaaataaactttgtgagaagtttaaaacttgtgagaaatttagcgtttaagagcattttctctataatacagcaaatctgaacaaccaactaaaatgcataatttttttttaagacagggtctcattctgtcaccaggctttagtgcagtggtgcaatcttggctcactgcaatctcacctcccaggttcaagtgattcttgtgcctcagcctcccagatagctagaactacgggcgtgcactaccgtgcctggctaatttttgtatttttagtagagaccgggtttcaccatgttggccaggctggtctcgaacttctgatcttaggtgatctgcctgcctctgcctcccaaagtgttgggatttcaggagtgagccactgcacccaccctaaaacacataatgtcttattagaatggtgtaaagattggcatttgactactggccagtcttaatctaatgacaaatgaaatctgaatctggaaaatagaattgtataaaattcagtgtctgaaccagacagggaaactcactgattctaggactgcaagggtcttacccaccacccaatccctgttgtattgctaaagacattaccgaacaaaaaaattatgtaattttctcaagatcacaaacctagtgtgattgttgttgttgatgatgtctttcagtatgaagaatttctgtgttcttgtacatatgccctagaaatattaactttactgtaaattagaaaatttttaaactatggcttttatattgttaatccagagaaaccaagtccaaccctggggacttgtccatgaatttatcgaaagagtctggtcacagagccccagtggcttcatccttttatgctcgtatcacctttcagtaggcaatggctgcagaattccttggaggaactgtttcttactcacagaggatgataggccttcaggttcttctctctgaccctattaagatccttctgactatggatgttcccaggaatgatgtttcccagggttggctgaaggtcagctatcctgattaacaaacatggcgttattatttttcactagttaaaaaaaaatcatgtttgtgttttctcagtttagaaagatttaaaatgaagacaaaaactatttccttgctcctccctctatatcaagctcaccccaaagaaataacaattgcaaacaatattttgtatatccttccaagaatttttatgaatgtatataagcccccaacatatataagtcctttgataaacagcagtgagatcaatctctatatatttttcttcatcttgttattttttcttgattaattttagaaatttaaaaatatccataattgatgattggcctgatttaaaaggtggttttctgagttaattgtatgtgtgtattttatttatttatttatttatttatttatttatttatttatttattttgagacagagtctcactctgtcatccaggctacagtgccatcttgtgatcttggctcactgcaacctctgcctccctggttcaatctcttctcctgcctcagcctccctgagtagctgggattacaggcacgtgccaccgcacccagctaatttttgtatttttagtagagacagggttttgccatattggccaggctggtcttgaactcctgacctcaggtgatccacccattttggcctcccaaagaactgggattacaggtgtgagccactgtgcccggcctataatgtatttattaagggagatcaaggtggttttggtggcttctggtattttgctattgtaaagtgtactgcaataaacatgctgtatacagtactgcattttgtgaaagtacatctgtgctaaaaattcctagaaatgggccaggtgtcatggctcatgcctgtaatcccagcactttgggtggccgaagtgggtgcattacgaggtcaggagatcgagaccatcctggccaacatggtgaaaccctgtctctactaataatacaaaaattagctgggtgtggtggaacgtgcctgtaatcccagctcctcgggaggctgaggcaggagaatcgcttgaaccagggagttggaggttgaagtgagccgagttggtgccactgcactccagcctgggcaacaaaaacgaactctgtttaaaaaaaaaattcctagaaatagaataagtagatctaaagatatatacattttaaatttccttggtgataaatatctagtcaaggagcttttagccatttaaatctaatgacacaaaatgttacaaaaaatctaatgacacaagtgacacaatctgactccctcaaatgttacgtgagaatgcttctttccccaaaacttgttgaaaatagggataattaaatttatttttcaagtttatgaaggaagagaaatgtctgtttaattgaaaagctaattaattacacagttacttaatttggtatacatttttacattaagatgtttcttaaatcaaagtcttatttctcctctgaacttagaagagatgctaatattttaatttttaaattaacatagcctgtagtcccagctactcgggaggctgaggcaggagaatggcgtgaacccaggaggcggagcttgcagtgagccgagatcgtgccactgcagtccagcctgggtgacagagtgagactctgtctcagaaaaataataaaataaaataaaataaaaaatatattaacatatggtaaaattgacttgatttttgtgtgcagttctgtgagcctttgctcatatagattttcatgaccacaaacatagacaggatgctgaacagtgtcctggttttcatcaccccaaaaacctgcctgtgctgtgcctttgtggtgacatcactgccttccaacaactcgcaaccactggtctgtttcatgccagtatagttttcttttttcaatatcatacaggatgtaatttttgagatcagcttttactcaggataataactctgagattcacccaagttgctgtgtttatcaatatataatagaagaacacaatggaagtagaagctagtctttgaaaatatcaagaaaattgatgaatttttagcaaaatggaggagaggaaaaaaagagggagaagacacaaattaccaatatcaggagcaaatgaagggacattactacagatcctgcagaacaactctaggcacagaaatttgattgcttagatgaaatagatctcttcctcaaaagccatgacttaccaaaactcacccaaaataaaatatataacttgagtagtattataactattaaataaattaggcttgagattttccagaaaagaaatctccagcacatttgctgttcctactgttgcagccagcacttccttttctattcctcaagccttaattaggaatatcttctggagtattctctttaggagctgatgctcacttccagatgtctcctgggttctgtccagaggatactggagggaaaatcgtggtgaatttaccactagtttagcggggtcctttgcattctcatcttcttttcccatctgcttgctactatttacttttcagagtccttaaatagttgctgcatgtattctgccaggttttatagctgcattcagggaaagagatggggtgggttgcaattaacccactctacctggaattagaaccttaaaatcaaacttttaattattgcttttctattaggtgaaaatgcaggtgggcttcatgattgggcagtgctgagggaatacccttctcatttccctatgccattgccatgtccataggtacaaatgtggactgagatgttgatccattttttgtttctttaagagtactcggataacagattgccttcaaacaaagtgttaactgaattgcatatttttgaatgtttggttttgcagagtccttgcttttcatgaaggaatgttgctatgcaacataacagtgacttctcacttataattttttttttgttttttgagacagagcttcattctgtcaaccaggctggagtgcagtggcatgatcttggctcactgcaacctccgcctcctgagttcaagcgattcttgtgcctcagcctcctgaatagctgggattacaggcacatgctaccacaccctgctatcacttagagtttttagccttgactacataactgtggaatgtggcccaatgtgtatacatgaagtggcacacatcaagaggacagatgttgtatgttctacaggatttttgtagctgctcaaattatattagcatgaaaaaacttttaaagttacacactatgactcagatgtgcagaaatgcaatattattttcctatgactgaattcaacttgcttgtgattttcttctttctttgagagcaaagcatttaatcttgtcacttcagggtaactcaggatctgctagtttattttttgtttttgttttttgagacagagatttgctcttgttgcccaggctggagtacaatggcacaatctcagctcactgcaacctccgcctcctgggttcaagcaattctcctgcctcagcttcctgagtagctgggattacaggcacctgccaccatgcctggataacttttttgtatttttagtagagatggggtttcatcatgttggtcaggctagccttgaacttctgaactcaggtgatcctcccacctcagcctcccaaagtgctgggattacaggcgagagccacagcacctggcctaggatctcctagtgttgaatttgatcactttcagaaaatcgctcagtcaatacataatttaaatgtaattgcttgaaaacccatactccatactgtttttttttcttccatatgaagagcttttccctttctctccaccccagaatggcatcataaggccagagaaacttaagtactgtctcggtagtgagggtgacctctctctcatgtacattccttgagtcttccttggtgtgtctcaggttgttggcatctttccccactgcatcctgtctggacgaaactggtcccacctgacctttgagtggggttggtgtgtgctgctgaggccagtggttcctgccatggccttaggatgcaagtctctagacactgtcctcttgtggcctccactccaagtctctttctcattggcactcagcacatctgtattcacctctgggacaggcaggaactgctcagcctcagggaaacttgtgtacgctatctaaggcttcctctctgcctaaacacaccatgccaccatttcttcagtacaaaaatgtcagtaaaattttcagagttccacacagaagagtttcctgcaactaccctggggttccttttatcttgccccctacacctcactgtgttcagccaagccggtagtgttgagggatgctggatccttctcagagatccaaatggtgtcctaaactggcttttgtcctctgtaaatctctccacttgccttccctagccatgccctatgcacaacgaatgccttttctctttggatacgagattaatatcctaaaacaatagctgccttatacacaagcactaactgtttttcaaatgtaatggggaaaaagtactattatttacagtaacaataacaagtaaaaataaatgtcttataaataaatgttaacagattcatgcaagatcagtaggacgaaaatgtgaaatcctactgtagcattgttgtagagtagataaaaaagagctcaaaaaatgaagacatctcatattttggttaatattcttaataaagtcagttctttggaaattaatatatacattcaataattctcaaattaaaaattcaatgagattctttacggcatttaacaatgttcttaagactcatttgcaaaagaaacatgctcgatgctatccagtaaatatataaaaagaccactggtgggtccttgttctgttgaatagtataccaaggcctgtgagctatagcaattaaaggagacatagtaagagacacatatagtaattaagatatagagccagaaatgtgaaaataatcagtggaacagaaaaaagcagttcccattccccacgccaatccattatttatagaatatgggctatggtaaagattgtatttcatacatacaaggggcagataaatttttattcaaggcattcttttaaggcatgatttttggattgttttctttccacttgttggcggatgggaaaaaggacatcgctcacacaattcacaggattaattctagatgtactcaaaagccaaatatgtttaacaatttataaaagttttaggtaaaaatttaagaatatgttttataatcatggggtagcccagggcttcctgaggaaaatataaaacccagaaacaatgaagcaaaatcctgacaaatttgtgcaaaagctaaacttttgaactagaatgctttgtttgtttgcacagagttgatttttttttttttttggagatggggtcttgctctgtcaccaggctggcgtgcagtggtgtgatcttggctcactgcaacctccgcctccagggttcaagcaattctcctgcctcagcctcctgagtagctgggactacaggcgcgtgtactgtgcccagctaatttttgtatttttagaagatacggggttttgccatgtaggccaggatggtctcgatctcttgaccttgtgacgcccccgcctcagtctcccagagtgctgggattacaggcgtgagccaccgtgcccagccagagtagattcttagtaaatatttgttgaatgaatgactgtaaagcaaattaaagcacagggaaaataatgggaagaacatttgccaaacatataacgagtagtaatatgcagaatgtattatgtttgatgctacaaaccaacagatgaacggctcaatataaaaatatgcaaaagactcagagaaggaataaaaataaatgaccaagaagctcacaaacagatgctcaatatcattagctacaaaggaaatgcaaattagaataagatatttttatttactatactgagaaaattgtaattattgataatatccaggtgatgaggatgaggataacacttctggtgagagtgtgtaaactgataaagccactttggagagtaatctggttatatctttcaagattaaaaatgcctatgtctcagccgggcgcagtgactcacgcctgtaatcccagtactttgggaggccaaggtgggcggatcacgaggtcaggagatcgagaccatcctggctaacatggtgaaaccccgtctctactaaaaatacaaaaaattagccgggcgaggtggcgggcgcctgtagtcccagctactcaggaggctgaggcaggagaatggcgtgaaccccggggggcggagcctgcagtgagccaagatcgcgccactgcactccagcctgggcgacagcgagactccgtctcaaaaaaaaaaaaaaaaaaaagcctatgtctcttggtccagcaaatcaatttctacaaatctatctagagcaaaatttattcacgcacaggtatatattatgcaagggtgtttattacagcattgcttataacactgagaaagcaataaaaaggccagtaatttttgcaaggataaattatgtgtgtatacatagtcattagaaaaacaggcagacatgtattattgacatggaaagacttatagacatattgttgagtttaaaaatcagattaaaagaccacgtaaataatgatacttttatataaaaatagaattttttcatgtgactatatagcgtgtagaagaagaactggaaagatgtatacttaactgtggttacctctggggaagagagcataatatagggacatgaggctttcgcattttattatatgtagttatgttacactcatatcttttaccatgagaatatattcttatatgacttggtaataaaaataaaataagcaaaaggagagaaatctttatgcaaaacaaggaaggaagggaggaaggagggaaggaagtagagaaggaaggaagaaaggaaggaaggagggaggaaaggaaggaaggaagaaagaaagcaaggaagtagggaggaaaggaaggaaggaggaaagaaagggaggaaggagggaaggaaggagggagggaaggaaggagggagggaaggaaggagggagggaaggaaggagggagggaaggaaggagggagggaaggaaggaaaaaggaaggaaggagggaaggaaataaggaaggaaggagagaaggaaggaaggagagaaggaaggaaggaagcaggatgcatatgcattaagcatgttctatagaaacagactgagatgaaagaaagctcacttactcttctaaacaagctctccacttaatcctggctggtgcctgtctgaggcctgattagcacagcaaggtagttaagatcctattcttgccctatttaccagagactgtgctgctcccaagcaccctgaaggggcaggggtgcttggaaatggcttctgcatgcaaatcagggtaggcaggaacccccagcctctgcataacacatgcatacaactcagccataatagcagtactgagtcaagttgttgctggctgatgacagtggtgctcagaagttgtgatggcactccctggaaacctgggatggtgtggaattcctgactttgatggtgatagtcttggtacttcatgtttatgtctcattcattagctttccaacatcccccttggggctaatctaacaaatagctctcttgctaatgaatgattttttgtcaataggaaattgagattgagattgagagagagagagagagagagagagagagagagaaccaacagcatcgattttgctctggtgtaaagccacaggtctcatactcatgaggccagcttggatgattgactctcaactctacttgttcttccagttttccccttgctgagtgtgttagtttctctgggcatccataataaattatcacatactgggtggcttaaaacaatagaaatctacttgctcacagttctggaggccagaagtctgaaaccaagttgtcagcagggccatgctccctccgaaggctctagggaagaatgcttcctgccttttctggcttctgctggtttcctgcagtccttggccttccttggcttgtagctgcctcactccacactctgcctccatcttcacatggtgcctccctatgtttctctgtgccctgtgtcaaagtctcactctcctttctcttataaagatatcagtcaatggatttagggaccaccctaacctaatatgaatgcattgtaattaattaatcaattacatctacaaagaccctatttccaaatagggttccattctgaggttctaggtggacatgggttttttagatctccagtactctcagcatttttctttagcctctttctttagcttactacctctagccccctttgtgtatgttgttctgttttgctgaccttggtcacatgcttttgacagtaaagctttgcacaattcatttcttccaatccctgttgtggctgtaaccctgcctccagagtgaggggcagcctatgctatcatcctcattcgtataacctacttgtctaatcataatctccagcactgggtttggaaaatttcttcacctgttccatggctttgtataaaatgttatgcatgttattgattcataataaatgctttctgactaggattaaaatgctctttttacagcacaggtggaagttcaaatgctatttttttacaaaaaaaagcaaaacatacaactgaacacagctcattacataaatcaaaaagtacaaagtccccaagtactatggtttagttttggatgcctttgttcttcccagttttcttcttccaaagcttctttccaagaagagcagctatgatttttgtttcagccatggagtgtctccagcgttggacacctgtttgcttaccttgttctagagacagctcattaggttgggccaggtatctgttattctaccaagttcaactgttcatcaaaatttttatatttgatccttctcccagaaagttaatgcaatttgagcctataaatggtttccatgttgtgctctttctttgtttcccaatatggaaggagaggacagtaacaatagtaatgacaaaaacccttaattttatagcatgcagttctaaatgatgtgcacacttgacaagccatagatttctaatttttaactttatgcttatgcaatggttggtggcaacactgacatcattttgattgggtgcagtagtgtgtgcaggggtttcagggagtacctagcactcctcgtgggaagcggggtagtgtgacaggggtagtggaggaagcagaaggaataggagcctctcctgggggaagtccttatatctctggggcagtactttcaggggctttcttcttccttcaggaatgcccgcattctttcttaggggcccacacgactcaaaactacacatgctggcagcatgagtgtctgaatgataaccatgatgggcaggaggttccatgctcggtatgtgagtactagaggtggttcaagtgtgggccaagtgggtaggaaggctttgttcatgtctccctttggtgggagagcctttataatgcctgatttttggatgcaactttatagtatcaaatctcaataccaagttatgtaagtagttgaatttttctgttacagttgttatttctacatattgatttacacctatcaacatgactccaagggtctggctagttatacaacatcagcagcaaacaggttcctgggtctcttgccttcagtttcatgtgttcttgctaaccttttggctaaaatgtttaggtcattgtaccctcggctcaggcagcaaagctgtcctttagatgccagggctgccaaatatctcttcatatacacacctgtctcatgcccacttcttcctcactcctccctgagagatgacagtgccccctcactctttcaacccaggtaaaaggcaaggtaacattgaaggacttgactttagccatgttggtttcttccctgcactttagagtaacaataattcctatgcattcagtccacaggtctcagcaggctgcgaagtgctttgcagtcatgaactcatgtcatcctcattgtggtctctacgcagtcatgaactcatgtcatcctcattgtggtctctacgacgggtcgcaggccacacctagtcaccacctatgttcatatggcctttggtctaggaataggtttcacatttttaaatggttgaaaaaaaccaaaagatatataagatttttgtggcatacaaaaatgatacaaattcaaacttcagtgttttattggagcacagctatacacacttgtttatgtattggtggtggctgcttctctactacaacaactgggtggagtcgttgagacagaaaactcgagccttccaaagttgaaaatatttattctctagccctttacagagaaagtttgatgccctgctctctgtggttggttccattattattcccattttacagatgaggaaatggaggcagggagttttaagtttggacgcagcaatttgttcaaatgacaaacttgaggttagaagtatgggaccccaaagtctcttttcaagcttctcctgagcaggcataggcaggaagagaattcagagaccaaggatttgtgaggcaaccactcagcattccaatctcccttaagagagttctctgagtgactgtagtcagtgcctacgagtgtgggtgggcatgcctgtgtgtgataaaagcataggagggaactgtaacgagaggaagatgaattaaacatgattttaaaaacctgtctctgctttggaagctggggaaacacagtgattatcatttcagtaagagtgggggaaggatcatcactgttgctgatgatgctgatagtaacagttgttgtttaatgattataatcatttccatgtagaagagagcagtcatgaatgcagcctgcactctctgtggctggcttatttacacatatttctagagtcacagttggagaatgagtgagcaatgttctcccctttaggtgctcaagcgtcattttgcatatgtgcagaggtagtttgtgctttcgaaccatatcattattgaatgcagcacagttgaatccattggcatcactgtgcatggcatgtgcacaacaggaatataggcaacagtgaccaagctgagaataaaatcaagaactcaatccctttcacaatagctacaaataaataaataaataaataaataaataaataaataaatacttaagaatatacctaaccaaggaggtgaaagacctctacaagggaaactacaaaacactgctgaaagaaatcatagacaacacaaacaaacggaaacacatcccatgctcatggatggatggaatcaatattgtgaaaatgaccatactgccgaaggcaatttacaaattcagtgtaattcccgtcaaaataccaccatcattcttcacataactagaaaaaacaattctaaaaaccatatggaaccaaaaaagagcccacatagacaaagcaagactatgcaaaaagaaaaaatctggaggcatcacattacccgacttcaaactatatactataaggtcatagtcaccaaacagcatggtactggtataaaaataggcacatagaccaatggaacagaatagaaaaccaagaaataaagccaaatacttacagccaactgatcaacaaagcaaacaaaaacgtaaagtggggaaaggacaccctgttcaacaaatggttctgggataattggcaagccacatatagaagaatgaaactggatcctcatctctcaccttatacaaaaatcaactcaagatggatcaaagacttaaatctaagacctgaaaccattaagattctagaaggtagcattggataacatgggataaacccttctagacattgggttaggcaaagactccatgaccaaaaacccaaaagcaagtgcaacaaaaacaaacataaatatatgggacttaattaagctgaaaaactcctgcacaaaaaataaataatcagcagagttaacagacaacccacagagtgggagacaatcttcacaatctatacatttgacaaaggactaatatccagaatctacaaagaactccaacaaatcagcaagaaaaaaacaagcaatcccatcaaaaagtgggctaaggacatgaatagaccattctcaaaagaagatatacaaatgggcaacaaacatgtgagaaaatgctcaacatcactaatgatcagagaaatgcaaataaaaaccacaatgtgatacgttactactgcaagaatggccataattaaaaataaaaaaataataaatgttggcataggtgtggtgaaaagggaacacttttacactattggtggggttgtaaactagtacaaccactatggaaaacagtgtggagattccttaaagtactaaaagtagatctaccatttgatccagcaatttcactactgggtatccagtacccagagaaaaagaagtcattatacgaaagagatacttgcacacgcatgtttatagcagcacaatttgcaattgcaaaaatatggaaccagcccaaatgcccatcagtcaatgagtggataaagaaaatgttttatatatatatatatatatatatatatatatatatatatatatatatatatgtatgtattatatatatataaaatatatatattccatgtatgttatatatatacataatatatataatgtaatatatatattccatgtatgttatatatatacataatatatataatgtaatatatatattaccatgatggatagatatatatatacaccatggaatactactcagccataaaaaggaatgaattaatggcatttgcaggaattgaagactctaattgagtatttcaggaatggaaaaccaaacatcgcatgttatcactcgtatgtgggagctaagctatgagctaagctacaaggcataaaaatgatatgacggactttggggactcgggacaaagggttgggggtggtgagggataacagactacacattgggtacagtatataccacttgggtgatgggtgcacccaaatcccagaaatcaccactaaagaacttattcatgtaaccaacaccacctgttttcccaaaaacctatcgaaataaaaaaaattgttaaaaaggaaattggggagatttttcctagctgtaaatcagaatgtatatgagaaacattgtgagtttgtatgtatagtcctgaaattacgcttctgatttccccatgattctttatgatgactggaggaaaacgtttggttttaagaaaaaaaaaaagctgctggccgggcgcggtggctcacccctgtaatcccagcactttgggaggccgaggtgggcggatcacgaagtcaggagatcgagaccatcctggctaacacggtgaaaccccgtctctactaaaaatacaaaaaaattagccggaagtggtggcgggtgcctgtagtcccagctacttgggaggccgaagcaggagaatggcgtgaacccgggaggcggagcttgcagtgagccgagatcgcgccactgcactccagcctgggcgacagagcaagactctgtcaaaaaaaaaaaaaaaaaaaaaaaatgctgctgagtgatgcttctctctcaaaaaatcctatctgatctttaaaagatttgactgaggttgttggtcagaaatagaaagaaagtccctttttccctttcacccaggatcttgctcaatttaatcgtttcctatcaactccatttctgggcaatggctcaatgtggagatgagaaattctgtctctgttttataaacagctgtacctctctccatgttctcagtgttatcaaatcagcaaaatgatgctaccctgggatttgctgacacaaaaggggccactgagctgccccgaggagacacttggctccccagcccttgtctggcagctatcagttggctgtgagagaggagccctgctgttctcagtgcaattacaagctcttggcatttcaaagtggatttcactttttcccccttctctgctactctggtggtatgctctgtttttagcacttacatggctgagttaatgcttttcagctgttgagttgaattcaattcagtcttccccattccctccctcctatttccacctcccattttccttctcttcttctggtaggagtgtttatctcaacagaacacaatctcacatttagataatgccctgtgtacacgttccaggagccatttggatccacccaaacacatctggaaggtagacatgatggctggcactggcactgtgacctctgcagagcaggaaagagaaattaggtggctttctcaagatcactgttgggacatcctcttcaaaactcaggggctcatcctctgggggatttggggttttcaccaccctgtgtacccctgtcaagggtgctgaagcctgagcaccacattagacagggccaggatgtcttctcccatggggtgaccatgctgcccagtctagtaaagatgcacagtggctgttcatgataatactgttgggagagggctccaatacaggctgtgggtttgcgcagatagctccttcatcagacatttcctgtactgattctgcaccaaatgtttggcacagagaaggatctttctttacgtcattcccctttccctgtaatttaagaataagaacacatggaagctggattgcgtagacacttagcagcttggagaaggggttagtcatcgctgcacaaggggattcaggaccttggacatgtcccagggagtaagtgggggcttccatgttgcatctgagaaggctccttttccagcagtcatacagctggtgtgggtgcaccacagtgctcaaatgctggacttctgaccccaaaccattgccaccacacttggggttaaagatgacccccaacctccttgttcaatgacttacaattttaaatgatttgatttttgagtgttttattttttttcaaggtagtaaaaagaattgcacgtacttcatgggtttgattggagtggggatgggaaaagggagcagaggtggcagtcttctctcatctgttacatcttcttggctttattctttcccatagcacatatgaccttctactgtcctggtatttcacatatttattttgatttttatacctgtttacccctactgaatgtgtcctccatgaagacagaatttctttttaacttttattttagattcagggtttacatgcacaggtttattagctggatatttttcatgatgctgaggtttggggtatgaatgatcctgttacccaggtactaagcatagtacccaatagtttgttgttcaacacttgccccctttactttcttcttctagtagtccccagcgtctgttgtttccatctttatgtccatgagtacccaatgtttcgctcccacttctaagtgagaacatgcagtgtttgtttttctgctcctgtgttaatttgcctaggataatggcttccagctacattcatgttgctgcaaaggatgtgattttgttctttttatggctgcatagtattccatggtgtatatgtaccacattttctttattcagtccaccattgatgggcacttaggttgattccataagacagaatttttggccaggcacagtggctcacacctgcaatcccagcactttgggaggccaaggcaggtggatcacctgaggtcaggagttcgagaccagcctggccaacgtggtgaaaccctgtctctactaaaaatacaaaaaattagccaggcattgtggtgggtacctgtattctcagctacttgggaggctgagccaggagaattgcttaaacccaagaggcggaggttgcagtgagctgagatcacgccatttcactctcagactgggcaacaagagccaaactctgtctcaagaaaaaaaaaagacaaaatttttgtctgttcacagctgctaacatttgtgcaatgaatgtacaacatctaaaactgtgtctgttacctataacaatagatcattgctgattgaactaatcaatcctgcctctagaagtagctatcgtaaccaactccagagtccctgaattttattccagatattgagtgggaagaacagaagctgagaaaagaggctttcaaaatgtaaatctcaggaattgctgtagtgatccagatgacaaacttttctagatctgtattttgattctgtcagagggaccaagggatgaatgtgatggcagggcctcagtgttcctctagacatctgcctcagagcctggggtttatcattcacaaattcatttatccacacactcagaaaatcaaccttttatcaataatcagctctggggataaaaagctgaacaagacatattattctataccctcatgcatcttgtcatccataactagatcagcattttgggggaaattatttatcttttcagcttgttccagccctgtgaaggaacattctttagcagtactactttataaaataataatataatttttgcatctattaatagaaccttaagtaagtttcttaaagaaaaagtgccccccctcccccaccccactgcagtggcctcgtcaggcctggatgaagacattgaccttctcatcagttcaggtctctggcactactcctggatcactgtgacagaactgagtggttcttccaacttacagggacactcttcttttattggtgacatggggtcaatgatgttggctagatatgagagaaaaacacagtagggcatatatgatggtagaaaaaaaatagaaaatgttaaacttgaaaagtgcctcctcttgtttttcctgccgccagctctcatcccttctctgccaaggggttcaatagtgagcatatcttgagcaccttgtattgatttcttctgtgatcatatcccagcaaatggagggagatgtcaggaacatagtggcttgttctgtgtgactcagcaacagcagatatgaaaagaattaagactgtgggcctattgtaaactcagggtaaatcaacactgagaggagaccattgacaggagacgacgattatgtccagaatgaagctggcaatcctagggcccctggcttgaggaagcatagagcagacaagaatctacttagggtggaggggccggctggtgaaggccactcagaactgcttcaaatgaagaggaccaggatgtttattttagggaagactcagaaggcccacaagtgtcatcttcagatgatggaaggactcttcatgtacgtgggagaagcactagaccttcctggagcctcagagcttgaagtgaggagaactgggtgggaaggcttcctacactcagacatagtcaaggagagcactggggagcagttctgggcctcattgcctgatcctttggaacaagtgtgagtcactatttgtatctgaggagctccgatgcttattgaagccaacttacgacactaagaagttaatgcttcaggaaggagagaaaggacagctctcgtttggggccattttctgtgatcttcctttttataaattgctgatagtcaggggactttatttttctgctctctttaaaacattttcccatacctattgatccaacaattcaacttttgagagtctacattatagaaataaaaatacaagcatatagcgatctgtgcacaaggatggatatggtttgatgtagaatagtttgaattgcaaaagtgtgaaaacaacctaaatgacaattaaaagggaataattgagtacactctggtgtattcataatatgaactattctgtagttactatagacattaagtgagatctctatctactgtcctggagggatgggcaggatatagcgttaagtgaggaaagtgagagaaacatgtacagtatgatcttattttgttagaataaattaaaaatctctccacatatataatacaatcatgttggcatatatttgtgtgaggatggcaaaaggaggggaagaatgtagatgaaagttgttaatatgggttggagaatttggggtgtaatgaagttggataggaacgaacctgagacagatggggcaggattagagacaaagtgaataatgaagcaggatggcatgtctatctatctatctatctatctatctatctatctatctatctatcatgtaactatcaatcatctatctacctatctctatctatctctattaaagatggtactttaaacaaacttaaaagaaagctgggaaatgtttaaagataaattattttgtattagaactgaatttctagatatcattaaagatgaatgatgtatttttctaagctttttctttgctatgtagaaggtatctattttctcctagtgcttcaggaaaaaaaaaaggttcttttcttaaatcttgggaacataggatcaggttaggagcactcatctcagttaagaattttgctagttgttggtagggaagtagggcgttgaatgaaaagagttctagtgtgtgtgtgtgtgtgtgtgtgtgtgtgtatgatcagtttttctctgctgagatcatcagcaagatgctgctctttttttttgtaatttagatgctatcaaatcctttttaataattgtttttcatattaaattattcttattatacattcatattcaagaaccctgtggctcttcttatgtaaaggattcgtctacatctggagtagtccagacagtgtagaattggatggcagtttaacccctgcgtatcttgaaagatgaatttgggtaaaataggatgttgtttcatattcacatttggatgtagactgagaactgatcccaagtagctttactgatacagaagcaaatgagtggtatgtccaatccatggaaatagtaatgctaactattttatttccttgatttaagatgttcattttatatgttaactgaaatctgaatgcatctcactacactggtatgcatttatcagtgtaatattacaagtcggtagtgatcttataatggaagatcttggaagtcctgtagaatccccattggttgggtgagttctggatatttgaggcaaattagaacactccagaatcatgaacctcaaccagaattgcagcctacataggattttcccttcagggaaaccagaaagttataaaattgttttcttttcttttttttctttttcttctttctttttctttttctttctttctttttttttttttttgagatggagtttcactcttattgcccaggctggagtgcaatggtgcaatgtcagctcactgcaacctccgcctcctgggttcaagcaattctcctgcctcagcctcctgagtagctgggattacaggcatgtgccaccacacccagctaatttttttttttttgtatttttagtagagatggggtttctccatgttggtcaggctggtctgacctcaggtgatctgcctgccttggcctcccaaagtgctgggattacaggcgtgagacaccacgaccagccggccaacagtgtttattttcatacaggtgactgcctttatagatagataatactaaaaatctgcaaagtaggatctctgcatggctgactccatcttttaaaccttaattttaattcagagacaccatcattttgggaaaactagtcatgtgcagtgacatttttttttccacctcacaggctaaaaaaatcttttgtgagcccagcaacttgaatggtgcttatgtgcaatttgtttgtcacaaggggtgggaagaatcagaagagaagtgttctctggagctgtgtgctggagagaatgaaggaatgaaggcgagctgtgatgtggaaaaatgagctcactgactgggttgctggtattctacatttgctctgggagtcctgtcaagcattttctttgagttttgttgttgctgtcgctttgttttcttgggcatcatatctgcttcttccaaaacaatcaccccctcctggcccccactccccaggctagtctgtcaggctgcacggctgcctttcccgtgtgtgtttgaggccatggtcttttgctgcttttctcatgccttttctttatgatgtttcagctcatccaccatacaccatgtgctttagagtgaaattctacccacatgaacccttgaagattaaagaagagctcacaaggtattttttgtttgtttgtatgtttaacgtgcacctttaaccagccagaatctctttggtcttgcaggctagatgggcctcctgtctagagctgaccgtctcagtgttgcaagcttggaattcagcgtttttgcttggaatgcttctcttacactgaattgttttgggattttttaaaaaaacaattgtcattgagagtgtaattaactgcagaaaaaagcactggctatgatgggggaggtgttctctgaaaacatctgacagtggggtgctaaaaataaataggaggcgtctgtcttcgagacatgggcaaattcatacccagtacagtccctagtctatcttttggatctcagcttttctgggagggaaaagatcgcctggcagaatgcattgtctgtcatcctgccttccgcttgctgaatgaccgactgggaggcaggcttccctccactcagactcttctcagcccaactctccgaatttttgagtccttggacctcctcccttctcacctccctctgttggggctacagcttcagcgtaccttctgggggtttggcttccttgaataacctgggcacatgttgtgagcaggattctaggaggatgggagagagagcgctgctgtgcgcttaactctagatgaggctctggcttggtgaccacaaaaatcacttgctataatcatctctcaaaataagctgcttaggtacagatagatgcaacagaaaagcaagtgtaatctgctctgatcattggcagggggaggttttgggttcttggatattttgcttccttgttattatccagggtctctggtaagcttgaccattagtggcatggaggtgactttgggagggagcaggtggttctgctctctattattaatttcctcacagtcatttagtaaggtttgtgctgggcgtgggagatggggagagagggtgtgtgtgtgtggaaatgagggtaatagataatggacgttataagcagtggttgggattttgcaatctggcctggttttttcttttcattgaggtaaaattcacatgacataaatgtatctcaccattttaaagtgtataatgcagtggcattcagtacattcacagtgttggacaaccctccccaccatctaattctagaagttttcatcaccctcaaaagaaaccatgtaccccatagaagtcactccctattctccaccctagtccccatccaagcccctggcaaccactaatctacttttggtttctatggatttacccattctggacatttcatgtaaatggaatggtatagtatgtagccttggtctgattttggattgaaaattttaattatttatttgataaatttgttctcacttgctgttactacccagggggcagtgactgaattagctgccaaaaagagagagagagagaagagagagagagaggagagagcgagcgagctatttttcctgccctcagggtgctaacagtgtaattaggaagatcaaatcaaatcctaatgcctcacttttgtcatttgttctctttataattttgtctggaggataaaaattgagtatgtgtcacaatataaattaaggatggacattttgttgttgaaaaaagtcctatttgaaagtaaaagagtacagcatttcagttaataaccctagtttctcgcccctctcagttgtatttgctaacattttcctacgtttgactaaatagctcaggtatgaatagtggaatatcgtgaccctttgagtttccaaaggtaattaagatgttccactgcccttatacaagtagaaatggacttttcttagtaaacacagtccttagaattctaaacgaattgagaaactgtggaatgccccaggtacttatggtttgaattcttatcttgaaggcatttagtttttcttgtatgataaattgttattttattataagattaatctaaagtttgagaagaatttaatatgtgagaagttacgatcatattcatgaccatgcttaagagtaaagaaatgttaagaaaaaggcaaatttaaaatcacaaaataataaaaataaccacaaaagtgatatttgaaatcattttttatcctttatctctccatataagcaatcatcttacaatcctttagatttctggggcttttgtaaatgctctatacaattgaatgttacaaaaagaatgttgattttaattttttttagaagtagcatcttccaatccatgtagagatgcaattttattaatggcagcacaataatttatgactcagaccctcatgggtttttgttgcttaatctttttatgcaggaatgacactaaagggagatgcattattttttggtagctattatataaaaaaaatgagcatccttaatgtgaaaccatttacaagactcagtggattatgttgaatccacagtaattcttgattatctcctgagatcactgatatgggcacagccccaaagtctgacgtgaaagctgcttttcttttctcaggaagctcttgccaaattgatttctgagttatgggattacaactcaagcctctcatttatcaataaatagttatttgaaactatttttcatggccaaactcatcaaaaagtagaaagaaatgcttttatgtttgatgcatacattgaatacacagaaaagaaacttcatggtatttggcctggtagtttacagtccttaaaaagggctaagatttaatcatttaaagcatttgtgtgaccttgctattctgaatagtcttgggcctgtcctcaaagtgaggtccctgggccagcaatgtcagcatcccctgggaacttgttataaatgcagattcttggtgtctgtccaagacctactgaatcagaaacctccggcagttgggtccagcaatctattttcataagccctccaggtaattctgaagcatgccaaattttgagaaccaccactctaagacaatttggattttcaaaatagtttattttgacagatattgaagtgtacagtttagtatgtgcacagatttgtgccactaacaccatgatctgattccaaaacattttcatcaccccagtaggaaattttgcacccaagtggtcatccagtattctcttttctcccaagttcctggcaaccacttatctgttttctgtctctatagatttgtccattctggttgtttcatataaatcaaagcatgcaatgtgtagccttttgggtctggcgtcttttcacttagcataatgctttcaaagttcatccctgttgtagcatcttcagcttttcatttttgttatggttggatgatattccagtgtatggaaatgccacatttcttttatgtattcgtcagctgggggacatttggcttgtttgcacttttttttttttttttttttttttgagatggcgtcttgctctgtcgctcaggctggagtgcagtggtgtgatctctgctcattgcagcttctgcctcctgggttcaagcaattttcctgcctcaacctcccaagtagctaggattacaggcacaagccagcacgcctagctaatttttgtatttttagtagagactgggttttgccatgttggccaggctgttctggaactcctgacctcaggctatccgcctgcctcggcctcccaaatgctgggagtacagacgtgagcctctgtgccctgccctgttttcactttctagctataatgaatagtgttattatgaacattcacatacaagttttggtgagggcctagattctgatttcattgggtctggggtaggatccagaagcccactggtttagaaccttattactcaaagtgtggctgatggagctgcaccacagcatcccctggaacttaattaattaattaatttctttatttttatttattttttgagatggagtcttgctctgtcacccaggctggagtgcagtggtgcgatctcggctcactgtaacttctgcctcccaggttcaagtgattctcctgcctcagcctcccgagtagctgggattataggcacccaccaccacgcccgactaattttttgtatttttagtagagacgaggtttcaccatgttagccaggatggtctccatctgttgacctcgtgatccacccaactcggcctcccaaattgctgggattacaggcttgagccaccatgcccggcccccctggagcttattagaaatacagaatctcaagcccatccaagaccctttgaatcagaatcaattttaacaaactcttcaagtaattcatgtgcacgttaaagtgtgagaggcactagattaggcagctagtctgagtccttacccaatgagtataatattgttcctttgacagaatgcatagcaactccaaattagaaacttattagggactgcctttatcctctgcacacaatttaatactaaactggggacaaagattgtcatttgagcctccaccatgcccccagtgcccacacagcacagtgcacagcataaagcagatgttagacaaagatacagtgaaggaaaacatcagtgagccactgattccttcaatggatccagtgtgctttcagtgaaccaatggctcagaaacagtgagctccagtgctctggggttgacagcgtccctgtgaccttagcacactaatcactctctctgattctctatttctttgcctttaaaatggggattacacatgtcgctcttcctgtggctgagtaaagattaaattacttgggcgctagagacgtttattagttgaggttctccagagaaatagaaccaataggctacacacacacacacacacacacacacacacacactcacacatgcacgcatgcacacacaccctttcatacataatgagatttattataaggaattggcccatgtgattatgagggctgaggtattccatgatctgctgtctgtaacctggagacccaggaaagccagtggtgtagttcaaaggcctgagaaccagagagtcaatggtgtagattccaatccaagtctgaaggtctgagaaccaggaacactgaggatagaagattgatgtcccagcttaagcagtcaggcagagtgaattcagcttcctctgcctttgtgtgctattcagtctctcaatggattgcatgaggtccactcacactggggagggtcatctgctttactcagtccaccaagtcaaatgctaatctcttccagaatcaccctcgtccagaaaaaatgttgaaccagatatctgggtatcccatggctcaatccagttgacacataaaaaattaacctcacaaggtgataactgggactgattgagagatgctccccacaaacccccaagaagttgagaaggagaaaaaacattggtttttgagagttaaactctaaaggaagcacggaaagaatctgcacacatctgtaaagttactctgctcagaaacaacagatcccaggcctgagcctggaatgaaagaaccttgagaagatgaggaaattggaagagagcttgatcagtgtggagtaacagaaaggacagggacaaaatgagcctgagccaggggttgcaacctggcacactgctctgctgcctgcctcccaccttgctatttttctggaaaaactggacaaagtgcttttctagtggcagcactaggctggagctgtgcagtggctgccccctttctagggagctgctgtgtcccatcctgcttccagcacttcttgcaccagcacaggtgacttgcccgtgtcacaggccactgtgtgcctggcctcaataggcatctgagtgtgccatccctggagtggggagactctacacagatgacagctctagttgtgaatcagttagttgcctttctggcctcataatgactgcgtctgtctgaggttgattaatgtgtctctctgcccctaagaaatgatgaggctggccttatgtatggattgagtccgtttcctggctctccgtttgaaacagagcttgggcagcatgtgcctgagatgcagctagtgatgacggtggccatggctgtcctcgtgcgggagctgctgccaggagctctggccactgggtcctgtggctttcctcatttcttctcgtgcctctttgaaaaggccgagcctgctcagctttggaggctgataagatctgctcggcagacacttctgattttctgaattcagagggcccctctcagctttcctctgcttgttctacaaagggctgggcatgtctaagccagtctctagagctgggaaaagctctggtcaccatgggagctaagcatgaacaatcctacttcttccagacttcagccaaaagttagagtgaccatttctccttttgtattgcagataccttttataccttcagattaaaagggacatttttcatggccgcctgctgtgctccttttctgatgctgcctacctgggtgcctgtattgttcaaggtaagtctggccacagctcacccacgccacctttgcactgtggagctctggctgtttcaagcctcccttctctcccacccgtggccatcctgcctgtgtctgtggctggagaccatgtagggctgggtacgtagcaacagaaccccaactcaccttcccttccaagccagtggggtcccggtgaaaggctgggctgagatgttcacaggagcctctgcaaaaacagagttgctcaagatcccatgagtcagagtcaaaagctctctttcaaaggggctggaatgtggaatgggtgggtttataagaagctctgaagggatgtgggtattgtatgttctcagttccaaatgctaggtgagaggcctaatggacatattgagaggggaatctgcatctaggaagataggtgttaaacaaaggggtcatccctggaagcatttttgtgtctatctaactatctatctatctatctatctatctatctatctatctatctaatctatccatccatccatccatccatcctatctattcgtgtgtgtatgtgtatacatacgtacatgtctatcatgtctaattcctcagctcttctagctgtgggcatggtgaggagagcacaagtctcataaactgtcacaccaccatttgaatctttcttcccatttcctggatggttcaccatggataagttaccaagttacctaagctcttcagggttcagtttcttcatctattaaatgggatagtcatcctcccttccttgccatgtgatttcagagaccactctgcaccaggccaggggtagcgcaggcccattagaagtgactactgttctttttccagttgaacaaaccctaggggaaatagctaatgtgttgatgtcggttgggttctgaatgtttccacctagtaaggaaagtggtttgagggaaggaggcctccagggcctgaggcaccatatggccacggatgggcccaacacccaagtgaaaatggctcaggtgttctgttcccctgggccagttgagaggcagctggagggactcagatgatccagctgttggtagcatgaacattaatgacatgtttatgagagagaaggcaggctgggggaaagagagagagagagagagagagagagagagatgactatgtcaatcttccaatggatctggaataacacaggagcttctgatgggccattagctggtcatcggttatgatcatctgcctaccacaacactgagcttgtcactgattgagaaacctgtcattctcctggggattcccctgtggcccaccgccctccctgtgggatgctctgtgctgtgaaatagttcctttgatcctgttctcagttgtgtttggtctctctgagaattccgaaatgggtgtgtgtgttgttcttcacccccttccctgggaacagcttcatcctggacagcagattttggcagaggtgttaaaacccttgggtattttcccatttaaagcactatggttgatactgtaatgggaaacagccccttcaccgacactgaagtagagaatgtgtttctgaaagctgcctctcttaccttggagtgaaaggactgtaaatcccatagttcccttcctccatggtgaaggctgcacatcttgagttagggtgcactgtcttaggtaagagacaagggaatcgatactaatccaagcaacagaccagcatatgaggatttcagaatgcatttaggcattagtgaattaccatcaattctccaaggacatgctcaatatggatctataatggaaagctcgccatcctgttttctgtttgaaataaagccacggagcctccatccagacgatcagggccctattttatccctcattgctattattactgaccacactcacacagacactgtggagaaagtagagtgggaaatggactggcagacctcaaaaagaccttttggctctcaaatgcagtgctgtctgtggtcatttatagcaaattcagtaaaagtggttcataaaggtctgattctcgggtgagtacttcggcagcactgcaggtcattcacaaatacagatatagatgggcatttcagaactgcttattcttacagagtaatagggaagatggagtaagtgattagcaatcttattcttacagagtaatagggaagatggagtaagtgattagcaatcaggaggcactgtcgcccctcatcgtcttgtttgctaatgctctttcaaggagtatgttttaagcttcagtatattctgagtttataaaaaacagtcaatcaagttggatgtggtggtgcacacctgtaattccagctacttgggaggctgaggcaggaggatttcttgaggccaggagtttgatactagcctgggcaacatagacaagaccttgtctccacaaggaatacaaaaccagtcaatcacctggagttttgctgcctgtacatactgaatccaacgagcatatttaagacatgcaatgcattttctttcataatacaaattgcaaaacaaacacagaatccttgggatctatttatattctttcttggtaaaaatatctttcctgttccttttacaaaacaacaccacagaggaattcaacttatctcctctgcctggtatgttcaacccctgtagaaatcttgactcctgctggatattcagaactcagtcccgaagtcacttcctctggtaagtctacctggaccactcgagctaaagcagctccctcctgcacgtcattctttctcagagccctgttgtgttttcttgcaaacacttagatcttgagttgtttttgggcttattgtgcatttcctcttatatagaatctaattccatgggagtaggatctgggtgctttttcacagcactcttcctgtgtctggcacacagcaggttctccactaaatatgttaaatgaatcagggcacttgcctgaaatgaatcggggcacttgcctaaactccaggtgattgacaggttttgtatttttttgtaggcaggatctcactgtgttactcagggtggtctcaaactctgacctcaagcaatcctcctacctcagcctcccaagtaactgggattacaggtgtgcaccaccacacctggcttgattgactgtttttaataaactcagaatatactgaagcttcaaacttgccctgattaaccatggttaattaaattagtcacaaccatttaacgtttaaatttaacatttcgttaaatgactgtgcctgattcatttaacatttagttaaatgattgtgcctgattcatttaactatgggaaagactggttggccgcctgctgggatggtatcactacctcattcattcatttgttcatgtgttctccaaatacttcctgagaagttgctagggggccacatggcaatacaaagttcctgtgggaagatggataaggaaacaggccattgtgaccctgcgttgttggttagatggaggaacacacaggcccagtccctgctatgagtgtcccaggagggctcctgacttagcaagcatgggtcagggaaagctcctgaaggagttggccctggagctaaaggtcctgcatctcaaattcttttggaatgagtcctttccaaaccaggggaaagcctgttgctttttagacttactgtttctgaccttactcacccattcacttcaaactcattggatttttctcttagaattgaatccttttagaaaagtgctagagctggtttcaaaccgcagggcctccagttgtatgtcatttgtcacgacttcaacttccaagtcatgagcaggagggagaaccatggcggcttacccaactcctcttggtatgaatagctagaaatctttattcattttaaaaaacctgccttctgcttaaggagaggtcagagttaaagacaagctttagggaatcagagcagggcctgtgatggggacagtgttaatcttgtcagcaatccggtgcagtcttcacagcatttcttctctaacttttctaacatttgcagtgtgtagcattgcaagtctataatatctcacaagatttcctggaaagaaaagggcaccctgaaaaacgatgccctccctcaccaaccactctgcaagctgacatttgcattgaagatgacccagtttcatattggtggtccattgtcccatcacctttggaaattacctatggaaaatggaagcactgggatcgtccatctcctaaatattaatgcctgtagctagctcacaggggcacaagcgtgtatgtgtgtaaaggtggacatgttacgtgtatttcttttggaacataggttgagttaatcatcagtttatggcccacctctcatcattggtccctttaggcccatggattgattgattgatttccctttttccattattctccatttccactcctaagggcaatgctgggttcatatacatatctttgtctttgtatccatccttataaaatgattaatattgtttttttgtgtctatacttctaaatttcataaattaaatgatgctatagaactcattgtattccctccttcttacgctcagaacactgcttttgggatctgtccatattgcatacgtacatcttattttgttgattttaactgtgacagagtgtcccaaagggtgcgtcttccatgttttacttatctagctgtcccactaacaataaacacccaagttgcctccaacttctgactattatgattaatgctgtcataaaaaaaaccttgaacatatcctttttttgcacctagagtttttctaggaaaaatgcccagaaatgggattgctaggtcataatatttgactaaaaactcccaccttgctctctggaggagcaacatgcatctagcacccttcagcagtgcacaagtatttttgttttcttgtgtctctgccaacttcctagttttattgccaatgttataggtataaagtaacatcttgttttggtttgcatatctctaattattcatgagtttgagcatctctccctacactggcccttagggtttccccttctttgaattgtctgttcattatcctttgaccatttctctattggtcttcctgtccattaaaaaatgatatgtagggatttcttctttattctagatattagtccttgtcagctttagattgtgaagatatgttctttcaagttgtcatctctctattactttgactctgatgtcctttattaaacagaaataaattttaattttggtatgatcaaattaatcaatttcccctttgtgactgaaagtattttaggtcttattttagaagtcttccctcgctgtggtatatgttctaggttgttttaagaactctgtaatttgaattttgtccagaagctttaaagagctttgatttcctcctggttatatacttttccagtcattggatgatgtgacaatgaagggacagtggatacaaattacagagttggatgtaatttttcagatgcactcaaggcatactaatttttttctacttcaaagtcatattggtcatcaggttcttctaatacaattttcccactatctttagtctactctcctgggccatatcttttgtttcttccagagacacttgcttcttctggctcatattccttagcatgcttgtggaaccaatagaaagtattcttgatgccagacatcacctttgcccctccatgctgtggttcacacacccatctctgcttggccttctgggtgctcagagatgtgtaggcatttctctttttacccttgaagatcctctggaggtgccctttgttagtgtcagctgaagaatcatgaagtacataaatttggaaagaagagctttatttctcacaaagggttgcagcttgcagggtggccattctgacaggtggggaaacgtagactctggccagaagctggaaacaagcacttcaagggtgggaagaataagacaaagatttatgctgaatggggtggccaagtatacgtattcaacaggttattataggggctgtgaatagtcacaaaaggaaggcacaggcatgcatagtaggctagcacataagcaacatgcatcccatgttcacttttgggtggagacttaacatttaaatgtattatcattagggcctatacaacaaaaggtgaggcagaggacacaaaggccctctgtgcacagcctccatagactggccagaaccactttgtagtcagtggtctcttaccaggaaggaatgctgatcagttactgtgtcaaaaccacaaaagggaggggcagcatcggcaattggttgatatcagtggtgcagtctttcagaagggctggtttctgtttaacccttggtgtaggaaacctaatagcaattaatgagggagggggtataatgaggtctgacctcatcatgtctgggaactcagtttttaagggttctctggggcctcttggccaagtgggggcaatgttcagtctgttggggggcttaggattttatttttatttctcattagactccagcaacaactttaatctagtatgctcttctgttttagatgtatactccttaatttcaagagcaatcaatttgtttttaagtgcaatcccgctgggttccttctagtgatttttcaatgaataagccacacctgcataagcctcagagcaggcagctccagtcagggaattcctgacacagagaatattagctgtgaatggaaccccgaggaatgtccactggtttccatctaaaggtggtaccacctcctatcctggggagcatttggaaatactggggcgggggcattaaatttttaaaaaatgtaaaacattttaaatcaataaacattatatatatttatggtatacaacctgatgttttgaaatatgtatgcattgtggaatggctaaaccgagctttacatatacattacctcatatacttatcatttgttttggtggtgagaacaattaaaagctaccctctcagggatttttaagtatacaatacgttgtttctaattatagtctccatgttgtacaatgctctcttgaatgtattccttctatctaactgaaatcctgtattctttgactaacttctgggagagagcagttttgatggtcacagtgcctgggtctgctgctagcatctagtacctgaagggtagagctactaaatgtcctacagttccttagaaaatctgaaataataaaattgttcagccctcaaaatgccaatggtgtccccactgaaaaacagtaatttaaatcctttattatactgataaagaaggcgagacccagagaagattctcaagatcccaagctcacacagctcgatctgaactggaatatgagcctctagacactcaggctttctctgggtacagatacatatttttgggtgagtttattccagcctcttcttttggatggcaggaggcactccatatgcaccctgctcatgttattgtttttaatctttctctgtctctttattttttcactcattacagctgagcttggtgattacgatcctgatgagcatcctgagaattacatcagtgagtttgagattttccccaagcagtcacagaagctggaaagaaaaatagtggaaattcataaaaatgaactcaggtaattactgagtagacatttgtgaaaatgataaaggggagaaaatattcttactgcagggaatgtggaaatcacatcgtgaaggaggaatatttgtaatgtatggataggctgttttgcgtggcagcgcaatttttctgggcactgtcaaggacaccctggtgtcctccgtcaataacaatctcaacagtttggagtcctatgagtggctgtttatgatccatcagtagttattagatccatgtattttcttacacatatggatttctaaacaccctgagcttctgaaagtggaatctaaggtaaataagtaaacctttctgatttgaattttgtgttgcctttttcccaccggtggccatagctggaagcattgactccaagtagaatagaatccattgggaagattccctttgctgagctactttcaagatgacagatttagtgtctgatcctctttttctcacctgcgatgcttcaatgatagctgcacagtagcagtggtagaagcaaaattgcatagagcattcaccacgttcctaacactgttctaagcactttgcacatattaactcgtttaatcttcacaacaacctaggagataggttattgttattctcatattacagatgagggaaccgaggcacagagaggttaaacaacctacccaaggtcacgcagctagtaagtatcagagctgggatttgaattctggcagtcttggtctagagtctgtgcctttatgccctgtgtgatggttacactctacatgggctgctgggaatcaaatgaagtgtgtgtagggatcattgccaacttggaatttaggtaattcaagtagtctagtctgtagctagaatttagatactgtgcaaactacagaaaaaaaaatcattttggtaatagcaagcatgggcagtgttatgacaagtgttgatgaaaaactgcaagaactgagatgcttccatgttctaggcctctggtaagtataaagaaaattgcatcattggattatgcattctggaacagacaactgtcccggtgtgaggaaattgttctagctccctcctttatgcaggcgcgccccctactggtgagtctgggaagagtatatgtgagggcattcaaggtggcagcttatttcagctgggaaaatatgacgcttagtcttagagataaagatgattagacatcaaaacattgtactactttcagaaagcaacaggccatctatgtgggtaattttagagtattgtctcctaatgaaaagccttgttgaagatacatgaaattctcactactcttttgctattttggagacaaatgtactagaggtagaaataaagttcgatatttttgtggaggggtttgtggcagagcagtgttccggggagcacagggtgagaatccctggatgaaggagttgcacccactgtttgaattgataggagatgggaatggaaaggttttctatgccctgaatttgcagggcctctaacgctcagaacataggataataatatacacttattgagcatttacttactagatgccaaaacattgtgctaagagctttaagtgcattatcccactcagttctcccaaactctattagatgggcgctattgttctttctagtgtgggatgaggaaagtacaagctgaagtggttaaaggacttgtgctttgtaaatagtggagtcaggacttgaaccttgggttacctggctcaaggtatgcccatgctcttctccctttgttgagcgtttaaagggaatcaggtagtcgggtaggtgtttcacggtgatcaccatgtcagcggtgcctgaggatggagaaccagggcaggagggccagttagtaatttctggtattcagacaagaaacgggaaggacctgaaaaagaataggagtaaaggaaattgaaagaagagagtcatgagaggcgttgcagccagacttggtgatccacaatttcatgagaaaatgagtgaatcacagaagattccaagttgttttattaacattcagaaagctgtagcttggaccctgggccagcacctgagcttgtggagatcactgaaagtggtcatcatgcactcagggaagacgggggtcatcagtcactcgcactttataaatcttggaagtaagttctgtggtttgatcaaagctgccattctatggcacatgtggtcctgcacatttgaaacatccattaagcctttgtgaagagttgggagttgtatgcctgaaggatgaacctgtcaggaatcatatcaccttgcaaggacagcttcaggggctatttccctgtgtatttttgctcattctaagtagttctgtatttcattcagcatcagtgcagcagagagatacttttggtttggagggtaagacaagaagagcagaagaggctgacagtgcagagggagaggagctttcttgcgtctgttgggaaacctgctacagggactgaaggtgctctgggggtgccaccaccccttcatacacaggtcaagaaagtgttatctgtcttgtgtaaggaattgggccttggttgaattactctgcaaacctgaccaagccaggaaggagtcatggatggagaagacctgtgcttggctgcaccaaaccatggccatcctgctctccagagtcaccacaacacccgtgaccctcccacttagctagggatggtgtgtggccatcgaactgctgttctgaagacttcctgagaggattccagttggcttttgttggggtttgagggacccaataaataacctccttcttccttcctgctttctgaatcagctgagaaataaaacacaacaggtgctcaaatattagcagaaatgatgatttacagggagatcaacatgtttacctcaggagggggtggtttcacaaccttctcccagcctttttattgattaggattattctgctcctgtgatctctgagagaggaaaaaaagtcaccattcttggcagaaaattaatgagagagaaaaaagaaatttcctctctgggaggctacagactgcttgaaggtgggaccaagatggcctgatagataggcaagaataacagagttctttgggggatggtggggggagagagagagagagagagaaagagagagagagagactgactcttccttggagttttaagaagaccaagattttaagaagaattttcatgaactaaattagattgatgactgaaggtaaaagttcatgcttggatcaatgtttcttcttctgagtccttcactgtactggaggatagggagaagcaacagtcttgcaaatatagtagcatgttatagttatcgatcatctctatttcagtcaagatcagttagattttgctgaggaaacaaacacccaatgctcagtggcttagagcaagaaaggcttcttcttgactctgctctgtgcccaccagaggccagctggggggctccgcccaccattgtcactcagggaagtcagaaacttggatttgccagatgttgagccacaaggaaaagagccctggaaggtcatgcttcatttcggaagtgattcatagcacttctgcttacaactctctgatcaggactcatcccaagatcttacccaggatcaaggaaatgcaattctatggtgttcagaaggtaataggagctggaaacagtgggcacccagcccttaatggccctcacaactcattgactaatagagttgtttttctttttttaatagactttattttttaaaagagatgtttaggtttacagcaaaattgaaaggaaggcacagagatttcctctatacccctttcccacacatgcatagcctccctcattatcaatatccttcctagagtggtacatgtattacaaccgatgagcctacattgatacattataatcactcatagttgatagtttacattagagttcactcttggtgtacactctatgggtttgatgaatgtatagtatcattccattgcaataccaataccattatagtatcatacagagtagtttccctgtcctaaaaatcatccctccttctcccctaacccctggcaaccgctgatctttttactgtctctatagcttttgccttacccagaatgtcatagttggaatcatacaatgtgtagtcttttcagattggcttctttcactcagtaatatgcatttaagtttcctccatgtcttttcttggtttaagagctcatttccttttggcataaaataatattccattgtctgtatgtatcataatttatccatttacctgctgaaagacatcttggttgcttccaagtttgagcaattatgaataaggctgctataaataactgtgtgtaggtttttgtgtagacataagttttcaactcatttgggtaaataccaaacaccatgattgctctatcatatggtaagagtatgtttagttttataagaaaccaccacactattttccaaagtggctgtagcatttcgcattcccaccagcagggaatgagagttcctgttgctccacatccttgccaacatttggtgttgttagtgttctggattttggtcattctagctaatagagttgcatttagaaagatttttatacaggcatctttgggccttttaatatcatgtgaactagatgatatggagatgtgtcacttacataacccactgagccgaatgattcttctaggtaagggctagttaaatatttttggctttctgggtcatacggtctctagtgcagtgactcagctctgttttggtaaagcaaaagcagatatagacaattcttaaatgagtgggccatgattcaataaaactttattgacaacacaggtggcaggccacatttggcctatgggtcctagcttgctgactcctgttctaaacacatggcagaccaggtatggaatcaatttctacttcactctcctgcctctgtagataattttaagttatcaggagccatatttgtttgtaaaactatgtgtgaaaaataatctcttgtaattttcagactttaagcttggtgtgcagagatgaggactgatttagaaataggttattcctccctctagagccctctggtgactggaggaagccattgctgcaacccctgaggacttgatggtcctctgttttttttgtttttttttttttgagatggagttttgcgcaccgcaacctccacctcctgggttcaagcaattctcctgcctcagcctccggagtagctgggactacaggcatgcgccaccctgccgggctaattttgtatttttggtaaagacggggtttctccatgttggtcaggctggtctcaaactcccaacctcaggtgatccacccgcctctgcctcccaaagtgctgggattataggtgtgagccaccatgcctcgccagtcctctgttctttttgtccctcttggtttctgttttccacagctttaatcaaagccacctggggtaagaggaaatacccattccgttagtcctgagggtgctcggaaggggtttaagatcaagaataagattgcttttaccataaagaaccctgatagactttgctggaggtatttcctagagtttctactcagctagtcttttcttcctctcatcaccagttcatcaggtttgtcattagagacagagacatttgcattaacttcagtcataggtcatcagcttttaaatattcaaaaggctcaattggcagtaaagcagttttgatgaagtatattccttgcccttgaagagcaggaaaatcatccaactagccacactataatgatccggggcagtgaggtttgtgctagaagcaagaatgacacagtgtgttttttaaacagagtaattatctctatttcttaaaggttatattctctgtaaatcatgcgccatggctatagtttaaaaaaatggagttatcattttaaaaacgtctaggtttctagaaacaaataccctgacatgaaaaatatcctctacctttgcttctgatgaatagatcacaagggccctcttaagaaatgtttttgtcagttttgagaagtgtgtttattgtgtaaaaagaagacaagaaataaatgtctggttattttacaaccccaatctttcttaagatgagttttctctttgtcatcgatctctctccctgtatcatttcccttcccaagtcccttccaaactcatagaatctctctccctggtagattatcaaatcaatttgcattttttgttgctatttggtatagcacctttcttaggaagggggaagatgggatgatttgggatcaaatgcgttcactgtaaaaatgaagtcctggcattttgtggcctagggtaaaggacatttctagggagggatgggctggggcaagtggtgtgcatgtccaagccattcatgttttttatacaggtgaaatctagctacgatgaccttaagggggaaaaagcaatgttaccaaagtgcaatgtggccatgaagaaggagagagggttatattattgaaagtaggagtcagccattacttaatacattgtctgattatatctcacatgtgattctaacttatgcatagagctaaagattctttgaactttcaatgagactataacagtgaatttatccagaggatatttatccatccttctatccatttatatttcatccatccatccatgcatctttccatccatccattcataccactaatatttatcgaagagcagccttttgtggggcactgtagtagtgtgggatggcctagcccagattttcggccatttcatccccaagctggggtctccttcatcatccacactcccctatgacctcatggtttgaaagattttatctacaaaataattcatgaagcaacaattaatttgcctcctaatttttattagtcaaagacagttttgactatcatttagcgccttcgactatcaagaggtcactagccaacagcaaagaaatttgacagccaatttctatgcttaagggatccttggagtccaaagcagtagttataaaatgacagtccttggactacactgtgacccagatgtatgtagtttgagccaaataatagctgtaaaaaatggaaccagttgccataaagttctggcttcagttgcgactggggttttggtcacatggctccctgacttctgtgtggcaacactcagcagcagtgcctctttaaaagaatcctttgtctctgaattgccaccatccctgctctgccaacttaccttctccttccattgagtttgcagccaccatttttttttttttttacagataaggaaacagagttctgagaaattaacttatccaaggctacacaattatgaagcaatagaacttgacctgaaatttgagtttccgtgcattgtgcactaatatctttctaagttgctgctctcctataagccttgtccctgcatggccccagggtgttaccactgtctctttcatagcgtggcagctgtccaaatttgcagcattttatctaatgctctgcataaagatggctcctaaaaggatttgcgagagataatgtccctctctaagtgaaagattggaaatgacagactgggaactctcatttcctttccatttaggatgtagaaaggcatgagatattgatctctcctaacaccaaaataacaccaacaagctggctaaattacaaaatcatattttttgaacccatctgagagctgaagatgcaaatcgatctgaatgtattaaaatccagaatgtctttcttaggagagtggaaacgcatagctgctttcacttctggtggagtgacaggaagagaaggattacaccctaggtcagggctaagggcaactaggcaaacttttaaccagcatgagagctgagtgaaatcccctagaggcactccagaccttcagcctgggtggggaagcccttgctgacggcaggaggcaggatgacagggaggagaaaagtcttctaaagtccagagagccagggatgacactgaagagcaaaggaatctctctccagcccacattccacatgaatgctataaagcatagacagctccctgcagtcgctgagtgctaaagtcccaagccctgctgaagggcaagtcttgagagcactcccaaacatttgaagccagtggtgtggaaaatcttttattccaacaaagctaaatctaagtaaagttgcaaccaagttgcagcaaaatgtaatctaagccaaattgagaattctgtttttcagaagtagaagaccattatgttggtcttctacaccattacattgctcttctgcccataggtttcattctagagctcctaggctcagatgggtcagagggaaccagaaccactcccttccctgccaactgtgttccaagcagtccagctcattgctggcaagatccacatcttattccacaattaatgtccactaataattgacatttattcctgggatgctatctggttttgtactgtatgtaatggtatgctaaaggaggatcaataaaagggaaattgttcctttttgtctaaaagtactcaaaactggcagaagggagacatacagctaaatacacaattacttgacctcatctaatatattagaaaagcctatctttggagaattgttagctctttgaaaagaagtcaactaatcactggtctttacctttaaatgtctcattagagacactattaatctgagtggaacatttcctgatgcaatatttgacggacagaaaatcattattttccattaccagaatttttgccagaaacagatgcccagtgggagattcaaggaaaaaaccccaacctttctatttaattgatcttagtatcttcctgaaaaaatggatcattaaatggtttcttccttggtgagtctgggcctcaggagtctccagtcctatcagggtccctgccttttctcctttggttttgatctttttgccttctctgagcatttgcagttagtttttccctgtgtatgacattttcaattaagtcttttaaatgcttagccagtggagatctgaggttaagcccaaagcaaatgatgcttacttgagaattattttaaagatgggcctttggtttgttgtaaatatctcgacatcctgcttgacattcccctcagcacagtatttctgacttcagccatatgtagggctagcaagggagcacatggtagtctgagggcaaggacagaacatactgtgtgttaagcactagtgtaacagattcacatctgttacctgcttaatctttgcatcaaatcttggaggtaggtactctttttacagaaacaccttcattttttagaatcaaatagacatggcttcctgtggtttcacgttcctgtgttctggacccagatcagggttcagaaaaccattttttatacccggtcaactagcaaatattttaggctttgtagaacatacagtcttcattgcaactactactgttgtagcatgacagcatgtgtagacaatatgcagataagtgggtgtgatgatgttccaataaaactttatttatagacactgaaatttgaatgtcatgtaattgtcatgagtcatgaagtattattcttttgatttatttgaactatgtaagaatgtaaaacccattcttagtttgagggctgtacaaaatcaggcggcaggcagtccagatttggcctgcaggttttagtttcagattaaaatggagatatcactattctctaatcggatctgagtatcagttacctggagtgaattgccttatcattgataaatggcaatgtttagaatttgaaaaagttgcaatttaaatgaattttttaggtgggttgcagtggcttacccctgtaatctttgcactttgggaggctgaggtgggaggatcacttgagcccaggagttcgagaccagcgtgggcaacatggtgaaatcctgtctctacaaaaaatacaaaaattagccagatgtagtggcatgctcctgtagtcctagctataggaggctgaggtgggaggatcacttgattctgggaggtcgaggctgcagtgaactgagatcgcatcactgcactccagcctgggcgatagagtgagaccctgcctcaaataaacgaattaaataaataaataaatttaaaaatagatttatcaagtataagtgtcattttgttacatagatatattgcatagtggtgaagtgtgggcttttagcgtaaccatcactggaatagtgtacattgtacccatgaagtaatttctcatccctcacccgctcccactctgtcaccctctgagtctccagtgtctattattccacactctatgtccatgtgacacattatttagcttccacttatcaatgagaagatgtagtatttgactttgtttctgtgttattaatggcctccagttccatctgccttgcttttttaaaacataaaaggtggatagaaatcatgtcattttgaaatgctgtgccatggcacgcaggagagcaggcagatggctcttgaccataagatattggtgatgatgttggtaccagccctgacaagcactttagaaccaggtcagcttgcatttgcatcctgcgtttgcccatacatgactagtgagggcaaatgccaattgaccttgagcaataatcttgagcaagttatttttctctttgaatgtcagaactctcatccacaaaagggaagataaagattccaagtttctgaataagggaaaaaatatgtatatgcctggcaatataaaaaatgttatgctgcttggaattgtggagtttagtacaagatagctctgcatatgtatctattatcctcttgatcaataaataccctttagtttgggggtccttgtggactgcgtaatatttcatccaatgatttctttattaaaaaggcagaaattgtgtgtcttttcatcattacaaaatgtataatatgtaaaagagcattttcagagtatatacaatatgtgtgggatttaaagaataattgaaaaaacatccatgatcccctaacattgcttgtgaatgagaacatcaccagctgttctgaagtctcctatgtgcccctcccagaccacctccctctctcctcccataggtacacttttctgaattttgggttgcttattctcttgttttgcttttataaatttactttatacatatgtattagtcaatgatgtattgcttcagttttgcctattttcactttcatataaatggactcatactgtattctcgtgtctcatttcttccctagcaacattgtatttatgagattcttccacagtgatacatacagccataggtctttattttcacttctgtgtaattaattttctatcatatgaacttcccatgttttatgtatccattctcctgttgatgaacatttgggttgcttccaggtttttgctattgcagacagagttactatggcttcttaaataattctcctaaggtacatgtacaggactccctagtgtaagtacaagcctaagtgtggaacttgccagagtttgtactttaacttttctaggaaatggcagttaggttgctctaccttatgttcacaccaacaataggtgagagttcccagggtttccagtgacttttaacacattagttttgctttgctcatttttgaaagccatagaaatagaatcatacagtgtatatccatttatatctggtattttagcctgttttttcttgctataactgaataccagaggctaggtaatttataaagaaaagaaatttattttttacagttctggaggcgtggaagtttaaggtctggggactgcatctggtgagggccttcatgctggtggggctctctgcagagtcctgaagtggtgcaaggcagcacatgaagagggcatgagcacggcaaactgaatatattcatgaaggcaaaaccctcacgaaatcaatcacctcttaaaagcctcacctcttaatactgtgactttggggattaagtttcaacatgagttttggaggggacaaatatttgaactgtagcatttggcttcttttgttcaatgttatttttgtgatattcattcatctcatagcgtgtagctttaagtcagcaattttcatgcctgtatagtattccattgcctattcattctactcttgatagacatttgagttgttttctagtttttgctattacaaataacactactatgaaaattctatctatttcttggtgcaacatgcactaatttctgttgtgtatataactatgagtggaattgctgtattatagggtaaacatgttcaactttagtagataatgccaaagagttttccagattagttccaccaaatttccaccagaagtacatgagggtttcttgtgctgtacattctcaccagtgcttgcttttgttagtctttttaactgtagctaccagatggagatgttagtggtttctcatagttttaatttgcatttactgatagcatagaacatagctgactagatataggagtatgtgcctccttcacagagaggaaccagagtaataagtagatatatttcaaacagctagtctaggagagacttctgggattcaccagagaggagatgggaagcacttgaagtaaggagagggttcgaggcagcttgcccagctgggaactgactaatagtcaggagaggttcctgggcatggagaaacagtaagagagaaacctccagggatcagcttttatgatcttgtgtatgagagaaactcttgacccattagggcctagggcctgacatgtggaactgcctaaagattgcacattcctctagaaagagaacccacatggaatcccacaggcatccaagcctacagtggcctctgctgggcaacattttgagagcctagatactggagagctacagacatggttgctgctgcagagctgctgcaaggaggggagaggagaatgggtgctcctacatacccctaggaggatccctactgccttgttgtgagctgctgttgagactgagatgtgagtgggctgcactctccacagcttctcgtccacactgcttgcctgggagagatcccaccctccctgttcctaggcccaaggcatcattttgagagtttaatgatggactgccatttgaccttggactgtttgggttgatgtggttgcagttgccacctggccaaggaggaacagggaagccaggctctcctaccatatataggacaatgcccactgccctgcaatgggctgctgtgagactgagatgtgagtggacatccacatcttcttgtccatacttcctgcctgggaagggccctggtctccctggtcataagtcttaggtgtcattttagagagtttaacactaggctgcactccaccgtgggccgagttcaagttgtcatggctgcaaccatgtccagttgaggagggacaaggaaactaggctctcttttgcatacccaggacaatacccactgctctgctaggggctgctgtgagataaagactcaagtgaactgacactcaagaggatataacaattctagatatatatgcacccaaaatcagtgcacccccattcaaaaaacagatattactagacctaaagaaagagacagacagaaatacaacaatagtgggaagttcaacaccccactcacagtactagacagatcatcaagacagaatattaacaaagaaactttgaactgaagttggactttagaccatgtagacttagacatttacagaatgttctacccaatagctacagaaaatacattcttttcatcagtacatggaaaaaatctccaagatagaccatatagtaggccacagaaaatgtcttaacaaattttttaaaaattgaaattgtattaaatatcttcccagaccacagcagaataaagctagaaatcactgccaagaggaatgcttgaaactgtacaatacatataaattaaacggcatgctcctgaatgatcactggatgaataaggaaattaagacaaatttaaaaactttttgaaattaatgaaaatgaaaacacaatgtaacaaaacctgtggaatacagcaaaagcattgctaagagggaaatttatagcattaaacgcctacatcaaaaaagtagaaagatcacaaaataacctaacattgtacttgaagtaactagaaagacaagaacaaactaaacacacacttagcagaagaaaagaaataacaaagatcagagcagaacgaaatggagataaaaaattacaaaagatcaaccaaacaaaaagttggttcttttgttttgaaaaaagataaacagaattgataaaccattatctagactaaccaagaaaaggagaagatccaaataacacaatcagaagtgaaaaaggagacattacaactgataccacagaaatacaaaagatcatcagagactattatgaacagctatatactcacaaaccagaaaacctagaggaaatgtataaattccagcctcacaagattgaaccaggaagaaataaaacttctgaactgaccaataatgagtagtgagactgagtcagtaataaaaaaatctctcagcaacaacaacaacaaaacaacaaaacaacatccatccaggatcagatggattcacagctgaattctagagaacatgcaaagaagaactaataccaatcttcctgaaactgttctaaaaaatagaagatgagagagttctccttaactcattctgcaaggccagtatcaccctgatacccaaaacagagaaagacacaacaaaaaagaaaattacagatcaatatccctgatgaacataaatgcaaaaatcttcagcaaaatactagcaaatcagcaaattttatttgctgaaaattgtattttcagcaaataaaaagaaaatacaccatgatcaggtgggatttatcccagggatgcaatgattgttcaatatacataaatccataaatgtgatacatcacatacagaattaaggacaaaaaccacatgatcacctcaatagatgaagaaaaagtgtttaataaacttcagcatctcttcatgagaaaatcctcaacaacccagacatagaaggaacatatcttaatatagtcaaggcaatatatgacaaacccacagccaacatcatatttaacaggataaagttcaaagcattccctctgagaacgggaacaagacaaagatgcccactttcatcactctttttcaacatagtactggaagtccttgctagagcaatcagactagagaaaaaaaaagacatccaagttggaaaaaaggaagtcaaattttccctgtttgctgatggtatggtttctatctagaaaaccctaaaatcgctaccaaaagattcttagatttaataaatgaattcagtaaagttttggaatacaagatatatatgcagaaatcggtagtattattatacattgtattagtcaattttcacactgctgataaagacatatccaagactgggcaatttacaaaagaaagaagtttatttgatttacagttctacatggcttgggaggcctcacaattatggtggaaggcaaggaggagcaagtcacatcttacatggatggcagcaggcaaagagagagcttgtgcagagaaactctcatttttaaaaccattggatctcatgtgacccattcactatcaagagaacagcaagggaaagacccaccccatgattcaatcatctcccactgggttgctcccacaacacatggtcacttgaggtcaggagttcaagaccagcatggccaacatggtgaaaccccatctctactaaaagtacaaaaattagctggacctggtggcacatgcctgtaatcccagctactcaggaggctgaggcaggagaatcccttgaacctgggaggcagaggttgcagtgagccaagatcatgccactgcatttcagcctgggtgacagagcaagactccatttaaataaataaataaataatcctgggaaaattgatagctgcatgcagaagagtgaaactggacccatacatctcaccataaacaaaaattaactcaagatggattaaagacctaaacataagaccttgaactataaaaatcctagaagaaaacctaggaaaaactcttctggacattcaccaaagaatttgtgaccaattcctcaaattaaaatgcaacaaaacaaaaataggcaaatgggacttaattaaactaaaatgcagcaaaacaaaaataggcaaatgagacataattaaactaaaaagcttctgcacagcaaaagaaataattaacagagtaaacagacaacctacagaatgggaaaaatacttgcaaactatgggtctgacaaagggctaatatctggaatttacatggaactcaaacaactcaacaagaaaaaaaacaaccccccttaaaaaatgagcaaagaacattgaaggccatttttcaaaagaagacatccaagtggccaagaaacatgaaaaaaatgttcaacatcactaaacatcagagaaatgcaaattaaaaccacaatgagagaccatcttacaccagtcagaaagactattactaaaaagtcaaaaaacaacagatgttgtcaaggatgcagagaaaagaaaacacttataactgttggtaggaatgtaaattaaaacaactttttgggggaacagtgtggagatttcttaaagaactaaaaatagaactactatttgatccagcaatctcactattttccctttgtgtatatatatctacccaaaggaaaataaatcatcatatcaaagagataccggcactcatatgtttattacagcactattcaccatggcaaatatatggaatcagctaagtgtccatcaatggagaactggacaaggaaaatgtgatatatatatatacacacacacacacacatattatatataatatatatagcatggaatactattgaaccataaaaggaatgagatcatgtcttttgcagtaacatggatagaagcagaggctattatccttagtgaaataactcagaaacagaaaaggcaaatactgcatgttctcatttataagttggaactaaacaatgaagacgcatgggcatatagaggagagtaatagacattggaaagtacaagatatgggatggtgggaggaggtgagggttacagtgttcactatttgggtgatagttgcactaaaagcccagactttaacactatggaatatatgcacataggaaatctgcacttgtacctcctaaatatatagaaaatagacattaaaaattaaataaaataatttacattttcttgatcataagaagctaagcacattttcatgtagttattggctagttagacgtcctatttggtaagtgcctattaagtcttttgcttattgtgcagaggttggagtcgtggttactggttttgaaacatattttgttgctctttattgatttacaggagtttaaaaaatattccagataggtgtccttttttggttgtacgtgttgctgacagcttttcccatactgtagcttgcctttttccaccctggctggtatctcctgatgaacagatgtcctagagtttaagggtgtgtcctcaggggctgtgtagcactggtaccctgctgccatctgggattggctgtgattggaaattagatgctcatcagatttaggaaggacaaggaagtggtcagaaagagaccacctaggcaaggaaaaattattcacttttcaaagtgaacatccaaatgataacctttcacaattatcttgttcctatattgaagagggtatgctttgaaaacaaacttgagttttatgaataaatgacatgtagcttttagaaaggtggtgacagttcaatgaataatgagaatggctagctctgtagatcagaggagtacttattagtgggtggtagaatgagggcctttcaagtaaactgggaggatcaccccgagcaaagctgattgcccaaggctatgggaggcacagggctgctttggctctggtcctggttcactttggtcttggtctgggtcgttagggtgaagttttgcattgagggccagaagagtgggttgctgcttagtgacatgctgggtattttgactgctttgtccctagttgggaaggtgagatgagtatacaaatgagtgtgtgtgtgtgtgtgtgtgtgtgtgtgtgtgtatgcatgagagacggctcaataatatgtgaattcaataagtttgttttctgtattttttttttaagacaggatctttcttgctctgccacccaggctgaaggacagtggcacgatcatagtgcacaatatctggctaatttaaaaaaaaatttttttagaagtgaccttgctacattgccaggcttgttttgaacttctgggctcaagtgatcctcccaccttagcctcccaaagtgtggggataacaggcatgagccactgcaccaagcctgacttcaataattttctgtatggtttatttgttggtggagagtaagatattacttcaagaacttatgagagagatggagagagaaataccatatggattaagaaaaccttccagagatctcttttcccatccctgtcaatatagttgttaattttcctgagtccattgttactttatcaaaaggaaaaaattataatgactgtgtcttgaaaagaaaagaatcaaagaaatggcccaagatagtaattgctggatcgaaagtgcccacaagtactgattgggatgaatacataaagatattctctatatacatatatcacagtgaaatttcagaacactaaaatgaataaggaaatcttgaaaagctttagactttatttttctaaagcacaaatttgacttaattcctcaggagtattctgtagatggctttaaaaatgatcttttctattaaaagaaaaaggtggccaggtgaagtggctcatgcctgcaatcccagcactctgggaggctgaggcaggtggattgcttgagatcaggacttcaagactagcctggctaacatgtcgaaaccccatctctactaaaaacaaaaattagctgggtgtggtggcgggcaccagtaatcccagctactccggaggttgaggcaggagaatcatttgaacctgggaggcagaggttgcagtgagctgagattgcaccactgcactccaacctgggcaatagagtgagactctgtctcaaaaaaaaaaaaaaagaaaaaaaaaaaagagaaaaaagaataaggtggcatatatgtcaatcttcctttccttcaccgagtccttatggataacaggaaaagcattagaaaaggaataggagaaaatatcatctttggatcagaaatcctgcaacatctgtggaagataggaaacagaagggatccaggccagacacagacttagaatagcagtggttctgggtttctgggtgcctccaggaatacacacaacagccatcacagtgagtgggcaactacatttgaagcaagtggacaactttgacccctccctctggttgctttgtgctgagtcatgggcagcagcaggcttgagcggaaggtacccggtgtgcgtgcctagaactagaaccttcggcccccagtcaagttactgatacatgttgtattagttgttcttgcattgctataaagaactacacaagactgggtaattaagaggtttaattggctcacagtaccacaggctgaacaggaagcatggctggagagtcctcaggaaacttacaaacgtggtggaaggcaaagaggaaggaggcacatcttatgtggctggagcctgaggaagagagagcagggggaggtgctacacacttgtaaacaaccagatcttgtgaggactcactatcccgagaacagcaagggagaaatctgcccccatgatccaatcacctcccgccaggcccctcctccaacgttggggattacaattcgacatgagatttgggtggggacacaaatccaaatcatatcacatgctgttccacacggcacatcccactcttccctcaacctctggaggctgatacatcaaatataaaaatgagagtccaacaggaatcaccaaacacttaaggaaacatcagctccacaaattacagactctgagtcagcatacaaaatgaccttcaccaagaaagcagcattaatgcagccaacaagattggaccttaatagaaatgaagtggtaccctcagagggataagaggaattcatgatcatgagctgagaacaggctgctatttgaagatccacatagatattacattggaaatgaaatatttcattgatatttaaaaaaaaaacatatcaatgacagaagcagcagaatgtgcacagctgaagaataaattagcaggctggacatttgaattaagaaataattcagagcatagtaccaaaagacagagatataaagaatgaaacaaagattaaaagacctaggacctagaagtttcaagacccatttattagggcctctcaaaggagataagagagagagtgggagagagagagagtggtggaggaagtggggaagggaagaaaagaatcaagaaatagtcaaagaaagatatgcattgttggattaaaaggatctacactgtgcggatcatgatgaataaataaagatgctccctagacataccacagtgacttcagacgtatcagtgtaactccagtgcactaaaggtaaagagattgtgaagggctctaggaataaagtagatgggatactgttttgatttagaggtatgatgactctttgctatcttgagggggtggggggacaatccgtctttgggaaggaagttaagtggagatagatttaatattgcaatataattttacattttgaaaataaaatgaattcctgttgttttctctgcttggttgctagaattacataaatatccttggggaatgattgagattctctaaaatacatgtaggatattaatattagtcaaagtggggtctttgaaatgttgcatagtctttctttagatgttagccctgaaagggcttcgcggtcatctatatttgcagcccttttctccctgaggccaagaccttgtttaccacctcgcaggacagtgctaggactagtggttgagatttccttttgaagtccagggctctctgtgggatggttgacaattcttttggccttgatggctctgtttaggcttgttgatggggtaacaggattgtgcatttttttccctgagcaagaaggcatgccatttaacctggataatgtttttaaattagcagaaagaacagatgattagttttatttcgtattaaggttgaatttgcaagggcctgcttattggtaacttgataaccttgattaactgtacggatcactggagcgctcagagtgcgtgtgggtttgttatggaacaattaactagagaacacaagctcgggttccttagtaaaggactccttgtggtgagaaataatgatcagtcttactgattactatttatgtaagggtttttctctttatttagcttagaacaccatactttattgaatgaagggattccgagtttctattcttttccattttaactgcctcaacttttcttgtgtgattttagggggcagagcccaccagttgctgaatttaacttgctcctgaaagctcacactttggaaacctacggggtggatcctcacccatgcaaggtaactgcccctcacagcaggtcaccatataatggttgttttgcccaaaagagagtttatctgtgcgcaggcctggcagagccttgttaaatctttcccacagcttggcccacggtccctcattggaagggacaacagtgggctgctgttacatgttttggcagctgattttctccattggagtcttccaattgttcattgattgccatgtagtagccatattttcctaaattaacatccatggattcactcatcaaatggatggtttggcccctgaggagttacaggctcctgacacatttactttcaaggccattgccagcaagaatggagtctttaaaaaatgggaaagtggaaggaaaaaaaagaaagatttcaagttgcattttggcattaggaacacttgtttttattttttcctttactcatatttgacagtgtttctctcaaggatgaaacacagactacttatatcagaatctcctggacctcaccccagagctactaaatcagaattctgggggtacaactggggaatctgcctttttaatcaagctcccaaggtgtgatacttatagatacattttccagaaatgtttcactgaagcaacgttcttctttccatatattagactatgcatcagccagacactagtcctaatcctaaactaagcattttatcagttaggctcttaagtataagttttggagttttagtggcaaatttctttacccagattggactgcctaatcttatttggcaaagcattagtcctataggtctcagcttgggctgctcattagaaacacctggagagcttcattagcacctgctgaccagaacacatcccacaccaattacgtcaggatctgctggggaggagggcggggcggggcgcagggcggcggagggggagtggtgggtgcggcgaccaggctacccaggtgtttccaatgtgcagccaaggcggagagccaggggtacttgtccatactagcatttacatcctcttgttctgcctacgcaaatgttggaatatttaccagcggctctttcctagaatggtactaatcagtttattcattttagtgaattttatgcagaaatttgaactgtattttatttatttcttggagactgacttgatctttgtgttgttattcctttgccttcacttatctacaagatgcttagttttcctggtctaggctggaagcacagtaagcttttctggagatatttttatactgaaatttccagaaatcctgtgagagattgaatcaaaattagatgctcagggctttggtttcatcacgttagagtgctaatggcaagcaagaacagttttctcacattacaaagcagacctagaacacaggcagccccggaagacactgggaagtagacatagtgatttgggactaattcatatttttccaggaggttcctagagggcagaaggtccgctcctcaaagggaaaagctacatattcctgaacttcacccagactttgaaaggcctgctcttagaagttccatctcagaaacttagtttattgctacaatcattgggattagtctaaaattaacctagggtgaggatgaataaatatattggttatcatttattttatttttctcaatctaaacagatttttcttttttcttttttttttttttcaggattcaacaggcacaacaacatttttaggattcacagctgcaggctttgtggtctttcagggaaataagagaatccatttgataaaatggtaagtgcctctttggaaaactggctttccatttttcttaatcttgattcctccgtcccctccttggcttctcgggcaagtgtcaggtagaatgcctggtatccatttccttgccttggagcttcatcataaagggatgtaacatctaggttgcctttggtggggacttggatttgccaagctgaggagtcaacttaggaggcgtgggctcaggggctctgccttcaaagagaaggtatccagtgtttcctcaccagtagcttctactgctgtggccaaggggggcacacggatgggtcagggcagggtaaaggtgtgagttcccatgaacaactcaggatccactctccccaactcacttctttccactcttctcctctgttgagtcctgggtgcaaactcaccctttgttatccagtgtatccgtgaagatgcttttggcaaaaggtagtaggaatgtctactcatgatggcttacaaataagaggactaatcagctcacagagcaaacgtggagcagttccctggtctgttaacttaactgcctattaacttaaatgccgggaaggatttaggtctctgtttttttttttttttttctctgccattctcagtcaggcgcattggtcctgaggctcctgctcctgagatgggcatgtgcgggactggcctgcacatctccccatggcaatgcccggagcctggaggagagcagccccttccatgtgtctccttttcaaacaaggataattttttagaagccctgtaggagacttcctgtatacctaattggacagaattgggtcacatgtttctatttaaaccggtccttgctgaaaagaatgggaactccaatatataagaacacaattcttttgtaaacagggaaaacaggagtgaacattttgcagtgcagtggatttgcttcttggaaatggatgcagaaggaggagaaagtcagatactgtgaatccgcatcatttcattaactgaatctgaaatcaccacgttcttcccaccttgctaagtgggctgggcaattaatattgttctgatcattaatgttcacgaacactagagcttcttggaagaacgatgcagcctgactgtaaataatagaataaataattctgagctctgtgcggatcctctcttgggaagagaattgctgtataattcactcgaggcttttcactgcccattagaccttcaccaatgataataccttgtttcactgcaatctgcctggcatttttgagtcagattcctatgggaaacccaggtaccttggttagctgccactttttttcttcttacccagagattttcttttcttaggccagatgtctgcaaattgaagtttgaagggaagacattttatgtgattggcacccagaaggaggtcagatactgcttttttttaactgcctgttattgtgtgtgcatgagagagattcaggagtaaaatatgcctttagtattgtagtcgccaaagaccatgactttgaagtgtatggtgataatgaaagctatatgctaaaaatattttagaggcaaacaaatgagtactgggtttgtacattgaacaataaagtcagtaagcaatgctgattgtacacccccatgtgcaaaacagactgggatagactttggaaataaaagatggaacctctccctacctctttttgccaagatacagacatgtgaaacaaataaagaatacttacaaagctaaatattcaacaaccagtgctcattagagtgttataaacagagcctattagtccagagagtcttaaaacaagggagttactagatatagattgtggattcaccagggaatgcatttgtgcggagaccattaacaaaatattaagcctcagaggtagctctagaaatttgcgggttttcttgtcatgagttttcagcccaagtactagttcctcaaggatggcaaatatgtttttaggctaattccagtgtgacagagaggtagatgatgcctggagtgttgagaagcattgtgaggctgattttgatcagaaacaggtcctagatacattagtgatatctgcaaagggtgagggaggggtgaataccatgttaataacactgtaaataacatagcaatatgttaagttacttcaagtctgtgtaataggagataggatacaaagaggtaaacacctgaaaaaaaaaaacccatggaaaatgtaaatggtattttacgtgccttttcttgttttgttattttttaattagaaaaaagccatgttggcattccatacttcaacaccagctgcctgcaaacatctttggaagtgtggagtggaaaaccaggccttttataagtaagtggcttttattcatttaattatagcttttaaaagcacccatggaattctttatgttttgcaaatggctgcatatttatttcttttaatacagttttaaaagttatatttaagtaaattaaaattttgtgcattgttcagggtgactcccggtgattgttggcttgttggcctgaccgagttctgagctctatgttggatgtttcctgtggaatggctgtgggccactgtgtgtgtgtgtgtgtgtgtgtgtgtgtgtgtgtgtgtgtgtgtatttcaaatagctatttccacaaaatatgtcacaggatcaatttttggttgccctcctccccccacccccacaaagcagaccttgagatagtttggtacaagtagcttatttgggatgtaatcaatggacataccagtaggggagtggtggggggtggtgagatggggaagcaatataagatgcattattgagcaggtcactactgtggacaactgggctcagatcttcttaggaactctgggacatggtataatatgcctcacagttctcctgctgatgggcaaagaggtggggctgtttatctaccaattcgccatttattttggttgaagcctgctttgggggccagaattaatactctctgatatttctggcttactctgagtatgggttggatgtgctttcacaaccagaaaaagagacctctggcagagagtcacctgtgttcatagtaagaaggcttcagtgtattgaaaatagagccaaaggtttatgggtggaatgctgtcagagcctaggatcatagaaagtaggtgctggacaagacttcagaaaccatctgtaaagctctcaggtttcaaaagaagttcaaactgagatctgtgcatggagttacaccttcttctctgagagacgcttgctgactggaaaggcagtggtagtggatgcaactaagaacctagtccagccctgctcaggccatcagcactgtacacccctggacctcatccaggtggcttttgatcagtccccctgccccttacagtgagattctgtcttcctgattagactcatctccctgaaaatgctgtctctgaacctcctgggctttggctgatgagaaccatcaggagaatgatggcttggataatgattttgaaaccagtttcggccacagaatacttttccttaatctgaagtataggcaaagtccagcatgtaaaggagataaaaagagaagttgtggtggtagatggggccttggatgggattggagattgaagggtctttgcccattgttcattgcttttcaggagcttgggtgaccagttgtccaggttgcctatgcctttcctaagtttagcactgacatccccatgtcccaggaaacccatcagccctgggaaaacccaggagcataatttgaacaccactgggtgagatgacgcacaaaatgctgtgctaggaatgattggagaaggtgatgtgtaccagtagaccttcctgtgaccaccaccacctcaaggtctttgtgtgcctcctgcatgtttggggactgataaggaaggagaccagttggccttcggaaaatctacatgtctagaagccttcacccacatgagagttcagagagggaaacacagagggtttgatgctctcagtctttagttggagccttagtgattttttattttgttttaaaaaaaattttttaaatggaaatctaatttacatgccgtaaaatttacccttttaaagtatacagttttgtggtttttagtgtaattcacaaagtgatatagccattatcactatctaattccagaatatttttatccttcccaaaataaaccttatgccagttagcagtcatttcccatttcctcctccccccaatctctggcaaccactaatctactttctgtttttatggatttacctattataagttgtatataagtggaatcataaacgatgtggccatttgtgcctgttgtcacaaaatgtgtccaaagttcacccatattataacatgtctcagtactttattcctgtttatgattgaatgacactgcattgtttcaatagaccacatttggtttatccattcatcagttgatgctcacttgggttgttacctctttttagctactatgagtaatgctgctacgagcattggatacaagtttttgtgtggacagttctcttgggcatatacctaggatggaactgctgggtcatagggtaactctatatttagctttttgaggacctgacacattgttttcagtgcctaagcttttggaactcttctgttctttcttgaatgaaaccatctgtttcctgtcaaaggataacttacagatgttcagttagttattttcagtgaatattttcttgcatatgagggaattaaaaatggagtgaagaaacaaggcaaaaacaagatctaccatgacatgattttattacagaattttatatatctgtactatgtatctgtactagatctgatttctatttttttaacctgtattcatgatttgtatttaggttaaagtcatgtaacataaaattaattattttaaagtgtacaattcagtggcagagtatgtttaaaatgttgtccaaccatcatttctatctatttccaaacattttcatcaatcccagaaggaaactatatactcactgaggagttactctcccttgttcctttctccaagacttctattggattgtagatttttccataccaacatgtcagatctgtaatcagtttgaactctctgagggtaggaactttttctgctttttttatttcctgaagatctcaggcattgaaaacacatttactagctcagattgataaggcatgattcctgtcctcaggagattgttatttcatgtaagagaccaagggggaaatgaaaaaaaaagaaaaaagctagagaggaatccagaggagagggtgaatcttgctgccaggggagctaggaggtagaagacccttttaggtggaggaaggacatccaagctcccgtagggtaccatggcaggaatgtggaggatgcattttgtgggacatgagtggctacaaggttggagcagagggtagatgaggtagaaaaagaggtgataagggaccaggaggtcttgaggccagacacggatggcttgaccagtgtgaaagaggcaacagaggtgcagtaggtgtggttgatcattctttacgtgcagacagacctatgggagggggtgatacaggagaacacctagcagacaggccttcctttagagccacacagcaagttttgcttggaaggactttggcacagccttgaagatactttagtgaaatcactgggtccgtatcaaagaataacttggagacattcatttgctatttcacgcacgttgttttatcatatatgaggaagtcagttgggagacagagttaaataaaggcaaaaacaaaattgagaggagaaagggagagaaaaaacctgcaatatggaaaatgtgttttacacattttgggtaagcagattagctggcagctagtaaggaaggtattctggtaattttatcatgaactaggtaggtcaacttggcatgtcagagaagtcccttccagtcacttgtggatgcttcagaagacttggagggtttagctgtgagcacaagtgacaaactgtatatggttgaccagtctttgcattggcactttggctatagttaaccaagctaccctcatctcattcgacttctaaacctgaatatttatagccgtctgagatttgcctgaacattttgttcctccattatcccataaccatccttgttcctgaggaaggaggggaagtatcacttgttctggcccagctgtgggaccttggccaggtcactttagtgctgtctggtcttagcctcctcacctgtagaatgaatgggcctgggactgacctgggtgcatttgcttgtaccactggggcatagtgtaatgagtgtgagctttggaagtcaatgggcttggttctaagtcttgactctgtcatttatagcagtgtggcctggaacaaagctgttaatctcttggagcctcatctttatttttcatctgtgaaatgagattgaattacctgccttgctgtgctcagttctgccaggcatatgaaccattgatgagcagaagctgctgctgtattactgccccctctgctaatgatgagagtattttgagcagcagttggatgaagagcccactccttttcattgggaagactctgattatggtaacctcaggggtatgcctgcttccttcactgtgaccacccttccctgggcagaggtcctggccctgcttctagctctgtcctgctggccctgcattttaatggtttcagctggcagagcaaggccctaatcttgtttcctagatggtttgttccttccatttttacttcacctgcatgggagcggggaggcccggggcctctgcttgcgaattccccagtgtgcttttaggacgcaaatgcgctgctggttgtcagctggcccagggccacagatctgttttgaaagccctggctctgagatctgcctgggaatggagcccagacgcagaaactctgatttttcccgcctactccagaccccaggggatctccaacacagacttattcaccatttaagagcttcctttataccatgtgtggtctgtcatggtgctgccaaccccagagctcactgtttctgggtgctggttcactgaaagcacactggacgcattgagggattcagtggctcactgatgttttcattaacagcatctttatctcacagtttttgctgtgtactggatacatggttgaggctgtatgacactgtgttcccaatttgttttggaattgtgtgcaagggataaaagcagttcctaatacatttcttattcagagtttggtgtacattttgtcaaaggaacagtgttatgcttggtaggtaagaacccagactagctccctaaacaagtgcctctcacacttgaatgcacacatgaatgagctggggagctggttaaaatgtgcattctaattcaaaaggtctggggtgggcatgagagtccatatttttaataaattccaggggatactgtgcggtgggtccgtagaccacactccaagtaataaggttctaaatcagcagttctcaatcctgactacattaacatcacctggaggagcttttaaaaactattaataccagtgctatgggtccctgcatcctaccccagacccaattaaagtggaatctgggtcttcattaaaacttgtgcacaagcgttcatagcagcattagtcgtaatagccaaaaagtggaaacaatccaatgtccatcaaatgatgaatggataaacaaaatgcggtatatccatacaatggtatatcattcagccatagaaaggaatggagaactgatactacaacttggatgagccttggaaacagtatgctaagtgaaagaaaccatttacaaagcaccacatattgcatgagtccattgaaatgaaatatctaaaatggcaaatatataaactagatgagcggttgcttagggctgggagtggtgagatgaggaggggaatcagggagtgactgccaatacccattgcagtgacaggtggtttcttttggaggtgatgaaaatgttttcgtattagatagtggtgattgattttcgtaatttctttttttaacttcatgaattatactaaaacccaccaaagtgtacaatctaaaagggtgaaatttaaggtatgtaaattatatctcgacaaagctgttattttgagaaatctgaatctgggatgaggaacctaggtgttggcagtgctagaagtttcccagttattgctaacatgccattgaggggttaagacattgctttagttcagtgattctcccatcaggtccctggaccagcatcatcactcccgggattttttggaaatgcagattcttgggctcttccccagatctactgaatcagagacaggtgttttaaaaagccttccaggtgatttgttgctcactaaaatttgagagccagtacgactagagcatgattttttaaatactgaaatcagacagactaggatttatagcctggttcctgcagcttctatcatggaaccatggtaaagtgattaaacctctctgtgccttattttccttatgtgaaaatgcggatcccttcctcctggtagagagccgtgaggataaaatgaattgtatattaaaggtgctttggatggggcattgcccatattaaaggctcagtagtaaatgctgttattgttatggttactccaggaactctaaattatgacttcaatgggaaatagtgttgttaattctagaggtggcctcttggagcaccacccaatgtccccccagtacctatcctgatcttcaagcccctggaatagcagggttcagaggagaaattgcaggttggggagaggggaggtgtgctcctgcagagacgatctggatttctttgtgaggtcagatgtttgggcatagtcatacttcttgtgttgggactttgatggggagttggaagttgaagtgggagacggcgggtggaaaggaaggcagaaggctgtaggagagcgaattgctgttccaatgaggctgtgaactcattgctttctgtgggaagaatactcttccctgggcttgctgttgatgggagagtctggtaaacagagtgctcagaacattttggctggagttagagctcttttatttgctttcagagtgtttaacatggttttctggaacctccataatttagaggattggctttggtagcttcatagtgagaaggcgatgaagaggtttgagattgatattagggagggaggaaggtgggaagggaggaagggaaactattatataatgagcaggtatgatgctaggtgctttcaaatcatttactcttgtgtaaccctcctgagagtactatgaaatattatgacaccctccccctttaataatatgtagagaaaccgaggctcagcaaagccacatggcatgaccaaggtcacagaaccagacgtgaataggaatctggaccactgttctttcaggtgaaatgtcacctcttgggtcatcctaggagaatttgggggtacagagtttctccaatgtaagtggacttcttggaatccccttaaggtgcttgattaaagtcaagcccctcttcagacccactgaatcagaatctctcatgatcaagcctgagaacctgtgttttttatacctactccaggtgtctgatgcccggccaggtttgggatctggtactccggattcatgtactttaacctggccaccattctttctcctctctccattcccctcccctctacagccttgtttcccaattcccagtgcatgggtgtcatttgagctctcagaataaactgcctgttaacgtttcattaaaaatctcagctgaaacattctgggagttcacctggacatttgggagggcaggggattcgtgggaatgctctgaggcaactgtctctgagcaaatcagatcacctgcagatactcctccaggggaacccgcagccagaaagacgcacagtcttttctctctgctcatcctgagcatacagctactggccatctttgtgaaatgtatcttttgacctgcttcttttgagtcactttgagggtttttgggaagcagtactgagactgagacttccctctaagaggccagtctgggttcaagccgatgatagtggcttcctcctggggcctggaagggccagagctaaggccaaactagtgaaaaagagccacctgagtggccaggaggttgactcacacctgcgccggctttgccggcttcacgtgtcgcttctgtagaatgggcaaagtgttgagtttgaattttaaaaacccaattaagaaactcaatctttttttttttttaagccaaccactttgtcccaaggatctttaggaacttggaattaaaaaaaaacacatacacaataaaaaatagaagcttctttaaagctttctcttctcccaatctttgaggacttgggagcaacccttccaagaagatggggagagggcagaggtgattgtccttttctcaggctccagtagataaagtgtcaggccacagctctgtagggctagtggggagttttagggggtgcagatggacccagagcaggcatgtcctcataggaggtggagggcacagctgggaccatctcaatgcagcttgctgggggtttctagcctcgtgagtgggtgtggtctggaaggaagctccagccagcacactgcagggccccccccagggccatggctctcacgtgcctctgtgtgtcctcaggggtcctgtaccattttctctgggccctgccctgacaggatccccctgccaagccctgtgccctcccttgcccatcttactctccctgcttaatatttgtgtccagtgcccttctgtgtcatctttggctgtttacacaggtggtgggaaggggcttctttgcaaaagattgttcctatggctttccattgttctctcgataaagaccaagatccttaacaaggaccacttaaggtctggtcctgggaaattggattctggctctctgtccaagtttgccttattctccttcgtacatctgtacattcacttatctttattaggaaaggaaaaaaaatatgtgtgtgtgtagtaataataacatgggaaaatgtgcattgagtcttttaaaaatgtattttatatatttttaaaaaatttcaataccttttggggtacaaatggttttcaattacatggatgaattatattgtggtaaattctgagattttggagcacctgtcaattagtgtatattgcacctaatgtgtagtttttatccctggcccctactaccctccccttctgagtctataaagtccattatatcactctgtatgcctttgcatatgcatagcttagctcccacttagaagtgagaatatagaatttttggttttccattcctgagttgcttaacttagaataattgagtgttttgagttctctagatgtttaggctgatggctttgcgcctgctggccctctgctgggtatatccaccaccacttgcaccgtgccctggttaacacctttcagcctctggatctcaactcagatgtcccttcctcagggcatcttctctggcccccaggctagatcagccatgtgtctttcttgtacttaccttggtgtgtagagcagggatggcactcagttaatgattgctgagtgaataaaggaagcttcaagaggctcaagggtggggatcactgcgctgaaacttccctggctccgtgcatgtctttgctcaggatgctacagatcatattgattttgtctgtgtgtgtttaagattttgtgactatcaatattttaaacgatgctgaactctctgagacctgttctttctaacttgttggatttaattgtacaaggcttaacatgactgctgtagagccatcctcagctgtcacagtaatttagtgccctgtgtgcagccttccggcagcccaggctctaggctgcttttcagagtgttgttgttttgctcttatttacgagtagggctcagaggtgctgaatcagttcttgtctgggcagcttctgcctcgtgtatcttagtcatctaccactgtgggttcttttaaagggcactgggtcatggtgacacagaagccagtgaccattcctgtggtgatgcgggacccttgttccctcacttgggcaatgcacagtgagttcttcgtggcatagtcagtgacctctgttgccaggaagctgttttctgcctcactgtggatacaggaataggcagcaaagtgccctaacaaccacgaacttcctgatgccatgtcacaaaattccctcttctccatatcttcagatagaaattaggggagaattccttctgatcatcactgcccagtcctttttgcaggttgtgacccactaatgaattatgaaacccagtatgtgggtcatgaatttaaaaagaatgaaaggaaatagcgtagaaaatattagaatgcaatacacatagtgaaagtaactattcttttgtgaagcttttcttatattttgtgtgcacaatgcaggctgagtcacaaggtaaattacatttctttcttgcagtaaaaataccccatcaccacacctctatagcatgttgtaagtggactttccaatgtcctaaccacctgtgctttgctttttcttaaaggtatgcaaaatccagtcagatcaagactgtatcaagcagcaagatattttttaaaggaagtagatttcgatataggtgggtaccaatggttccatttcagtgagggggtggggatgggcagccacttaaatttcaaaattctgcttgcaaataagtggcctttggcttgtgcctctgtttgagtcttccatttctactccattgctgtcttatgctcacagggcaccctcaaattctaccgtaattttccccctcatgatttctatagctgggtcagacacctgtgaagttaacaaaaggacacttgtgcatatccctcccattcttctctgactatgtgtgcatacacatgtgtttctgtcttttgcagtgggaaagttgccaaagaggtggtggaggccagttccaagatccagagggagcctcctgaggtgcacaggtgagtggatgatcactgtgggttccaggtggctttaaaagctggcttttccaaatcccctataacatccctttgtgtagtgacatacagcattaaagaaggacattctcacttccttagacatctcactcagacagatttgcctgggccatggcatgagcacagctgggctccactttgagttatgtgctctcaggagagtcattgattaggtctggagcgtcaccttaacaagcaggatgctgtgccattgcctgggcaaactctgtcatctcatccttttaatcacctggccaaactctgtcatctcatcctcttacaagttctctgttcctgcctgtattcatcatatttggcccgttcccattggcctgactccgggctgacctttcatggggccattactctctagggccatgcagaggaatgaaggacttagtcattgttggctcaagagtacacacctccattaaggtgacgatatgcagtcattcttaagaattaaatattctcttgccatgttggacttcacactaccacaatttacacaaatcattgcccatcctaaacctcaaatatgctgcatatctaaagctcagcattctcaacgtgttgcctcccactttttaaggaaagatcaccatgagctaaattatttaggaagtccccctacactggtttgcacctgccctttctttcccatctttgaaacccagaggtatttcctttatgcttggattttccagtttcctccatttccagggtgactaaatgagctgggtgcctctccaccctgtcccttggggttgttgggcaggaggaggctgtggtcccacagaagtgtggctaagccagcctggagaagcatccagatggcatttctctcccacaccggggagcagaagtgcagttggcatgatatcccatgtagatgtgtacagaagaaaatttgttcctgctttggggtgacttggtgaggagctgtaatgtgaaagtctgcaaaaccaggctatcacactgtaagaagcagaagactacaggatgagagaagctggagaatcttggctccaggcatgttggtgcagatcctgaaagtgcagcctgcccaccaatgagaaaagtctttatggttccctcctcttccccaaattgtacttattcaatgcagcagaaatgaagaggaaatgataaaacatatcattcatctgtttcagaatctttgaactggaaatgacctcagggattgcctagtttgatgcttctgttttgtagacaaagaaacttgagtctcacacaagttaagtcatttatccaaggtcctgactttttttgatggcagacctaagcctagaactccagtgtcctgcttctgtgttctcagctcttttctctgtagcaccctgagagcacctggcattttcttagaagctggtagtggaggtggaactaccccaagtggttcagcatgcattttattcttccaggttgaagctcaaatatttgatcttaaatacctgatgctgagggagttctcctggtagcacaaacacaaagcaggacactttttttgcaatatactttcagagatacatattccaaaaaataaggctttttgagtctcaaagttaccatctttggatggttaatgaggtcaataaagaatttttttaaatgcttctcttgtaaattttggtttgaataatttatggaaaccaaggctttctagctcagggtttctcaaattgtaacttgcacagggatcacctcaggattctgttaaaatcagattctgattcaagaagcctggagtgatgcttgagagtctgtgtttctaacattttctcagatgatggtcacgcggctggtccatgggccatactttgagtagccaggctcttggtaacaggtggtggaagggtgaagggagcaggcttgctggagtgaagcacttttcttggagtagactgaaccccagagtgcgaggaaagtggatacatgctgaggcatccaccaaatcatagtttcccttttctggaatcttctaaaatctcccaagatattactgcaaacaaggacctgggggcccttgagacctgctttgaatgctctttctgttccacctccccctgggcatatgaaagactgttgagttcacatccttaggatgcctccatggttctttgcagcatctctcaaatctctgacaacaccagaaagaatttgattaatgtaatgctacaaagcaacctcttggaggaaaggaccgtgtctatcttggtcatctccatgtcccccagcacctaacacagtgcttgccacatagtagaggtcaatatatagctgttgaatgaatgcatgagctaggagtatgggatgacagcagcacctgtcattttctttgatgtgagatctgtccaaggtgctgccccggggacctcaatctccccagagacagcattgtggtcaaagccatagtgatgtgtgaaaccttcattcaggcaactcctccttccatcccagtagctggttgtgtggtagaaaattgttcctcttggacacttgtttggttttcaaagtatttcagcttctttgaagctgctgtcaaaagtgagaatgtagtaataagctctcctcttgtggtgggcgttcagaggtgatagtctacaatggtggtgataatactttaattagtgaattttcttcacattctgatattctactcttcaaataatgccaagttcacagactcctacatctgctgaggtgtgtgtgtttatgtagagaaacagaagcagactgagaacactttcttggaatttttcttcttcaaaaagaggagcagaagctaactctgatgttttcatgctgatcatcattgatgacaagatacccaagccaaaccctcctgaactggccactgggtgacaatcatctgcctgttccagaggcccagtgagagggctgtagcttggtgagccgagggctggttgtgtgagccacctgggcatagcagccaccacagcagacactctgaggcagcatttttaccgaacacaagcacctgtgtaggggtcacgagtgggttctaatcttagctgtgttgtttgccaactgtatggccttgggtaaatcacttctcagatcatcagcgtactcatctataacatgagatttacaacatcactttgcccaacttctaggctttgttatgagtattaaagtgctttaaaaattctaaagtgccatacaaatatgaggtgttgataatattactaccatctcttatccaaaaatgaaaaactggaatatgacagatacattcacattaaaatccctccaggtggagtttttagaggctggcactacttcttttaatttcaaggagggatataggaactccaggagtcactattttatgctaccatttttgagtcctgagtctgcctatataagcatcttttagttgagttacataatgtcagtttcctcacctgtaaatatggtatttttcttgcccatcttacatgcacaatgagaaaaacaaatgggataaatatattcaaaccacatttgccccagtattagaatataattgtagttcccaaaggaaacctttctatttcaatagagttcttaatgacaacttcatttggagaccattctatgctgggagtacatgcatgagtggggctgcaaagcgggccagatatttttgcagagtcatctgatagatggattctgagagtggagaaacatggcacgtatcctagcctggcctggagggacctcaggcataaacacagttacctcaggagttcaggtggaaaggcagagtggaagctgactgggacatctgcacatacttcagaaagtgcctgacacagtgggacctcatgtagccagaaacaggaggacagtaggggtagcaagcagagtctcctttgggacattgcaggccaaatcatgcagaaaggcagtgtgcagcatagcaaaagccttggaccaggaatcagattatctggctttgagctttgagtcctaagtttgcccatataagcgtctttagtcacattacataagctccctgagtctcagttttctcatctgcaaatatgacatttaccttgcctgtcttataggcaagacgcactaagagaaaaagatgaggtaaagtttatacaaacaactttgcaaatgaaaagaagatagccattcaaatttgcgtattatatttgtcattagttcaattgggctggcgggctcttgctttaaatgaagccaggatcagttggcacctttaaaaagtttaaagagagaattaggtaagaaggtgtaatctttagtttaaaggagttggtagatttattagtccagttgggttgctataacaaaataccatagaccagggtggcttatagacaacagaaatttatttctcacagttttagaagctgggaagtccaagatcaagacaccagcagattgagcatctggcaaacacctgcttcctcatagatggtgccttcttgctgtgtcctcacatggcagaagggggaaacaagctctctcagacctcttttataaggatactaattctattcatgtgatcatgacctaatcacctcctgaaggccccacctcttaataccattacattggagtttaggtttcaacaaatgaattttaaggaaacacagacattgaggccatcacaatagcgaaaggtgggagacttggcctgttgttttttaatgttgctgactctttcccccaggctgtcaaagtgcctcacattgggctgggagccctggattctttgtgcttcagggaaatccctagttgtatccacctttgggtttatctgagtcttatacttatcagggaagaaatgttcttctctgagtcatattattggagagtctcagggttgtaatccactgcaggagtcacctggtctaatacaaggcacgtcctatatgcccctgtccctggccatgggcctctgctacaccagagaaacaggagcctatgaatgtaggggccgagctggcatcctcctggccatctaatgccaaggcaggctcatacctgggatatcagcctggtgagcccagcctgtcttagagctaggcaattgtctggacattgcaatgttgtgggttgggggcagcaggatgcttggtatctccagctacagaatgttggaaggaggtctgatggggagcaaaataagctcataaaggctcaccgagggcccatcgttgtagcataagcagtgattcctggggataggaacagcagccagtccagctggcatggatggtcagaggtggagtagagcaattcagaactgcacgtgcaagaatggatggatgggcttttcagaggtcagaaagctacacagaccacacaggaatgacagtatgttgtccttgcagagttagaatcatagtcatgagtggccatgaccagaagaaatcccaggagagctcaaaaactgagaacccttcacaataaaagaagaaactgctcatggcgaatttttatccctcccttcctccctccctcccctccttccttttgtaaagatttctctatctacggttctttccctgtagaaagcactgtgctcaccagaacagctgcaggccttgcctcccttgggagatcactcctggctctctcctcactcacaccggattaggtgcccctcctttgtgctcccatgggaccctggccatcagtcaccttcatgagaggcacggtgttccagctgtggctacagcacataaaggagtcatgtggctgggcgtggtggctcacgcctgtaatcccagcactttgggaggctaaggtgggtgatcaccttaggtcaggagtttgagaccagcctgcccaacatggtgaaacagtctctactaaaaatacaaaaattagctgggcatggtggcagatgcctgtaatcccagctactcgggaggctgagggaggagaatcacttgaacccaggaggtggaggttgtagtgagccgagatcgtaccactgcactccagcctaggcgacagagtgagactccgtctcaaaaaaataaaaaataaaaaatacaaagttgggggtagttatgaaataaagtagtgatcaagactgggacttaaaatgaactagaattttaaaatagtggattatacatagatatgtaactattgttccataagacattaatttcagttgtgcttcttcctgtgtgtgtttgggtacagggagattatataaaatgtgtttcttggggctgggcgtagtggctcaagcctgtaatcccagcattttgggaggccgagatgggcagatcatgaggtcagaagatgaagaccatcatcctggttaacacagtgaaccccgtctctactaaaaatacaaaaatttagctgggtgtggtggcacacacctgtaatcccagctactcgcgaggctgaggcaggagaattgcttgaacccaggaggcagaggttgcagtgagccgagattgcaccactgcactccagcctaggtgacagagcgagactctgtctcaaaaaaaaaaaaaaagtatttattaatgtaggtctcagaccagaaagcttaaaaattatggttctagacagtgagttacttaaggtgaggactacagttctctggagcaaagcagaatgtccaatttgtatatatcagctgcagagtaaatggctgtaaaatgaaataatgaagaaaaggactccatggctaagcaagtcctcataaatttcctttctagcccatgccagccatgggagcttttaattcaagatggtagcaggcatcttgctgttccccactcctgctgcccaacagaaacactcaggctagaaggtagtcctgcagccggtctagggaacactctgaccaggctgaaatggcaacatatgtcaagccaggattgcatttggtgcactttagtttcaaacctgaacacattttcacaagatgccaagtgagatgcacaagtatggctggctcagtctctgcccttaaggtgcttatctaggtggggatgatcagtacaccaataactagacagagacagaggtgaaaatgcagtgagttatgaaagaagagaaagtagtcaaagagagggagaggaagggagagagagagagagagagactgtgtgcattgggaggagcaatctgggaaggcttccaggggaaggaaacatttgactcctttttaaagtatgcactggttttggttttgacaggaagcatggggagtgaggaagggtgtgcaaacatccacctgcaggcagactagggcaagcagctagtatctctgcagcaggtagggcaagcgggctccccagctcccaaccaataggcttaatgagatacctgcacagtttccttgccatctgttgctagtctcagccagacacacctgcatgctcctttccagaggagaaaacagagccatggccagttagtgagtagggtgtaactttgagaatattaaacactgatattaaacattggacatccagcaacacaaagatagcttatagctgtagaacatctgcatcatctatctggcaggggtttttgtttttgtttgttggtggttgttaaatttctctgagccatgcccttcattcacttttctacatatctagttcagtgctagctacctcccatgtctttttgtttcttctttctttttttttaaaaaacgcccaggctgtcacctagcatgctcagggctggtgatgtattgggaactgtattttctttcgttgagttgcagtagaacatagggacatttggtcaggaccttaagagcagaaagggccatttatcttgaatgttacgtcatctttactactggctcaattcactgtgtctggaggtagttccctgtagacacaaaatggtagcttgggcagcccgctgagatggaggggccagcatttgtgatggaaaccaactctgtctggcttgtgtctgttttcagagccaacattactcagagccgcagttcccactccttgaacaaacagctcatcattaacatggaacccctgcagcccctgcttccttcccccagcgagcaagaagaagaacttcctctgggtgagggtaagtctgtctcttcatcccaaatgctggtgctgcaggcttcctctggaaaaaacaagggaggcgccaattctgcatatgatgggtaattgattagtgtatggggtggagtgggccataaactatgtttttagtaaataagctttttgcagctggaaggctgtattatactgggagctctattagtttctcttggagagacttcactggtataaagtatttctaaaattatatatgaaaagactaatggtgttagacctacaccagtccagtacactaaccattagccatgtgtggctgtattaaactaagtttaaattcattgtaattaaaaatccatttcctcagtcacaatagccagattctcagtgctcaatagccacatgtggctggtggctgccatattggacactgagactgagataatttcctctatcactgaaacttctattggatgttgatgtctgccactgtaatcacaattaaattggtggcaataaagagttctccacaagtatctctacactcgtcatcccatttattcccccaggcttcttgttcttgatccttcatttacattgtccaacagttttgatacaagctaaaaaaaagtgaagtgtccactgcaacccccacatttgttatatttttaaagataataataatatgtgtgtttctaggcatctttgtttttaaggactctccttacttcagggaagaatctcaccacaatgcttgctgcaaacacctgcagacatctcacattttattaatttcaaagatttgtttaaattaagttgatgaaattaattaaattgaaaacaaatgcacacaaaataaacttattggaacctttgaatacaaacatgctttttcttaactttgtgattctggtttcatcgttgaaaatctggatactgggcagtttcaagagggcagatcactctgtccccaaaagatcaccttcacctccagcttcaagtcaagaatttatttcacaggagaaaacttcttagtctataataaggatatggcttggaatgcagatacccttgagataggtagcagcaaccaatttgcagtgacacataaaaaattctagtaaatcttttcctgaaaggcagctttgatggttagaaggagaactaggcaactggatgcccaaaattccatgggtggaggaaaagtgtgcaaagtatgaaagatgggatcttagaagacactacttgtcttcaactgggctacaagagatgatgataatgagaacactcttgttataaatggcttttgttatctatcttaacaatgaactctgtaagttccatgccaaatgaatttccttagcctaagggcctctgggtccatgttgcttgtctgtgtttttcaggagattatctgtttttgtgtgttttgcaaatgaaagaaaagcagttttaatttctggtcactaagggttttctgagtttcttcctatatgcttggaatattgctttgagtgaaaatcattttttctgaaggtcatgattatcccaagtttaaatgaaggagggtgtggctaatagagaagaaaagagaagggacatctcacaactggaattgtgactgtaccttgtctgcaaagatggaagcttagatgggaatgcaatttggaggcccagatgggttgaatgattattatggggaatacggaaccctaggcctgctgccttatgatcccccaagatgtgaaagggaacctggtcaaactttcttccatactcttcatcccattcagttagggacatctgttttgctccattttctataatgaggttccactgctaaatattaggtgtgtttttgacatagcaactgtatggacaatagacaaaccattgtaattaactgcaaaataatttaaagaatttcatgacaggataggaatgcataagctaccttttcaattttcccagttgttttaaagaaccatcttcaattattttaccagctgtaaagccaaactgatagatctctctcttcggaagtccacaatagctctatcgatatctaataaaattattttctccaggagatttgtcccctgctagaacatctttgtgggttttaaagttcagacaagtcatgacaactttcatgatatagactcaattaaaaagcaagagaagtagaaacaacaatattgttaatttttcaataaatacagtgattctctcaatttagagtaagagcaaaattatcttaggtaccgtatgatatccactggagacatagctctgtgttctggataccattgtacctctgttactagtcaaattctgctccatggcccttgtctttgaatgtcaagcaatgggattcaggcatttcattagatagatacctattatatagatttacacttctcagatttataaagagaagagagacagattagagctctaaacaaagaagatgttttcatctttgtgaatgggccttgtttctgggcttttgagtgcatgcactatgaagaattttgtttcatctctatattttaatgtttcatttctttttatttctgtgctagagccaaacttaaagaggctgggaattcattcattccttaatgcaacaattgtgacaaatacaagttgtacaccctgtagaccacacttaccatgtccaagttcctgtggactataaagatgaagacatgaagatgctctctcttctggaggctcacagtccactggggagatggcagtgggatcacagaggcgatgacaaagttctgcctctgctgattgaattgtgtgcccacttttctgtgtgccctactggatatcagtgccttgagctgccttgagggcatttgttcctttttagtcccattggagtgtctgacataaaatcagtgggctaaggaataaatgggagagatggacaggaagagttggtaacggagtggtctgtttcacctgcatgaggtgtgagtgtggtttcagggaagagggttctgggggatggtgaaggtgaggtagaaaggtaggagagggccagattatgggcctcgtgtgatttgcaggagaatttagactttaacctgagagcagctaggaggcattgagggatttcaggtatgggaatgatatcaatggcatgggagttgtattttgtatcactctggtgatgtgtagagaatggattagaggcagatatggctggagcagagtttttcaacctcagagccactgacctcttgagctagacagttctttttgtgggattcctgtgcattgtaggatgtttagtagcttccatggcttctatccagtagatgccagaaggaccccactggtcttgacaaccaaaaatgtctccagatactgctgaatttcccctggggagcaaaatagttctctggttagaaaccactgggttggaggcacagactacacaggaaccactggaggagcccagggaatagatatgcaagggctgaagcaggcagagagaatgcaactagagaggaggcagtgcatacaaggcatagtaaaaggcagacttgtggagacagggtcgctggttacatggtagggacacagcctgtggattcctaccgtccgggtcctgctcttatctcggagacattgagttgaaaacacttcaacctctttatgttaaagatgagactatagagacccaggaatgtttcagtggtgtgtcagcatcacacagggagtccatggccagcatgatttcgttgagttgttggagccattgagagagttacataatactgttgcttctcagagcttcaaacacagagtggtggagactcagcatcaccacttacctttgttatcactgttccccatctggatatactggttcagattcttgtctgggggtttcaaatcacatattttggaactagatttgtaaacggttcaagatcagcagcttgagccctgttaaaagtgttgtctaatggctgggcgcagtggctcacacctgtaaccccagcactttcagaggctgaggcgggtggatcacctgaggtcaggagttcgagactagcctgaccaacatggtgaaacccctgtctctactaaaaatacaaaattagctgggtgtggtggcatatgcctgtaatctcagctacttgggaggctgaagcaggaaaattgcttgaacctgggaggtggaggttgcagtgagctgagatcatgccattgcactccagcctgggcaacaagagcgaaactctgtctcaaaaaaaaaaaaaagtgttctctaattaaaaattttttaaaaatcagattgggagaagaaagtcttaacttatggaatctctatttctgtgaggtcatgggaatgtcctgtcaccttgtcttaaatggtgtgactagtggggacatctctgccactgccatggccctctggggtcatgaccacccatttatcagacaagctttttccattcttttcaagtttctcaaagacagctgggcagagtgttattgcccagattaatgcagtggtgttctgggaaaacgtgtgaccccattcagccatatgacagctggaggattaggtctcaagttggctgtgtcagggtggagaaaaaacaaaatcagttcctaggcaccactgggcaacgggaatgttttcaaagcccacccaaaagttgcttggttacaggatctgagagaactagtgctgtggaaaacttcagatgagaatggcaaaccatttgaagagtgccacttagagcttatgagaatttctgcagaagaaaaaaattacagtgggaattgttctaggtgaaaatgacattttaaggagtcattaatctgaataaattcacaagcaaaatggagcaggttccccatagtggagatagcaccgtgcttctgtgttttatcagtagagtatatgttctcattatggaagaatgctggattgtagtagagaaggggagtgaaattaatcatgtgagacttggtaactggcaattacagacacacaatgaagatcactggtgtctgccatagcagtggtgcaggctggcataaacatggtagaaaagccatgcttggtaggtacaactataataaataagagttgaaaatatttgttttccccttactggtaaaatgaaagcacaatggagacaccagaatttttataaaggagggtcttgggggtggcaatgggtgttagattaaagggtcatgtgaagctgcttttgcatatgatcgagaaagtatctttattgaagaatagctggaaactaagagaatggtaaaactaactctcacaagccaccctgtagcaccatccctgtaaatgtttgtgtatgtgtttgcgcgtgtttgtgccgagtgtatatgtgaatgcatgtatgtgttgtgcatgtgatggcaagtgtgtgtggaaggcagaggcaggggtgtttaaagggttgcttacagtgtcttgccctaaccatagatggcttaaggtggtttcactgaaattctagaaagtctgtgtgtgaacacgcaaaggcatttcgtgcatgtaaaaagagtattgtcctcatccatcaggcatgccatactcttggtcccacccaccctccacccgaacacataacaggtcactggtggggctgctgcattgtctatgcatatgtctttcatgcactacacagttgctccgatttgtcactggtgaagtctctgacagcccaaggctgctgtggttataccatggtgagttccttatcttaccctctaccaggtttggtcttcctccctgcctgtctgacgtgaacattctcctccctcttttctccctttctgtagttccatggtcatggttcagacaaatttaccctattcttatggcttcggtgtctttcttcccaccattttcccccagatgctaagccatttcttccctttggctcagatgtgtcaggacatatgcattagcagtgatgcactgggttttgtttgtttgtttgttttgagatggagtcttgctctgttgccaggctggagtgcagtggcacaatctcagctcactgcaacctctgcctcctgggttcaagccattctcctgcctcagcctcccaagtagctgggtctacaggcacacgccaccatgcccagctaatttttgtatttttggtagagacggggtttcaccacgttggccagggtggtcttgatctcttccccttgtgatctgcccgcctcggcctcccaaagtgctgggattacaggagtgaaccaccgtgcctgggctgcagtggtgtttttgaaatttcttttgtgttacgtcccatgaaacagcagaagctgtttacgaatcctgtggaatcacctttccccttatggttcctgctacctggtgatgaccaaccccagttctaattagacttgtccctaccacagggttttgtgattgctgtttgccttatttttcattataaagctagtacatcaacttctaaaaaattcagaaatcacaaaaaagcataaatgagcaaaaaaaaaaaaaaaaaaaaaaataacatcctagcttgccccctcgtagaggaaatcagtgttaatgcattagcaatttcttccctatgcattttaatgcagttgcagttatccagtatactaaattcttaaaattcctgctttgtttgtttaatgtggaaaacactggtgcatgaaaacacatcagaagttgaactggagatcaaacaatgaattgggaacatatttaacacaaatacagacaaatgggttaaatgtcctaaattagaaggaactcataaaaagtgctgttttaagcatcattttcgcattgcacacgcttggactatcctgaacattcttatctaatggcatctatagtctccagctgctgataagcacatagtagctggagttgcttctgcaggagctaggatgcctccacagaacagaaggcagctcctgtttttgtttataattgcagtattggattagcaaaataaaaattcagaattatcacaactattggattattattattattattattattattattttttttttttttttttgagatggattctcgctctgtcgcccaggctggagtgtagtggtgcgatctcggctcactgcaagctccacctcctgggttcacgccattctcctgcctcagcctcctgagtagctgggattacagtcacccgccaccacgcctggctaatttttttgtattttttgtagagacggggtttcaccatgttagccaggatggtctcgatctcctgacctcatgatccacccgccttggcctcccaaagtgctgggattacaggcgtgaaccaccgcgcccggccaacacctattggattcttgaagacagcatcacagtttgggtcagcaactcctctagggtaggagatgccaagaacagcttgagaacataaaggcctgagcatgctctgcagattcctattttgcagtcttttcaaaagctttttaccttttctttcatgtttttctttggagctattctcgtctttagaactctgggttttttctttttcttttttttgtttttgtatttactgacaacttaagtactcacgagaagtttttatcacttgaaaggggactttgaaattttgagtgtttactgtgttgtaaggaagctcaatgccttgttcctgatgcaaactcagtgcaccttatcttgcaaacattttgtattttacatcttaagacaccaatagtgtgcatcatttcaattttgtagttggctaattctccacaaatagttcattttatgaaatacagcattccgcagtggaagcatagcagtggttcaggtggctgctgtctttctgcattaatgtctcagatgaaacctggtgttggctcctctgccaagcagccaggtgaccacagacaagactatccacctttcagagcttcattttcctcatccacaaaacaagaagattggatttgagcaccactcaaatgctttctagctcttaactctgattcttttgctgaatgtcaaggtaaaaaaaaaaaaaaaaatccaagactgtggcttgaggtctttttactatgagaatgggaacttggggacaggaatatttttcatagcttttgagagttaaagggaatgttgaggaaggtcttgcacaagggttagcaatatatagcctgtggcgggcccagcaccacttatttctggccttcaagtgaacagttacgttttagacgatgataaaagtacctatataatatcctccattttgcctcttttgaaccaccttcaacttttaagttttaaaattttgccagcaaagcttaaaacttacaatctaagccttcgtagaaaatgtttgctggcctctgatctagcacataccctcaggattcttctacaaatgagaaagcctagagagatgagaaaatttgcccaatgttacatggttgggtaagtattctggaaagctgggattacatccttatactcacattcctggcccagctatcttagatggcattgaacacagctaaaatgactcaactccttcttgctgaaacagaatgggtaactaagaaactacatctatttttcaattatagcaaatgaatgatcaaaagagacaacatattttatttaagtatgggtgacctctgtggttcaatgagaagagctcgtgtgtatacgggacagggtgcaaggctttggttttccagcacagcatgccaggacctgctgactcctcagagacttccatcaccctagaaggagtggtgagaaggctggggaccgagtgtgttgcagcaaacagaattcttagtagagccaggctgcaggggaaacagacttcccacaggaagctcgctcccttctgggaatcatgttctggttttaaagttgaattcattaaataaggaatgactcattccagggctggttctaattactcatttacttacagtctgtgttaagagtggctgtcttcgtggaagcaattcagtagcagagcttcccaaatcattcctcctgttcaggtgagcattttgctaccccacttaataataattaattgcttcaaaggacttggctagggtgaaaaaatgagtcagtcaagtgtcctaggaagtagtctagtcatgtccttgagggctgggatttgagccagaggagagtgttgtgtgaccagctgtgacagccagagtgtggtctgcggaggggaagacattttgcttggcacttagataaatagacactctcactacttccctaagaaaccacaggagaggaaaggtgaaaatattactaaacctattgttgctagaaagcagaagctagaattttctgagttttagatgcatggggttctattttcttgcatttttgtcagtgggttggtagtgagtgttaagtagatgttctttgcaatccccaagcttaaattgagacaggatctcagagcctctccctccgtctcctcccttctcttaagatccagtgccacttaaataagagaaagtgttgggcagtgtgtgctggttaccattcttttaggtgggctctttataatagatctgaggcaatacaggcaaggttcagagaagaggctctggtcagctggctcaaggctgagtcttgggagtgtacgctcaatgctgtaaacagaggagtgcagtctccttcctggtttggcagatggtgaattggaggtcctagagctgtggcttccagagcagggtacatacaatgatccactggggtggaggaagaaattattcagacttctactgatattttatttttatcacctcttcataaaatttctgttgtataggttttataatgtgcatatatacaatgacagatatacatgtatctaatttataaataaatatgcaattatttgtatgcacaaatattttttccccaaaagaagatttggaaacagctgctctagatcttgaagatgagtctaccaaaacgaaaaggggcgggggtgatatgtttttgaaactctgaaatctctgttcatgccaaagccctagattccaaaatagatgtgagaactgtctgctctagttatggtggtgacatgccattttacatgcttttggtctatcactctggtaaaccagggtgagtcacccaaacacagtcagggcttttgccaagctattgggtaggtgctgtgtcactctcatttaagcatcgtatggtgacccctaagtctccaatatacacaggtgctggactgcacttgagtggacaccgaatacaatattagtggggattctctggtggcgggaagagcattggacagagaatgagagggccaagctttgttcattcatttgttcacttgattaacatttacttcttatctggcacgtgctggacattgatatgacctagatcttattttctcttctgtaacacatgatgagattatttctgagtttcttctccactctgattgttctttaataattctttctccagattgctactgctcttatttacatggttttagatcattggtcattgcttttgaaagcaaaaggtatagccatcttctttcttgctttttattctatgaaagacagttttattttacttttttagaaaattttaagttccaggatacatgtacagaacgtgcatgtttgttacataggtagacgtgtgccatggtggtttgctgcacctatcatcttattacctcacctaggtattaagccctacatacattagctatttatcctgacgctctccctcccccgaccccctgctgacaggccccagtgtgtgttgttcccctctctgtgtccatgtgttctcattgttcaactcccacttacaagtgagaacatttggtgtgtggttttctgttcccgtgttagttttctgaagctaatggcttccagctccctccatgtccctccaaaggacatgatcttgttcttttttatggctgcatagtattccatggtatatatgtaccactttttttaatccagtctctcattgatggggatttgggttgattttttgctattgtgaatagtgccgcaatgaacacacacttgcttgtatctttataatagaatgatttatattcctttgggcatatacccagtaatgagattccttggacaaatggtgccatcttctttttaaatgtggtaactgagacatgaaaaatggggaacaatgatatttaaaatcagggtttaacttttttcctttctttttgtgagttgcaaatttctagcataaaattgaaaattaataacagctagcttaaaaggtaatataaaatgagtttttcttacttgaaagagccctcacttcctttagaggcatccaattgggaactttcaaaatcctcatatctccacttcaacattagaaatgtgataatgggcagatgctttgggtgaaagagaaataaacagggttttcagaatgactcacttgataatcggaacataggctggaaattttgttattaaggaaagggttatccatatttaaaaaatagagcatcccttgtgatctgtggtcttctcagtacctgcctagcaccttggcctagctgaacaaattggcccctaaatacaggcttggccccaccccagctctaggaccaattgtacccttactggggagggaactgagaagcccaagcccagccctttggatgggcccttagtttgctctctctgttgctctgtcctgctctctggctctcatgcccaccttccctttcctgagtccctgccctggtccccgccctgacccccagcactctgctccctcaggaccttgacagcccttgtctctggggctagaccgggcttctgactctgaccctgtggctggggacgtgcccctgcttgctgattgacagtccacgtgggtcatccttcatgtcttatgtcccctggggccatgttctctttccagaacaggctcttagtagagtcagacttgtaaatgcttgcctttcccgtcaaacttctcccattgcccagtggtcataagatattgaattgtcaaattcatctgtaaaatcctaaccttttcagtataacccaaatgtatttccatggccacccaagccatgtgcagcccctcatctctgtctactggatgtgcagttatcgcctgaggggttctctgcttccactcctatccccatcctctcatccatattttccatacagtagccaggggattattttggtaagtggagctcagatctacttatgttaaaatctcagctccttcctctggcctatgaagcccttcttgctttgcctcctgcccacccctcagactgtttcccgttctcccttgaataggctgagctcatggcaatctcaaggacctttgcaagagctgtttcccccacccaggagggtcttctctctggtctttgtatggctgtttcttttctttaagttttagctcaaatttcagctccttggaaggtcttccctcagtgcctaattctgagtaattcctccaatctacctgtttgctccctctcatgctatcaccctgttttattttcttcagaacacctgacactatcaaacactgtctcacttgtttgtcttcctgtttgttgactgccttccctaactaaaacaccagctccaaaagagcaaggactttaccttgtttccctcactattcccagcatttagggatgttccggtacaaagtaagagctaaactaatatttgctgaattaatgaacaaatgaatgaatgaatgtatggattctaaatgcaaccaggacagcatttatttatataaaagaaagcatacaagtagaatattctcctgggattagggtttgccagaagtcaagcatgctctcttgttatgttttttagtgtgaaatcaaaagcaatactagaccaagtgtggtggctcatgcctatactcctagcactttgggaggccaaggcaggagtatcacttgagctcaggagtttgagaccagcctgggcaacacggcaaaactctgtctctaccaaaaataaaattgccaagggtaatggcatgtgcctgtaggcccagctactcaagaggctgaggtggaaggatcacttgagcctgggaatttgaggcgacagtaagccatgatcataccattacacttcagcctgggcatcagagtgagactccatctcttaaaaaaaataccatagtcattgtagaaaatttggaaaatacaaaaacacaaataaaatttaaaaaccacctgatactaaaactgttataaatgtgtagaatccatctatatattactgacaatttttataattttaacaaaaatatactagagatgctattttataatctgctttttcatttcacatgaatatttcccattacattaaatattcttctataattttatattcaatggacatacaatattctaccacataaatatgcaaaaatatttcttaccatctttcctccacacatcccaccaaactgtatatgagaatatctctcattgtagccctgcgaaaactggatataacacttttaaaaaatatttgataatttggctgggtgcggtggctcacgcctgtaatcccagcacttttgggtggatcacctgaagtcaggagttcgagaccagcttgactaacatggtgaaaccccatctctactgaaaatgcaaaaattagccatgcatggtggtgggcacctgtaatcccagctactcgggaggctgaggcatgagaatcgcttgaacctgggaggtggaggttgcagtgagctgaaatcacaccattgcactgtagcctgggcaacaagagtgaaactctgtctcagtatgtatacatatatttgataatttgaaagacaaaacctatggtggttggcaacttgttttgcatgtagcgaccatttgctcttctcttttggagtcatagctagatgcaagagagaaagatgcccttggctagtgttttgggtgtaaggattgggttctgctacctctagcttcttgattacatgacagcaacacaaggagcccacagttccagaagagcctgggtttttccacagggagacacagatgccctgtttcttaataccatctgcaaagctgttgagaaatatggagaacaaaattaaagcttcatttatttatgtaatataatgtaatttcctttactcagagaaaaatgcattatctttaattatgacttatgtctggagggagtgaaataataaagcagaagtgatggagaaacaaattcatcctgtatggggacaaaggaagtagactctttcttgagagtattacacaggaaccaaaataggctgttctaattggagtcagtaagttcagtgttgttatccatttcccctccaggaaatcttgggagactacattggcatctgataaaagtttaccatcaatagattgccttaatgtatccaagtcatggaacatcaaggaattcttaagccctaggttcaaccaagataaaggaaaaacactttgtttatatgagttataggtagccttggtcagtgagatagtttaattagccaataattgtgcctcggatgaacctcactggctacaatactgccactgtgcaaagctgagataatttaaattatactacaagagaattcctcatgcatgtttctgaagaacacattatagttgtgaaattccctgtctggcctctatgggagcttttcagctggtttcatccatggacagctatggaaggtttcccttcatgttactcccacccctatagttggagtaaaccataggtattcaggccctagttttattcatgagggtttagcgtaccatgggctgttgagtgtaagggtgtttcttatagtaggtaaatcagagaggagatggacaattatcttactgcacaatctatgggtggcttgttgcataatgatgttcacagtatatggtgcttgatccttagaggttgggggtcccttacctcaccatctcctctacttgtggcttcttcacttttcccttcagattattttgtcccatctgcaggtcggggaggaggtctttctgccttggagcaatgacttgtgaaattagtgatcagctattcatggtcattgttttatttttgggtgggctagttttgctgcctaggctggggatcattagaaggccttcaggaattttgtaagcacaggtggaaggagaagctcattgatcagtatttcaaaatactgtttttgttcttcattggtatttggagagagacaaggcagagaagtggagagaaggaagtcggaatcccaggcatagtgttttcacagagtaaagtgatcctgacctcctctccgtgatcctgacctccatgccgacggctcggtcccatgctactgctctgtgctttcagctgcttattggacacctccacctggagggcacataacagctcatatttaacgcatcaagcttaatatgtttacaactccactcatgacttcttttttctccaaaacccagtctcaaacctgctcctgctgacttggttgatgacatcactatgtacacagctgtcccagcaagaggcctggaagccacccttgccttgttacccttccccacactccacgtctactgagacaccagagtcctatgaattctatctcagaagaagtcctaaccacctgttccctgctatctcttcttctctttcttggaacattgcaacatctttcttattgatctccctgtagcccatcccctgaactcctgctacagtctttgctggaagtagtttctagaacctggccattgactgcatggagagtccagtcccatacagtggggccaatggttcctcacacactggcctccaccctcctctccagccttagttccctgcaaggccttttgtcccacctggaccctcttatccttctctctcagacaaagcttctccttccagcaccacctgtctgtgccaattccttccttctcgtgctggttcccttgctctggctgttcttttttcttttccttgctgcaccaggtaaattgatactgatttctcaagtggctcctcctctatgacatatttcttggctcttgacatgacatggcattaatagttttctcctctgtttatttcttcctcagggtacttaaaacacctctttctgtcagtttaaatgtctggcctaagtggtgccctgcccttggggactgctcaataagggatagatgactgaagggagaggactcaatctagctgactcttctggtcctgacctgaagccctaagattaaatagaagtcctgtgttgtagagtaaaacacaaaatccagagttctaatttgcttccactgagaactcataataagtgctgtgcatatttataatgcatcaggctttttatatcatttaaaaagaacaaatgggccaggcatgatggctcatgcctgtaatccttagtgcttttggaggctgaggtgggaagatccctgaggctaggagttcaagaccagcctgagaaacctagtgagatgccgtctctataaaaaaatgtaaaaaaattatccaaatttgatggcgtgtacttacagtcctagctgcttggcaggctgaggcaggaggatcactttgaagcccaggaggtcgaggctgcagtgagctatggatgggccactgaactccagcctgggtgacagagcaagaccctgtctcaaaaaaaagaaaagaaaacaccaagtgacttttttgtatttttgttctaattttattttaaagtgcatttaaatgttatcctattggagcagaatatgataattttagacactttgtgcataaatcttagtcaatttcttggagggggtgaggaactgtatgcattctttgtaacaggagcagtaacttttttttttttccccaggttttttttttttttttttagtatttattgatcggatttggcagggtcataggacaatagtggagggaaggtcagcagataaacaagtgaacaagggtctctggttttcctaggcagaggaccctgcggccttccgcagtgtttgtgtccctgggtacttgagattagggagtgctgatgactcttaaccagtatgctgccttcaagcatctgtttaacaaagcacatcttgcaccgcccttaatccatttaaccctgagtggacacagcacatgtttcagagagcacggggttgggggtaaggttatagattaacagcatcccaaggcagaagaaattttcttagtacagaacaaaatggagtctcccatgtctacttctttctacacagacacagcaacaatctgatttctctatcttttccccacatttcccccttttctattcgacaaaaccaccatcgtcatcatggcccgttctcaatgagctgttgggtacacctcccagatggggtggcagccgggcagaggggctcctcacttcccagaaggggtggccgggcagaggcgcccccccccacctcccggacggggcagctggctgggtgggggctgccccccacctccctcccggacggggcggctgccgggcggagatgctcctcacttcccagacggggcggctgccgggcggaggggctcctcacttctcagacggggcggctgccgggcggaggggctcctcacttctcggacggggtggccgggcagagacgctcctcacctcccagatggggtcgtggccgggcagaggcgctcctcacatcccagacggggcggcggggcagaggcactccccacatctcagatgatgggcggccgggcagagacgctcctcacttcctagatgggatggcggccgggaagaggcgctcctcacttcccagactgggcagccgggcagaggcgctcctcacttaccagactgggcagccgggcagaggcgctcctcacttcccagactgggcggccgggcagaggggctcctgacatcccagacgatgggcggccaggcagagatgctcctcacttcccagagggggtggcggccgggcagaagctgcaatctcggcactttgggaggccaaggcaggcggctgggaggtggaggttgtagcgagcggggatcacgccactgcactccagcctgggcaacattgagcactgagtgaacgagactccgtctgcaatcccggcacctcgggaggccaaggctggcagatcacttggggttaggagctggagaccagcccggccaacacagcgaaaccccgtctccaccaaaaaaaaaaacgaaaaccagtcaggcgtggcggcgcccgcctgcaatcccaggcactgggcaggctgaggcaggagaatcaggcagggaggttgcagtgagccaagatggcggcagtacagtccagcttcagctaggcatcagagggagaccgtggagagagagggagacagaggagagagagggagacagagatggagggagagggggagggggagggagagggagagcaggagcagtgacttaacaagagcaactatcttgagtcacaatcatgcttgttggctttccttacctaagttaaccgactgctttgaatgatgtgctcttttccgtttataaataagttggagagtcaggaaaatacaaggaagtaagtcatgataaggaggtcttagagctactgagaacagtggtgttgaagaatgcccagctgtgctgcttgaactatactttgtctgcaactgtattctccagaggatttttattgacctttccccagactctacaaggtgatgctgggccccagagagcagttatctcagcttacaggcaggaaacattcagtctgatatgggaaatcataagaggaacagtgtctaatatgccaaagcatcttatgcatttccagggttttgttcatgtaagttatcataatttgacactcatgaccatttctttgaattggatagaacagatactgttgtctcactttccaaacaaggaaattaagttatacaaatggttgattacctggccatatggtcctttctctcagtctctcagtgatgttgggaacagcttccctttctttttactgtatacccaagaatatacccctcctatcataaatatattattaaaattattgtttatatgttttattaatacaatctttaaaaagtcctctgaagtatatgttagtcccaaggactctttttaatggatacttaatgtctaacctgattacaaagaacatttaatgaatgtaataataatttattatctttccacttggagctagcagttagctaaaatttcagtgaatctctcaaactattttaactaatggctgactccactatacttgtcaagtctgttggtttctaatgtagataaattgcatgatattgatgatgatataattatagttagtatttattaaatgcctattccatgtcaggaacccagtcatgtaaacacccagtatcctcaccattttgcagatagaaaattgcattcagcaggcttctgtaggtttcccaaggtaataggcatggccgggttaactcctcacaaccagcaatactgctactattggggaggagtaactcgtaatagtatgttaagacatatggttgacagaaggaagagaatccaggctatttaaaatcctcacagtcttcctcttgagcagttaaaaagagaccaaaaaaaaaaaaaatgaccatgtattgaaaaaaaatcgctaacatttattgagtaaattgccgtgcaaggcactgatctgagaatgccatgtgtattaacttgattaatcctcacaaccaccccttggaggtacacactgcttttacatctgtaaaatgaaagcttttgttacagatgtggaaactgaggctcagagatgataaacgatgcagccaggattggaacccaaggactgctccaaagtctgtgctttaaatcttgccttctacaattgcttaataagttctggttcataggagccagctctatgttaggcacttgatatgtatctctcatttccttgtcataacaaccatgagaggagttgttgtctccattttacagtcaaggcaccagggctcccagatgtccagtaacttctagccactcacaaagtagaggcaactttgttgcctttccccggatctgtgtccggtggtttgtgcaggagcagccatggaattcaggctcatgaacagttcttatcactgaatgccattcttcttctttggtttcaggctgacttagcaagcagtgtttctgacatctcattatggaaaatcgattctcctcttcacacatcttctgctttctttggcctcttgtcactgcccagacatgcattcccaattctcagacaaacaaatgaattgaaacaggaacagtattcaagggcatccaaatgttgtgctactgatactgttcagttgagcacagtggcctgaaccagaacaatgctcactgtgcaggatcctgcagaatctttggcttggttccatattcccacctctcttttcttgttcctcttgaaaggtagacacccctgtgggcagagtcagacaaggtagagagaaatggctgaggcaatatagaatgcttgtcttgctagcttatctttctccatgaaaggagaagatccataaaaagcaagagtaaaggaatctacttacgatctctgaaaagtagcgtaaagagtgagagcaggtttaagaggggaaaaagtgaaaaacatgtgaaatgctaaatattatgactggctatagttaaaataataataatacttttgtttgtttgtttatagtaaaataataataatacttttgttttttgagacagagtctcactctgtctcccaggctagagtgcggcggtgagatctcggcttgctgcaacctccgcctcccgggtttatgcaattctcctgcctcagcctcccgagtacctgggattacaggtgcccgccaccacgcctggctaatttttttgtatttttaatagagatggggtttcaccatgttggccaggcttgttttgaactcctgatctcaagtgatctgccggcctcggcctcccaaagataataatacttttaaaatgaaaggtaggaaggaggcatttgaaacaatggtgagatgttaagcttgagaattatggagaataactatcctggtagaaaaaaacagaaataaaatatggtgatagttttgtttcaggttttttacttgttttctcttttgtctttggaaggtctgtttgtttcaagtgagctgtcaggtcatatgttgttttaacatgatgataaacataaagatttatctatattcccttcagacaggccaaagggagatttcctcagtattgagccatggcctactgccatgcaaatgagccccggttaatctatgaaattcatcgtgtgttactgcaaagtagtgatttattgtgaacagtgattttcagatttgttcttcagtgtcctaaagatttttagtagttcttcaagaaccattgttggtgactagtgagggaggtgtagtaggtactagtcctgggccccacctttgcgtcagtctatctgttttaaacctggggattctgctcagaattatataatcagggggaattgcaaagggttgaagattttgagaacttttagggatattttcctttcaagcttcagggttgaaaattaactaactcctgtgagagtaggaactcctctgccacactggaggctgctcacccaggagaggggagtggggggcccattgaggtccctggaaatggcctgccccacctcagccacagtgcatggctggcaacaccctttttcccttctgggatttactgtctggtcttacatttatcctgtgtgcagttttacatagtcgatgccacaccatttatataaagatgcttttttcagttagtagtatattgcaagcattttctcacatcattaaattcttctaaacatgaattttaatgtctgtgcaatatttcatcacatgtatttaaccattttcccactggaaatataggttgacttaaaaaacatttttggctataataaatgatactctgatgaacatctttgtcttaagatttttgtcagcatttctgattattttctcagggttaattcttaaaagtggaatttctggttcaaagaataccacagctataaaaatccatgtattttgctaattttctttccagaaatgctaaatcaattttatattgatgcataacaacatggaatttcaattcctgctctgaataaacctttgtttcatagaggattattagaaaatcatcttttggtgacagatatttaaagtagaagaatgtatgcaggcgtgttgaaattgtgtgaggaaaattttttcttctcatccttttcatgaaaagtcagaatgtagtggttgcatggcacctgcatttagaacactaactttagtcagccgatattaattggaagcctaggttcaaatcatggctttgccacttactaacttcgtgattgtggtcaggtcagttactctctctaagttgtcgtttccttatctgtaaagtgaagaaaagattagcattgttatgagatggagataaggcatgtgaggaatccagcactttgaaaagagctgagattaccatgacagcaaccatatatagctactgaacacttgaaatggagctggttcgaattgagatgtgctatacatgtgcagtgtgcaacacacactaattccaaaggcttcgtcccaaaaaagaatgcaaactctttattaataaaagagttgattaattattaataaattttgatatcattacctgttgagatactatttgaatatctcgatttcaaataaaacacattattaaaattaattgtaatacatttattttgctttttaaatgctttttttccctctttgaagtggcttgtgttataatcttactggacagtactgctgtagaatataataaaggctggaggagcaatttttagaagaaaaagtgggttatttctccattatggaattatccagttgtcatcttatcttttggggacatttgattcttaggaaatgatgaggcatttggacagggtcctctgttttggtccggaaggtttagaaaggctagagtagggatgatgcataatctttcattgtttgttagaggggtgagtggagagtttaaaaatagcgtcccctccctcctcccctcccaatgctgatccctcatgagttatttctgttggccgcattaggaacctgacatttgattcattcagtgggtcctgcctaggtcctttaaaacagaatggactgttagggaaaggctgccctgggccatgcaggccgaggagaccaaggggattggaataaccagtatggcaaaatgcttggtcaagatccagactcgacgaagcctccaattgcacatggtgaaccactgcaacagtaatgtgtttgttcgtctgctgagactcggctccaaggtcacagctcgtaacactggtatgtgtggtgccctgggctgtcatcctgttcctgaagtgtgcgggcttccagcttcctgctcactgctggtggagagaggcccagggtgaatttggtgtcagaggtttttgataaggatgaaaagagagagaggaagggagaaaagcagagacgagtgggaaggagggtgagcaagccagtgcaaaggggaaacaggagggtgtgttccaaatgatataaagttgtcataaatacaaattacaccctagtcagcagtgagtcaggagggagagggaggcagtggtggtgtgtacctccagattgttccataacatgagaagattagggagaaggcagaatggatgatcacaacacgctccccctcctttcattgttgaaagggtcagagctcagatctgcttgcttgctggggtgaggcggagcaccacttttatcctcaaggcagagctttactcaaaatattggccaaagaattggaactgaccttctgccaatttccttttcattgtaaatatattttgttattttatggtccttgagggaaataggaattgaaataggaacttaaaaagttagagcttacagcaagaaagaagctgtggctatatgtataaatgtggtttttaccaattgattaacacaaaatacaacctggaaaatgtctgtaattggctatatctcatgcacatgtgtgaaactgacttctaagtgaattgagacgaaattgattatatttgtataatgacataatacatgatgtgttcttgtataaaagagtttttaaaagaacaaatatatagatgctttccgttaatactcccaatagttgatctatgaatactgccacatgggatataggattttttttttttataaatgggattgttcaagatatattattgcagaattagttttcttactttatcatatgacttgaaggactttccatatccatacatattaatatacatcctttttataaatggctggataatattaggtaatataaagatatcataactcagttatttaattaccaaattattgttggaaatggttatggctcgttttttggctgtaacagatggtactgcaatgcatatgtatacagaggcatttctctttaatagatgcttcaaagtataattgttgggttgaaggatatacgaattgtaacttttaatggaaatgggcaaattatcctctaaaagcaaattctaacaaggtgagtatgagcttgactattcccccacataatcactcaccctgatatggccagtttcttaaaagttttgcaaaatggttgaaaggaaaatgagatttcattgttttaatttgcatatccctttttatcagtgaagatgaggatcttttcaaataattgtgtattttcatttcttctttgcagaactgcctatttgtttacttagtacatttctattgtgtttttgtcctttccttatagattgtagtatttcttttataatgtgaatattaatcctttatattttacaaatgttaatgttttctctcctaattggttcttggctttcaacttttatttaatgttaactttatgacacaggcacttttttttttttttttttttttttaagagtctcgctctgttgcccaggctggagtgcagtggcaccatctcggctcactgcaagctccacctcccgggttcacaccattctcctgcctcagcctcccgagtagctgatattacaggcgcctgccaccacgcccggctaattttttgtatttttagtagagacggggtttcaccgtgttagccaggatgatcccaatctcctgacctcgtgatccgcccgtcttggcctcctatagtactgggattacaggcatgagccaccgcacctggccgacacgggcactttttatatgcacagagaacttctgtatgtgcaaactatttgctttctgtatattttaggtttctgtttttatgttagttttccccatgccaagattataaaagtgtttcctgtttttattcttcataattaatgcatttacttgaactctatgaaattgctgataataactgcttatgaccttcaaaattggcaatttcacgtggtatctaattttttttttagtttaaccctttatcttcttaggaatttttacacgtgcatgacatggtatagggatataccttcccccctccccccacaattggttagcaactttttgcaaaactttttcataaacaaattttccattatattaaagggtatatttctgaattatatcttttattattcctgctccattactatacagtatagttttaatatcaggtaggtcaggtttcccctgcattgctttttttcaaaggaagttatacttttagaatgatttttaggttcacagtaaaattaaaaggaaggcatagaaattttccacatatggggaatttccctcacacatgctcagcctcccccatcatcaacatcccacacaagagaagtacatttgttacacttgatgagcctgcattgagacatcatgactattcaaagttgatcgtttgcgttagggttcaccttggtggtgtacattctgtgggtttggacaaatgtttaatggcatgtatctacccctgttgtatcatacataatagtttgactgccctaaaagttctgtgttccacctatttctctctctcttcccctaattcctggcaaccactggtctttttatgatattcataattttgcctttttcagaatgtcaattagttggaatcatacaatatgcagtcttttcagactggcttctttcactgaataatatgcatataagcttcctctatagcttttcatggcatttcttagcactgaataatattccattgtctggatgtgctcactgatttattttccagaagtttttgattattaatgtgtacatttaccatttgtcttttttgaaagtgtgttggattttctattgaaattgcatcaaattttagattaatgagaggagagctgaattttcaatgtatcaaggccactattcaggaacaatattatgtttttctatttattgagattttcttttatgctactttgttatattttaacattgtcctcatgcaagttttccaggcttcttgttatggatattcctggatatatatggatgttttaatttgtgcatttggctattttgaatgatactttccattatcattttttatattgtctcttctgtatgcagtaaaccacctgctttaatatgttgatcttgcattccaacacctttttaaactcttattaattgtcctgtttcattttcatctcttttctatgtagataattctattatctggaactagagttttgtgccttactttccaatatttacacttcttattttttgtcttcatcatattgcattagctagggccaatactgatgtgtggtgataattctttgtaatgttcctgactttggtgggaattcttccaacgttttgctattatataatgtttgccatgacatgtaatgatttctacaattctctagtagatatttcaagtcccttcctttcaggagataaaattttagtggaaaaacccataataaatctgcagcacagtgtaatgactgactgtgaagataaagagatccagaagatggtatgacagctgcatcacttaggatgccatcatcagcaagtaatgaggaattctaattagcactggtttaaataataaggtgatttattatccaagacaagtccagagtcagagaggattccagggttgaggaccagtttcattttatctctacatcactcttctcagtcagccaagcttcccctcatgccgttgctgtcagcaccataggacggctgccagtttctgctgtttctttcagttacaacaatgtcaacagataaggagtctgtaccattccaggatgatcttcttagaagtaaaaacctttctcaaaaatccatcccctcaggccccctcccctcttcccctttgatttttattttcagggttggcccatatgcccgttttaaaaccaaatgtgaccaagagactggaattaccacgactggcttagactaatcatttggagagaaatgggccataaggagtcaaccatgaaaagtaccagataagtagcatatatctcagtccgggagtgggggataggagagccttcccagaggacataacacatagggtcttagaggatgagtaagagctatctgggtgcagaggacattccaggaagaagtagcagtctgtgcaaagacacagaggcatgacatagcatgacacatatgggaacccctcaataggtgggcagggaggaagcgtatgtggtagagtaatgctttttgtaccaggctaaagagtttaatttaatatttaacctgaaaggctgagaaaccttttaagaagaggactgatataaataattaggcatttaaaaatgattattctggaaacaacttacaataagctggactgaaatcaaggaaaccagttaggaagccattgctatcatccagttaagaagtgataagaatggagaggcagggataactttgaaaatgaagaaggtggcagagtttgcagaagttaatgacagatgtgagcagtgcatgaaaacaagtaattttggccaatccttggattgctgatataagaaactgaagaaaatatggtgtcatttactacatagtgtgtgttattggaggtaaagagttgggagggagatgatgcatttgggtttggatgtattgaagtcgatgttcctatgtacagttgcctggtaaatctcattggagggttctgagttgagatagaccagagattcagcaacatggattttccaaactaagttgtgttctatgttctctgggagaattaatttgagaaatattgagttacatgaaactgatttcttctattcaggaccttgcagacatttttatatactagtagtaatattattgagtgcttaccagtgtcaggcactttgcatgtattaactcaggtattcctctccacacaatatctgcatgcagtatgtgctgaaattttccccattttacagatgaggaaactgggaatagcacaattaggtaattaagaaactgtcggtggcaattagtacaaagccaggattcgaacccagaaaggtgacttcagagtttggatttttaaccttgatggtaatatccaaaagagtgatagagtgtgcagtttcccaaacttagctgaccatggaacactcttttcaagggacagctggcagaaccttaagggacactggtgacctgtagtaccaggttgaacaatactgtagtagcatattggagccataaatatggttgaaacaccaagaaagagggtacagagcaagaagagcagagagtttaggccctcacaagtagtgaagagactgtgaagacagaggtagcttagaatcattggatggaaaccaagagagtatggaacctcagaggttgagtgatctgtaggaggacagaagaaaacactcattggctttagcaatatggtgatcattggagactttgtgagagccatttcagcaggtggggagagcaactgaccatggtgtcaagatggtcagcaaaagtagaggcataaccaagaggctggcaaatgatggctacttggagaagagagagtttagtctgcaaggatgaagcctaaggatggggaaagaagaacaagaagaatgccagcctatgctggcagccctgagtcccaggagaagatgtttacatgagaggcagtgttccagatttcagctggggagcagcgatgggagagtattaggatctgctgtgtgtgtgtgtgtgtgtgtgtgtgtgtgtgtgtgtgtctaagtttccttttgtggatactttcctgagtcactggaatgactcttcataggtttttaatagaatgaattggtgactcccaaagatattcagaggcaccaggaacatttgtagtattagatcttctgcagtgtccattgctgaaagtaaaaactctcatctggaaaagtaaatgtcattcttaggatttttctttaaacccatgggacaggagtttcgcttgaagtattaaactttatcctccaaaaaggagcgataaaggagtcacatgtgaggttaatggtatactatcttactaaattttagaagtctgcatgctgcttattgtgaatagaaaacatttgagggactgatagaacatgtagagagtatagtaataaagtttattttatttctaacctaagtcattaagtcccgcaacagccagtggtttttgtgtatgtgtgtggcttctatcgtggctatgataccatcacaggagagcttacttataattaagttatcataaaatttatttgagagtgaaaagggaattttaacaatactgccatactgacactatgacagacatagagtgggactgttccaggcaaatggggatgaatgggcaccctacatgtaaggacaccatgggttcagcagatgaaatggggccagtaacagagaagcttcttcccccttagttaagaagtgagagtctctctgggcttctcagatctccttctcttcagccaacatggtaagtttggagaaagcatgggctttggaatcagacaggcatggatacaaacctccgctctgttgcttcctaattttgtgaccttaacttgcctatgcctcatttttctcatgacttatgaatatcacatgctcatatatttaaagtatccagccgagtagacatttattaaaaatcttagtgcccctgtctccttttctctttctacatataactttaagtaggacagtttatggacagacatagtctaagatggagccacagaatgctggactggggagggtctggtccattttgcaggtaaaaagtccaagactatagaactgaagtggcatgcctaatgttgttcagatagccgtggcttagctgggaacctgagtccaggtgtcttaggccactgctcttttcactccatcatattttccagaagtggagtggtgatctgctcttttttcctctcccactcttccttcacctttctcctttttaccctgaattcaagagtacagcatgcctcccagagcaagtattgccaagatgatcaacattagatcactcagtttagcccacctcaggaggaatgggtctggttagtaacaactatgagacatctatagagacctgacagtttcacatgtgcttgagctgtggttgtcatactttcaggtccagtgtccccctaaaaaacaaaaaccttgtaatgttctcgctaccatcctgaggtgtaacttttagaaaacacagtctacctacacttaactaagtcaaaataatgctctaactgtaatataaggagaaattaggagaaaattatttataataagaatttccaaaggtttttctcaagcatgactcactagaaggcagaatcaaagtgtgagatactttgaataaggggaaaatgggcatcaagggaaccacccaacagacgcagggtggtgacatgtgccatgaggtaggcaactcaactccttagcatccctgatgatgatgtgatattctgaactgctaaatcctcagcaaagatcttccctgaatttacccagaggttgtattcctgaaaaacttaaaatatgttaaaattacaccccaaatgctttttgtttaaatgtaaaacagatcattataaataggtgttccatctgtatggataatatctgatatctgacatttgaaagttgtgtggtatacaaaataattcttcattttgtgaaattctcctacacatttcagcatgtctggcatccccgacccctacccatcaaatgacactagcccctccaatcattgtggcatctataaaagcctctattatgttctaaaacaccttcctcccagctgaatggtggtgctttctttataccactgctctggaggtttaatgggtattccatagttgttttaatgggcattccatagttggatgccagcatgggctgtctcagggtgcctccaagggaactagtatggtggttcctaatgatgccacccaccaaagcctcctagcctgaagataggcttcatgctcacgggggagagagcaggaagtaaggctgaagaaatgtctgctgcaaagtgaaccagtttgttttcagccagatgacagcaatgacagtggcagatttcacataggaaagacattgccatgtgggtttagagttactccaaggcacccagactccagtctttacttaggaggttagcaaagttaagtgcaaattgcagatgattcattatattctgatgtcaccatattgtccccaaagtgctttctctcagttcgatcctttccacagccttgtgagatagttaagtgtcattagtatcctcattttaaggcatttgttctgctgacgcccaatattgcattgcttccatcattagagatcatcacccacaggcaaactagacaagggctgttagccaggctctttagctgttttgtgcacgtacaagttgctggaaacctcagctgtagcatttggattctgttgcaaatatgctcagagttaacagagaggctggtttctgaatgtgaatgtgagtgctgctccttccattttcagttacaattaattttactgtgcactgaaaaggtctctatattttgcttcagtaatgagatgaagaacagcttttctagtaatagcatctatcagtagctgctgagtaggttgtgttgtgatgcctgacatatctttagggcatgctgttgtattggggttttcatgagtggtgcagatgggaatgagcagtgtccaacctgcttgactgtacatggcaggcactctgtcatcaacgggcagtcttttccatcagtattttttgattattgcagtttcattttatacagtatttcttcaaattaaataatgccaacaatggtataaaaacatagttatattgctacactaaaaggtaatattagttaacattattgagtgttttctatgggtgagaaactttatagctattatctattttaattgggctgtgtaattatataaatttgaaagcaatttcctttttctaaatcattgtcatttcacttctaaaacaaaaaattattaaacttattaactgagctttctgaatatattcaggaggcttctcagatgtggatgaagtaaattaaatttagtgaagcagtgtagacaatcttactaatttagtattttggtgtctttggaaattccttttttttttagagaaagagagaagtttggctttaattaatttatacagaattagcaaccagaaaatataaaaagaagacattttaatttcaaaatacttgcaaggcttgtgttttacaatttacactcaagattttttttccccctcaacttttaatttcaagggtacgtgtgcaggatgtgcaggtttgttacataggtaaacgtgtgccatggtggtttgctacacaggtcatcccatcacctagggctcagcatccattcctcctgatgttcttcctcccccaaccccctgccgacaggccccagtgtgtgttgttcctcccaatatgtccatgtgttctcatcattcagctccgacttttaagtgagaacatgcagtgtttggttttctgtttctgcattagtttgctgaggataatgacttccaactccatccatgtccctgcaaaggacatgatctcgttcctttttatggctgcatagtattccatggtatatatgtaccacattttctttatccagcctatcagggatgggcatttagtttgattccatgtctttgctattatgaatggtgctgcagtgaacatatgcatgcatgtatctttataatagaatgatttatattcctttgggtataaacccagtaatgagattgctgggtcaaacagtatttctgcctccaggtctttaaggaatcgccacactgtcttccacaatagttgaaccaatttaccttcccaccaacagtgtaaaagtgctcctttttctctgcaaccttgacagcatttgtcattttttgacattttaatgataaccattctggctggtgtgagatgatatctcatatctcattgtggttttgatttgcatttctctaatgatcagggatgttgagctttttttttcatatgtttgttggccacatgcatgtcttcttttgagaagtgtctgtttatatcctttgcccactttttaatgggtttttttttcccctgataaatttgtttaagttccttgtagactgtggacattagacctttgtcagatggatagattgcaaaaattttctcccattttttaggttatctgtttgctctgatgatggtttcttttgctgtgctctttagtttaattagatcccatttgtcaatttttgctttcgttgcaatagcttttggcattttcgtcatgaaatctttgcccatgcctatgtcctggatggtgttgcctagattttcttctagggtttttatagttttgggttttacatttaagtctttaatccatcttaagttagtttttgtacatggtgtaaggaaggggtccattccaattttctgcatatgtctagccagcacttccagcaccatttatcaaatagggagtcctttcctcattgcttgtttttgtcaagttttttgaagatcaggtggttgttggtgtgcagtcttatttctgaattctctattctgttccattggtctatgtgtctgtttttataccattactatgctgttttggttactgtagccttgtagtatagtttgaagtcaggtagcatgatgcctccagctttgttctttttgcttaggattgtcttggttatttgggctctttttggttccatacgaattttaaaatatttttgtttaattctgtgaagaatctgaatggtagttcaatgggaatagcattaaatctctaaattactttgggcagtatggccattttcacaatattgagtcgtcctatccgtgagcatggaatgtttttccatttgtgtcatctctgatttctttgagcagtggtttgtagttctccttgaagaggtccttcacttcccttgttagctgtatttcaaggtattttattctttttgcagcaattttgaatgggaggttattcacgatttggttctctgcttgcctgttgttggtgtataggaatgctagctatttttgcacattgattttatatcctgagactttgctgaagttgcttatcagcttaaggagatttggggctgagacgatggggttttctagatatagaatcatgtcaaataaagataatttgacttcctctcttcatacttgaatacgctttatttctttctcttgcctgattgcgctggccagaacttccaatactctgtcaaatgggagtggtgaaagagggcatccttgtcttgtgctggttttcagggggaatgcttccagcttttgcctatttagtatgatagtggctgtgggtttatcacatatggctcttatcattttgaggtatgttccttcattacttagtttattgagagtttttaacatgaagggaagttgaattttattggaggcctttactgcatatattgagataatcatgtgtcttttgtctgtagctctgtttatgtgatgaattacagttattgatttgtgtatgttgaaccaaccttgcatcctgggaatgaaaccaacttgactgtggtggataagcctttcgatatgctgctggattcagtttgccagtattttattgaggagttttgcatcaatgttcatcaaggatattggcccgaagtttacttttttcgttgtatctctgccaggtttcggtataggatgatgctgccctcataaaatgagttaggtaaaagtccttccttttcatcttttaggaatactttcagtataaatggtaccagcttttctttgtacctctggtagaattcagtttcagttctgaatctgtcttgtcctgggcttttttatattggtaggctatttattacagcctcaatttcagaaccattattgatctattcagatattcagtttctctctgttctgtcttgggaaggtgtatgtgtccaggaatttatccatttcttctagattttctagttcatgtgcatagaggtatttgtagtattttctgatggttgtttgtatttctgtggggtcagtggtgatatcccccttaccatttcagattgtgtttatttgactcttctattttttctttattagtctagctagtctatctagtttatttttttctaaaattcagcgtctagattcattgactttttgaatttttttttttatgcctctatctccttcacttctctctgatcttggttatttcttgtcttctgctagctttggggtttgtttgcacttggttctctagttcttttagttgagatgttaccttgttaacttgagatctttctagctttttgttttttgtttttgtaagtgaaaggtatttggaattttattgtgcaattcttacaactttattataaatttgaaatatttttaaaatattaaaaatatattaaaaaccagtgattcctctcagttgtttttgaaagtttcttttattattttttttattatcatactttaagttctagggtacgtgtgcacaacatgcaggtttgttacatatgtatacatgtgccatgttggtgtactgcacccattaacttgtcatttacattaggtatatctcctaatgctatccctcccccttccccctaccccatgacaggccccagtgtgtgatgttccccttcctgtgttcaagtgttctcattgttcaattcccacctatgagtgagaacatgtggtgtttggttttttgtccttgtgatagtttgctgagaatgatggtttccggcttcatccatgtccctacaaaggacatgaactcatcattttttatggctgcatagtattccatggtgtatatgtgccacattttcttaatccagtctatcattgatggacatttgggttggttccaagtctttgccagtgtgaatagtgccacaataaacatatgtatgcatgtgtctttatagcagcatgatttataatcctttgggtatatacccaataatgggatggctgggtcaaatggtatttctagttctagatccttgaggaattgccacactgtcttccacaatggttgaattagcttacagtcccaccaacagtgtcaaagtgttcctatttctccacatcctctccagcacctgttgtttcctgactttttaatgatcgccattctaactggtgtgagatggtatctcattgtggttttgatttgcatttctctgatggccagtgacgatgagcattttttcatgtgtctgttggctgcattaatgtcttcttttgagaagtgtctgttcatatcttttgcccactttttgatggggttgtttgtttttgagatctttctagctttttgatgtgggcattataaatttcctgcttaatgctgttttagctgtatcccagagattctggtacattgtctctttgttctcattagtttcaaagaacttcttgatttctgccttaattttattatttacccaagagtcattcagtaacaggttgttcaatttccatgtagttgtgtggttttgaatgaatttcttaatcttgagttttaatttgattgcactgtgggctgacagactgttacgatttcagttcttttgcatttcttggagagtgttttacttccaattatgtgatcaattttagagtaagtctcatgtggcaataagaatatatcttctttttaatttaggtggagatttctgtagatatctaccatgtccacttgatctggagctgagttcaggtcctgaatatctttgttaattttctttctccatgatctatctaatattgtcagtggagtgttaaagtctcccactattattgtgtagagtctaagtctctaagcacttgcttttgtaggtctcataaagcacttgctttatgaatctgggtgctcctgtattgggtgcatatatatttaggatagttagctcttcctgttgaactctatcattatgtaatgacctcctttgtcttttttgatctttgttggtttaaagtctgttttgtcagaatctaggattgcaacccctgctttttttctgttttccatttgcttggtacattttccttcatccctttattttgagcctatgtgtgtctttgcacgtgagatgggtctcttgaagacagcatattgatgggtcttggctcttttcccagtttgccattcagtttcttttacttggggcatttagcccatttacatttaaggttagtattgttatgtgtgaatttgatcctgtcatgatgctagttggttattttgcagacttgtttatatggttggttcacagtatcaccagtctgtgtagttcagtgtgtttttgtagtggctggaaatggtttttcctttccatatttagtacttccttcaggagctcttgcaaggctggtacagtggtgacaaattccctcagcatttgcttttctaaaaagaatcttgtttttccttcacttatgaagcttagtttggccaaagatgaaattctgggttggaagttcttttctttaagaatgttgaatattggcccccaatctcttcttgcttgtagggtttctgctgagctgctgttagtctgatgagtttccctttgtagatgacctggcctttctctctggttgcccttaacatttcttctttcatttcgaacttggagaatctgatgattatatgtcttggggatgatcttcttgtggagtaatgtactggggttctctgcatttcctgagtttgaatggtggcaggtcttgctaggttggggaagttctcctggatgatatcctgaagtatattttctaacttggttccattcttcctgtatctttcagttacctcagtcagaatcagggataggttcaggctcttcacataatcgcatatttctcagaggttttgttcattattttttattccttttactctattcttgtctgcctgtcttatttcagaaagatagtcttcaagctctaagattctttgctcaacttggtctattctgctactgatacttgtgatttcattgtgaagttctcgtgttgtgtttttcagctccatcaggtccattatgttcctctctaacctggctattctggctatcagcccctgtattgtatcattgtgagtcttaccttctttgcattgggttagaacatactcctttagctcagtgatgttcgttattacccaccttctgaagcctacttctgtcaattcatccatctcagccttagcccagttctgtgcccttgctagagagatattgtggtcatttggatgagaagaggcattatggttttttcagttttcagtgtttttgcattgattgttttcatctttgtgggcttatctatcttcgatctttatggttgctgacctttgaatgaagtttttgtggggtcttttttgttgatgttgttgttttctgtttgtttgtttttcttttaacagtcaggccactctactctagggctgctgcagtttgctggtgctgtgcttcagactccagttgccttagtttcttctatccctgtaggtatcaccagtgaaggctatgaaacagcaaagatggcagccagcttcttccactggaagctccatcccaggggtgtactgacttgttgctggcctgcatgcacctgtaggaggtggctggagaccacctgttgtgagttcccactcagtcagtaggactgggctcacagacccacccaaagaagcagtctgacctctttttggtagagcatgtgtgctgcattggccaggatcctttctcattcacactgcctctgtttccaaagcaggcagactggaacagctgagtggaccaaaccacagaaatggtggctgccccttcccctgggagctccatctcagggagagatcaaagctctgtctgtagaaccctggctggaatgggtgaagcccccacaaggaagtcctatccagtgaggagaaatggattggggtcccacttaagaaagctgtccagccacaatctggcaagacagctgtgctacattgtggggtacccttcctcttctggtctatctctgttctccacagccagcaggctggagcaactgagtcaactaagctgcatagatggtagccatccctttccccaggaacttagacccacctcaagcagactccaacctactgccattagctggctgggattccaagccagtgggtcttaacttgtgaggtgccatggaagtggggcccacagaatgaggctacctgggtccctggattcaaccaccttcctagggatatgtacagatagatttcctgccttgccagggatcctggggccagagtatgtaaaactcctgggtctctgtgtgtgcctgagtggctgctctgccgagactccacacagctctgtgtatcagacccaaggccctggtggcctgggctcataagggcatctcctgatccgcaggttgcaaagatccaaaggagaagtgtggtttcctgggtggggtcacacaatcactcaacactgcacttggctgggggtcggggtggggtctcctttgcttctgtgcatcttccaggtgggccatcaccccctcttctgcttttctttattctctgtgggttgagttgtttgcccagtcagtcccaatgcgagaacctgggtatctcagtttgaaggtgctgcatttactagcccctttttattcatctccatgagtgctgcagaccacagctgcctctaattggccagcttgggttccagcgttctgagtacctgtttttaagtctttggagtatgtacctgggagtggtattgctgggtcatctgataactttatgtttgattttttgaggaactgtcaatttttttctcacaatggccagaaccaattatagtttcactggcaatatgcagggttctaatgtcttcacatcctcaccaacacttgttattttcagtttttaaaaaagctgttgccatctgagtaggcataaagtagcatcttattgtggttttgacttgcatttccctaatgattaatgatgttcagcatactttcatgtgcttgttgaccttttgtatatttcttgtatttttatggtatttttcatttggacttctcagtgctatcagactagagctatcatgaaatatctgttgatttttgaatgctaaaaccagtaagttatgcctgtacaccttgaagagagaaaaatcacataatagattcattaaaagctggtttatggttcccgaaatgcacctggctgccattttgattgtatggtagatccatcctggaggacacttctttgatgctaactttatttcccactatggatccaagactcaaaattagcagagttagccctaggtctgaccataggtaactcgatttcccatcagtaaaatgaggcattgagaaacacctctctctcaataaacattagaaaaagttcttaccctttgattaagcaatttcccttctagcatctatctatagcaaatgaactaaaacaagaggggaaaaaaagctttatatgtaaagatgtctcatagcattttctccttacaactgcaaagcaatctaaatgtttgacaataggcaactaatttattgcataactaaataaaaaatttggcagcttttataaataataccaatgggaatttgtttaaacatagaaaatatttatgttaaaattttaaatgcaaggagcatgatttaagcttgggtatataatatgattgcaaatatataaaactagaacacaaaattgtgtctagaatgaagactagaaagcaatacatcagaataataaagagattgtcattgaatgacagattctgttgttttactataatatatcgggtgatattgttgacctctaaaaaaacagtgctcataattataatagtgaatttattgtcattttattcaagcaaacatggccaaggttcaaggtttgcagatcaaaattgcacacctaaatgttgtaaatattgccaaccatttgagaagtgttggttagtttgagtttagcatgttgacctttgaacttatggtacagggtcttttactataatacgactttgttacaacttaggataccacagaataatttcatagattgcttgaatcccattagttttttgtttttctgtttcttcctgcagatttttgtgggaaaatctgaaattttaaatttagaaaaaaaaatgtctctttacaggtgttccattgcctaaagaggagaacatttctgctcccttgatctccagctccccagtgaaggcagcccgggagtatgaagatccccctagtgaagaggaagataaaataaaagaagaacctttaaccatctctgaactagtgtacaacccaagtgccagcctgctccccacccctgtggatgacgatgagattgacatgctctttgactgtccttctaggcttgagttggaaagagaagacacagattcatttgaggatctggaagcagatgaaaacgcctttttgattgctgaagaagaggagctgaaggaggctcgccgtgctttgtcgtggagctatgacattctgactggccatattcgggtgaacccactggtcaagagtttttccaggctccttgtggtgggcctgggactgctgctctttgtatttcccctgctcctcctccttttggagtcaggtattgatctctccttcttatgcgaaatccgccagacaccagagtttgagcagtttcactatgaatactactgtcccctcaaggagtgggtggctgggaaagtccacctcatcctctacatgctgggttgctcatgaagttaatctctcacgtgactaagggctatattcaatgctagtgatttctttttttcagcaaatgcctggttctgaagggtcacggggctgtcaacaggtgttccttactcataattgattattcaaacctttaagttagctttccataattcactgcacttaaataagtttaaatcaaatacagttattttagttacaggttaggaagatggtctttaaataaccaaaaatatgtttattttttattatagtgtagacatacccttcatctattatatcataatacatgttacattggactgaattagattttcccatttctaatagttggcaccattataagctataaggttcagaatcagaattttagtaacaactcaagagaaagttgttgaatataatccttagtgaaaacagtgtcctctaaccaatgcctatacaactaaatttatgctgggtttttggttctgtttttttaaaaatatttttatgtgttcaaactattttggtaaatttttagcaaaaaaaaaaaagaagcctcctggagttatttacatgtacagattgtaagactaatgcacaaaaggtatatcagaatttttttaatgttttggcgctactttgtttttaaaaatatttttggctgaacaataccataatttgttatgatctgcataggagatagaaaatgggtagaaagacactatagtaagtaagctgctaaaacagaggatggaactggaggatgtagaaactgagagcatcaagtggactcagggtggtccatttttcaaagtatttggacaagaggacttgttattttcatttgtattctgtccgtatattttggctggagaagcagatgttttaaaaagaaagtgagagtttaaaggaaaaaaggtaacagatgtgctagtcagttgcatatcaatgtacattaacccaagagtgaaggcagataggaactggagaaatggaaagtggcaaaaatgagttctggtgaggctggcaggcaaatggtgacaggcgaatggtctattttatgaaagtgatggtgatgccagcgttcgatgatgtgaagagcagtgcagtcgctgtctgagttaacatgaacatgtttaagtggatctaaataaaagtggagaaactttaaggtaaatattttgatccctcatgccatttgttgtgattctgtagaagaaacttcaaaaatgtgtttgtatgtgagtgtgcgtgtgtgtgtgtgtgagagagagagagagagagagagagagaatatgaatggctttttgatacatgtccatgatcatgttttgcggtggtcattatactcctttcctttcccagttgttttaaaatttgacttccatagagaaactggagaggcctcatgagatgacataccagttcagcctgggtaaagtagtgacatgaccctaaccagactgtagaggggaccagtgctctagtaccttccttgataccattaaatccatgatggaaaggatttaatccaacaatttaatggtatcaaggaaggtactagagcattgtaccatcagcaacgtactgatgccttcccatgcagactacctgctgatactgtgttatgtgggagaaagataagagtctagaacttatgccatggagcatagagcttctctgtggattgaaaacattccactgccctaatgtacaaagttacagggcccacttggaatcgctctctctagctaatgacattccaaccctatcattagcatgatttctaaattgggcaatacatttccactcactcagtggagctctgagtacttcactggacatttaattttggaaatgagttttgaaactcagttcgtgaagcctgcagtcgagcaaatgactatatatttgccattaagtttgaggggtttcctttcctatatgctttcagtgatttattttgctttttaaataaagattgtttgtttattacctgaaagttgatactgatttaggaatatattttctgtgattggaatcctcaacaatttattttggaagcttgcagatggctaggtttgaaattgaaatttgtgtttttctccttcttttctcatacgacttctaagtcatcctttctgacataaggcaactttagtgtagtctgcacaaaattagtccccttctgatcatgcgtcatataattttctctaaagttctgactatgacaaatcatctggccctcagtctttcaaaataatattatataatattttttaaattatggaactaatatattttccattgtaaaatacttaaaaaatatgatagtataaatatcacatgtaatccaacgatgcagatttatcttaaggagtaataaatatattattttaacatttccagctaacatctcttttctcttaggtggaaacttcattgttgaatagaaatgtttttaagtgaagaagttgacagaatagggtctgctgaatttaaacagccatcaaaagttaaactggaatcttgaaatgccatttgctcggcatagaatcagagccttttagaaacatccatttaagttttgttagaagatagtcaccagttgcctgaatcgaatgaggaaaagcctgcttccagagatggacagtatattatagagtgagatatagagtttaaagcaagtgtgtgagtatatgtatattccatattattggtatatgtgtgtttatatatgaatctgtatatatgtgtgtctttgaatagacacaacatatatgcccctcatgcataattgtgcttattttgccctaattgaggaatttgagatgtattattggttcttctccctctcagatactatggtgggtaaaacccacagcctgaaagggttaaattttccataaatgccactgagtgtacatttgtggatataaataaatatatataatacacacacacatatggcaaatacatatacacacacaatattgcctttagtgctaatgcaagttggatcatgaaaacaatgtaggtaaagtaaagtatgtatttgtctgtgcttgaaaaatattgtaaaatgttatgtatttggaatatattttgtggtttgtctaatatttataaacacaactcggggtgaattcacaatgagtttatttcattgaaatactagagatatgggggccatgttactgtgattggagccttacctttgtatagtgaaatttgcatttctatgtcaacatccagattgttttatatgttaatatggtggcaggaatccctaataaaaatactctggggtaaaattttttgcaatcattcagttttatttaaagtaaagttgtatagtcaggttgttggaaactataaaaggattccctctaggaccatgaaatgaggtcaacatataatggtgatagtattaaaaaaaaaaatcccaggtaatagattagattaaccctttgcagaagtcatccaggcccaaagcaggaatactagcactgaaaatatgctcaaacataaaataaaccttgatctaattcatgatattaagttaaccagagaaatagaaaagcacagaaaaaataatagaagaggggtattctgactgacagataggagcatggatttcagagtgctagaaattaatatgttatcatcactggccagaaaagggtgccttcccacgccagagagagctgcatgagactcaactctgtgacacttgccattaaacttctctatctgttcacgcaccttggaggaatctcacgattccacttttttttttttgagatgatgatggagttttgctcttgttgcccaggctggagtgcaatggcacgatcacggctcaccgcaacctcctcctcctgggttcaagcaattctcctgcctcagcttcctgagtagctggaattacaggcatgcaccaccacatccagctaattttttgtattttcagtagaggttgggttcctccgtgttggtcaggctggtcatgattccacttctatcctcccctctgcccagcgtagccttgacaggtcttctgcttaggtttggcgcaaagctaacaactccatacctaacagttaaaccaaaaggtgttacttggaatgaaacaaaaggggtaggggagttctcttaattgcaggaatacaatagaagtcaagcagaattggcccttagctatggtggcctcatgccttattcagcagtccttagaagtacaggctctagactacaggcaagaaaaggaattcagtgattagcattcagatgtgaggaagcttacggacctatagttctgactccagcatctcaagccagtgcctttgggttagtgtctgctgacccaaaaggctcacacaaaatggcggttggccacttactcactgagcagttcattgaactcctgacccattgtcactgcctggaggaaactcttgctttattcctacattttctccttagccaaatagaggaagactctcccaccaacattcccaccctggagaaaaagtactggggagagtcttccacccctggggtgacttctgggatggttgtggttgacagggcttgagtccctctgggccactctctacagggtggagacaatgtgctgaaggtcgctgcttacttgtcctcctgcttcttttctctctccctctctccttttctcttggacctgcatctgggcttccagtctccatgcagtaaacagacccagcagaacctgcccgtggtgagctcagccaagacttggctctccatgttccagcctccgtctgtgactgggtgggtaagttcggtgggccccacccagtgggctcggcagccgtcacttcacagaagaagaaaggaaccttgcttaggcctcagatcccagctgtgctctccaatccattaataaagctgcttttaaccctctc

SEQ ID NO: 574 - DNA, 201426 bp, Homo sapiens
gctcttttaaaatagttgctttcttaggaaatgtagttgctttcttaacctcatcaaattcatgaagatttagccgaggcccatggtgagtcttaagctggatatctctcatgttttaaaagatgggtgtttgaaggagcaactcacaagagagaaaaggaaaacgagagacattttatcaattattttttctttaatgattaaaggctatccatttatcccactcacagtctttaagcaattaaatattactgttgttaagcaaggcaggatggtaattgtatattttcatagtatgcctctatcttattttactaatcctttcccctaatgatggacattgtttctaacttccatactacaaataatattcttggaacatgtgcttttatgaatctgtgtgagtatccctgagacatacacccagcagtcaattgctggatcatatgagattctgtacttaatttccccaatgttgttagattgctttccaaaactgctggactagtttatattccctctaacagtatctattgttcactccaagagtattcactccaacatatcaattgtttctgtcatttccatctcctctccaacacttggtattatctagtgttctaatgtttgccattctaatgaataatgtagaatctcactgatgtttaatcttttagtttttctgtggctaatggtgttgaactttccttcatatacctgttagacaattgggctttacctgttcctttatttatttttctattagtgattgcattgttttcctgttgatttgaaagagttttgtttctttttttcccgtgtttgtggggtatattctgtatattaatctcctttcactttagttattgtagatactttctttagtttgttcacattttctaggatatcctttattgaatcacaatctttcatttcgatgaagttaaacccatctaattgtgacactgtgatttgaggatttagcttcatattcaaaatgtctttgtctactcatagactgcaatgacttcccacattttattttattagctttttacctcttatatttaagtctttatctggagtttacttctgaagatgatgtgaagcatgcgtctaaacggaagggaagtagaattatttagaatttaaatataatcaaagcatgtgacttgtaaacacccaaagattttaattgctggaaataatatttccctccctccctccctcctcccccctccccccttcccccctcccttccctccctccctccctgctttccttctctttcttccttcctttttgtcagagaaccaacccagagaatccctccttggttctgatacaaaagaaaagtatttaacatttattgtttgtatttatctactcaggctgccacacaaagaaccatagcaagtggcctgaaacaacagaaatgtatttttccacagttgtgaaggatagaagtctgggattaagatgttagcaggactgattccatctgaggcctgtcttgttggcttgtagatgccgtcttctcctatcttcacatggttgtccctcagtctgtgttgtctgtgtcctaatttcctcttcttacgacaccatcatagtggattatgacttcattgaaccttatcattctttcttttttttttttttttttgagacggagtctcgctctgttgccaggctggagtgcagtggcacgatctcggctcactgcaacctctgactccctggttcaagcgattctcctgcctcagcctccagagtagctgggattacaggcacacaccaccacgcccagctaatttttgtattttcagtagagacggggtttcaccatgttggccaggctggtcttgaactcctgacctcaagtgatatgcctgacttggctaaccttacttttctttaaagacccttctccagcagccacatgctgagatagtgagagttaggacttcaacgtatgaatttggggggcaacaattttagccccaaatagtacctatgctttcacctgtggctatggtggctgaacacatttgtggctaacacaaatttgacagttataattttttatggatcattctacttttgataaatttaggatgattttttaaaaaaatgtaatgttccttcttttaatcactgtagctgtcttgtgtgaactttcaggaaataatcattgtattattgcctctaaaactgaatacttctggaaatctgggatgattgataacagagaaaacaactatattctgagggcattttagttccattctcagactttaatttcaaaatgttataatgtatattagggtgaaaactatgttagttacaaagaggcctcaaaacataatctccaaaatacatagaaatgtatttttcttagttcagattagatttgctccatgtggccattcaggatcacagattccttccatctctgttcccacctccctcagagtgtgatgctctcatcaagtccatgctggtcataggtgtgtcggtattgcagcttgtgagaaggtcaggcacacccagagaagtgcacagaccaggaagtgggatttgtcacttccctcgtgttctactggtgaggatttagtcacttggccacctctagctgcccaggaggctgtgaaatgaagttctctgctgaacagctatgtgttcagctacaatgaaagaaggggaagactgactttggtggacagttaatgtcctccaatacatgatggcagttttagtaactgatagcccctgtctgccagcaaaggcgcagcatgctatagtgtctgtggtgttccttttgcctctaacctcctagcaaccatgccttctctgtttcttcctacctattcccttgatccttgttagctggtgggtctttggggtaaaagagagatcttgagactccatatcctatattttttctagaaactccccacctgctttcaaacacacatatacgcacacagacagacacacacatacaaaatcaagcaaatggtttttacttttttcacttttctcctaagtaccacttgtctctttttttgttgttgacattaccttattttctttttagctcaaagaagtgtaaagcaagagcatctaagcttgagtctaatatcaccacactgctggtttaacacccagctgggactgtgtactactgaagcaattttctgtttcgttcatagtacagaattcatggattgacaggagcaattgccagtggaggaaacaagaacataaacagatgtacaccaagcgcactatggaacacttttaatttcctggagacagtatttcttatggcactggcagcctttcctccctgccttgtcaggatcttattaatgtgctgacagattcctttctctcaatgtacctgctgggtgagagctgctattatatggaacacaggtgtgctggggtttccttgggagattaaaaaagattgtgagtccagaaagttggtaaaagatgtacaaacatttaagctttttcctttctccacctaacacttgtgatgggctctttatcaagcagtgttagtatgtgtctttaacgagaaaaaagaaaaggagacttccccctttgctgttgaaaatatgtgtctatattgcattgttaaatttatgcaggtccccatttctctatatgattgaatttcataatgatgggaaggatggaaagtatccccttctggaggggtcttctcaggacgctgaattgttaatcaagtggattgtttttgcttccatcccatccaaccacacaaaactcagccatggaaagatgatatattaccaaagccctgcattgtcccattctgatgtgttcttttggcatatctgatagttgtacaccctggcaggggagagtagccaacagagagatactcaggcctttgcagtccttcttttaagatttggaattgccacacagcaggtgctcttcagtcatttgaaagagaaaacttaacattttcctacttgcctagtagccacgttatttgtgcttcatttttcctttctatttgccttgagggcaggtgtataggtgagtaactgtaagtagaatgtagttcataagaagtggagaagctgctacttcagggcaataggaatttagcagtggaatttatagacctagaaggacacttcaagaatccagctggttcatcctgtgattgccttgtgggatcatcttgaactgaccatgctactggtcagccagtggctatggcaacagccagggctgcagctgcagagaggagctggcttctttaactggcttcttatacatcatcacaacacctgggctgagcctcaaagcctgggcccaggactgtttttggaactagctgagaaagggaggatgaaattctcaggactaatttcctgcctcctgagggacaggacttggcattcaaggagttatataaaacttttttccctgggtaactccgagttcggaagcagcaattctcatacattgtatcaggagcttgtttaaaacacagattcccagacctcaggaggtttgggttgaatctgcattttaaaaatcttcatatgaaactcttgtagactacgttgaatccctttttttttttttcttttgagatggagtctcgctctgtctcccaggctggagtgcaatggtgcgatctcggctcactcagctcactctcgggttccagcaattctcccaccgcagccccctgagtagctgggattacagacccgtgccaccacgcctggctaattttttgtatttttagtagacacagggtttcaccatgtaccccaggctgatccgcctggccaagtgatccgcccgcctcagcttcccaaagtactggaattacagatgtgagccactgctcccacctgaatcttaatcttaatgtgattcttttgcagactatagactagagtttgacatatgctggtgagagagagagagagagaaagagagagagagagagagagcacaattctgaatataaaagccatggttctaaaggttaacagactgaaattccttgagttatcgtgcccatcaatttacatttgttatatcatagtccctaaagtatttcctaatatttaaaaagaaaaaagaaatatcttttcactgcagcctaacccaatgtgtacttataggtggttatttcacttagatactttcagagaaagagcattcataacttcttttggcagtcaattagggttcttaatgccctcatgttttttccttagatctagactaaatattgatcaaccagaaacttaaacatattttgcgcagaataaagaacaactagtcaagataagtctttttaagttataaaagtttaatttgatcttcttcaggtggaataattcaattttataccctttcatcttggggcctaagtactttaataaagatctatacctttaagccaggggtaagcaaagtaacgctgagggtaccaggaggcatgctgtcgctctgtgtgtaaagactcataaaccttccagagcaattagtggtgttggtaggaacacataaaggccaagaaggggaggttaatccacatccccttcctaataacagcatctactgttttcaagactttactgtaggataggtactttactcgaactatttcctttcatctttggaaagtagtctcatgagtaatactactactcatccctcttacatgtgaggaaacagagacttacatagttatctcactgttccaaggtcaccatcacgtgagtggtgaccccagaccttctgacttgagagccaatatgcttaaccatctactgtcctcctccttctgcccaggtagctccagccaccagcatttcctcgcccttttctccctgctggacatcagggctcttttatgctgccttgactatatgggtcctctcgtaactcccactctccattataaattcctaatttactctctctgcaccaagtctgtatttccctcactctgaatatttaggaacacagttcaaataaactggcatagctatatatgttgccagacaaaccttttacatctgtctgcaaaaatcacattatacctgtttccatgtatcttgtttattcacaaggttggccttacctggatatgtcaggattgggcctctaaaatgtccctgaattatattttctgatttatttgttggttcttttgctcattcattgatccatttacttattcttcagatgggtgttgcaaagtgtctatggagtgcatattgtattctaggtttgaggagtggcttctgaactgaaatatctcacaaataagaaactgaataagcaaacaaatgactacaatgtgcataaatgttatgtcttaagatactaaggaaaccatgagaactcatggtgggagagtcaccttacctgacctgaggcagtcagggaggtttcatagaaggtgacatctgagttgagtttggaaggaagcatagcgatgagccaagtgaaggtgatccaggggaacatcccagatggaagggtcaacctgtgcaaagatgagtcaggcaaagtcacagcactttcacataaatgccaggagcccagctggagcacagagaggggtcaaggcccagaaagaaaagaggttgcagagagacagtggtcttagaacttcttataagacatgacaaggagcttacactttatcctaaagacaatagagagccatggaatgattttgaaactggccaattgtcccatagaactgatgtttatgatttcttttgaataaacatagaaattgaccctcctggttttaaaacttgagacatttacatttgtcttatctgagttcctttctcaggaaaccaaccatcaggcctcccagatagtatcaagggactgtaacttaccagatcaccacatctggacgatgagatgccagaaccacctatcatgactacctaactgactacctgctttctgttgactaactgctcttccttacccctccctaaattctgtattctcatatatgattgcatttctttcctgctataaacccccctaattttagtaggtgtaggagatagacttcagactgatttcccatctctttggcacctgattgaagccttcttccctggaaaaactgattgtctcagtgattggttttctgtgtggcatgcagcagaatctagactgcatccctagtgtttcagtaacagtttttaaaaatagatcttggccaggcatggtggctcacgcctgtaatcccagcactttgggaggctgaggtgggcagatcatgaggtcaggagatcgagaccatcctggctaacatggtgaaaccccgtctctactaaaaatacaaaaaaaaattagccgggcatggtggcaggcacctgtagtcccaactactcgggaggctgaggcaggagaatggtgtgaacccgggaggcgtgagcttgcagtgagccaagatggtgccacggcactccagcctgggtgacagagcaagactacatctcaaaaaaaaaaaaaataaaataaaaataaaaatagatcttatgagacataatggacataagtaaacggtatctaaagtataccatttcataagttttgacttaggtatatacccataaatcatcaccaaaattgagataatgatcattatttctcacccccagattccctcataccatttataattcctccttcctgttttccactgacaatctctgtttcctagccatggacaatcactgatctgctgtctgaaaatatataatttctgcattttctagaattttgaataagtagaattttatagtatgtaattctgatttttttcactcagtataattatttttagatttatctatattgcaggtattaatagtcaatttctttctatttgtcagttttattccattgtatgaatttgcttctcaagatgtatttctccattcatctgttgatgaatggttgaattctatccagccattggctattacaaataaagctacaagtaacatgttcatactttgtatggatacagtctttcatttctcttgtgtagatatctaggagtataatggctgggtagtatgttaaatgtactttaagaaactaataaattgtttcccaaaatgattgtaccatttcacattcccaccagcagtttatgagatttctagttcctccacgtacttacttgtcaatacttggtatattctgcccttctaattttagcattctggtggatttgtagtagtatcgcattgtgattttaactttcatgtccctaattactaatgctgttacattttttaatgcttatttgccagccaaatatatatatatgtatatatatgtgtatatatatacatatatatatacacacacacatacacacacacacacacacacacacacacacacacacacacacaccctgtatatatatatatggtaatgtgtttgttcaaatctttagtcccttcccccattcccagcttttaaattgggatgtttatttacttaatattattcataatagctttgagagatctttatatataagtcatttatgagatatatgtaaaaacatttgttgatgttttctctttggcttcagcttgtcttttcattctcttaaatgtctttgaagagcatctaatgactggtcactcacagaagtacacgtgcccaacacccttgcttcaatctaggaccatcttatgtccttatatcatcttatcatcttacgttttatatccagagctgcccataggatgggctgaagcctcttttctttttttgagatggagtttcactcctgttgcccaggctggagtgcaatggtgcgatcgcggcttaccgcaacctccgcctcctgggttcaagcgattctcctgcctcagcctcctaagtaactgggattacaggcatgcaccaccacatgcagctaattttgtatttccattagagacagggtttctccatgttggtcaggctggtctcgaactcttgacctcaggtgatccgctcgccttggcttcccaaagtgccaggattataagtgtgagccactgcgcccagctagctcttttcaaatgcattgtaggtcaacttctcctttgctcaatctgccttcctcacactctggcttttcacagctcttattccagagggcactccaccataacctcttacatgccaatttctaccttgagtttgtttccaggaaccaagcctaaaaacaggacccatgccttttatttatttatttatttattttttgcttgctttgaattcttactctgtaaatgaattgtgctgtctacacacacaaaaatatacattgaagcatgtctttgtttattcctagttacattttttggaaatgaagtataactcaagaatattcttaacctacattctcatttccttaaataagctattcttaactttctcagaaggacctactgaacaacatgtcactcttttgtcttttcgtgtggcttcagccggagtgctcaccccaccctgcttcttccctgttggcttactgtcacttctctctgccctctgacctcagccatttagatattcagttggaggacttgctctctgttgtcttacatctagctagtacaaatgatagatggaccttgatatacaacagattcaatatgagccacctgaggtttgtggcagctccataatttgtaaaagaagtggcttaggcggctgtcttgtgggttggaacacacagtgggcttgtctaagcctgcatttgcaaaacactttacataaaatagaaaagcatcagttgtacatattaaggaatgaggggtgaggactttggtggaaattacacagatcttcctccaagccatgacttgacattggtattcttccgatgacttgatgtccttatgtttaagattattttaggagttgtttagaacattgtgatgcttttttttttaaagcgaaatctgattcttattttttagaattcttttccccacagtttggcttttctcattcaagtgttcggatagtaaatttacctttgcacatgtttgtgctcccagctgtacatatcaattcgtaaaaagccaaatggagaacagtttagcatcagtgaaatgtcaggaaaatgcccagaaggcaccaacacaatactagagtttcaaattttgagaatggaattaggccacaaaatcagttttcttgcctgtgtcatggaccatggggatgtgtcctagttcttttaaaaaaagggcatctaaacctctctcagtacaacttacaggtctgtgctggggacctgtgagaaacctctggatttgagactaattgaatctgcgttgaaatggccttttcctttctttattaaaaaactgatttgctctaccacctttttctttggcttgcttgcattatccttttttttttaaactgcagaaatcatatattcttcaaggttagaagaaaaaaaaagaagagaaaaaatcagaaccgaatcatactttttgttagatcatgtgtataatattcccttttgtggtggtggaaagaactcacctactctggtttagagggaagaagagtcagttgtcaatgcaaagttctattacaacatctccaaagccatagtttttatttgaaaagcgaggaagtgtgacaacatatgactgggcctgtgattatcattcagacccatacagtgaaaactctgcctgaatttgttcatgaccacatttcttttccaggtttgacagattgtagttttccaactgtctccttattaacatgctgcctgtttcctctatctacttttgctgcacctgctgtgatagtgattgttttgtgtatataggtaccattgccttcagagattaagggcgcacattgtgagcagaaataaaccaatggatttatcagtgactgtacaaattccacctatcttttggacaataactgaaagatctctcttgggaaagtaatgtttttctttgggaattgtgggttaaaaaactatgtttacagctatgcctatctcctcttcctcattccttcattccttctactttttgatttataattgtattccatagccagaaaaatgctaaagaggttaattttttatattataaagtaaaaaaaaaatcctaagtaagtttactgagatttttctagcaaaactagaagtcttagtgggcttcagattcatactcatgaatattcttttaattcttacttttatacaaatcttggaaattagaggtacaatagattattaagaattatgaaaatttattcattggagagcttagcaagaaaattgcttatgttaacatttgaaaaactatttggtctacctgcactgcaaacttatagatgatgggaaagcttatctttaaggcctggatcagtgcaaacagccctgaaaaaggaaatctcgagtttaatttacctttcagaactaaagaatatatattgcagaatttaaagagaaaaggatcttctctcctatctcctaatggatactctttgtacctagggtcagtctgacttggtgggtgcggtatttaactgctgctgaccttgctttgaatttctggctacagagcatttcagaggacagagcaaatcttctgttgggtgtcacataggtagatgcatgctggtgctggttcattcactggcacatcccaggaatgaatattttcttccttgcacattgaccttactctgatagactgacccagaaacagagctggtctagttttatatgtaagtaggaaggaaagttttcttccctggcacatacacctgctagcactctgacacttctaatttggaggtcacaggagcaagtaaataaatactatttaaggagcattaaaagaagaaaatttggtttaaaccaaaaaaatcataaagtggggaggcagagctacaaacaagctgtgggacttcaatcatacttgctttcttccatactattataagaataaaataaaaaaggaaggaagggagaggccgaggcaggcagatcacgaggtcaggagatcgagaccatcctggctaacatggtgaaaccccgtctctactgaaaatacaaaaaattagccgggcgtggtggcggacgcctgtagtcccagctacttgggaggctgaggcaggagaatggcgtgaacccgggaggcggagcttgcagtgagccgagatcctgccactgcactccagcctgggtgacagagcgagactctgtctcaaaaaaaaaaaaaaaaaaggaaggaaggaaagcaggcaggcaggaagaaaggaagaaaggatggaaggaagaaggaaggaaggatgaagaaagaaataaacatatttcactttatacacagccttgcttcagttggagagtgattcaactactctcagctttctctgtaaccactcaggaataccatttagaaaaacgttcttgtagagctagagcctattgctaatagtaatattctggaaaattatggggagatatatatgcttataggcttacctctgacctacaaattgtctctaatagagactgtaattgtgcacaatcccttttttcctcttctgcatagccatgggaagattttctatgtaggcttatgtgaccttcctaggttgtctgaaataatcttgcatctagtacatgaatattacttaataaatccataagtatgtaccaagtgatttggctgcagaatcaaaatttttaaaatgatccatattaactacatctgaatttatccttgagctcctcttctcgttgtaaagtgcattgcacctataaagagaggagtgcagaatacttgtagaagtttgtggggggacagtgaaggacatttattggtctagttaatggtaataggatatatccaaagtggaaataaaagagaggctgtcttaattcaatggtgagccagggctataagtaacaaaaggtggatttcttgggaaatgaatcaattcattttttgtaccatcaaactgggatctaaaatatgaaccccatgatacacatgtacacaatgaaactgttggtctgttattgtaattcttgaaaatctcagtttatagtttttgtgtgtaagataatattatccacagaatcctaggttgggagtctagttctgtttctgcttcagaagactcttgtctcagagaagacccttgaaactctgtggtccctaggatccctcatctgtaagatatagaatgttctaggggcaaagttggaaaatccccttgaggactatgatgttccagactaggacactttataatgcttccaggatgctaatttctggaggcaattagtaggtttgtaaacaaattcttttgaagtgaaggtttgaattgtgtattggcaggaattatttggataattgacttgaatgagtttaattggctataagagtttcatttttgttttgtttcttaggatgatgtaattactgcctgtgttgagttcctgcaggaatgatttaactgttggatattttgaaatgttctggttgtaaaagcatgtatttggtatctgtgtttttttttttttttttttttttttttttttgagacggagtcttgttctgttgccaggctggaatggtgcgatcttggctcactgcaacctccacctcccggttcaagtgattctcctgtctcagcctcccaagtagctgggactacaggcacgtgccaccatgcccagctaattttttgtatttttagtagagatggggtttcactatgttagccaggatggtctctatctcctgacctcgcgatccgcctgccttggactcccaaagtgctgggattagaggcatgagccaccgcacctggacatgtttgtttttttcctggtgttctgagtgtcctgtggcaatgggaagttaccatctcacctccactgttaaggcaccaagtttctacctcttggcccctaagaaatgtgggatcaccttgaacagatctgtcagccctggtgagtttcagatacctgtctcctaagaggaatcttctgctaggttaggggagggggtcctataacagctggaacataggccttcccttcattctgttaacctgaggaatagtcatatcattctgctctctcagttcttgtttcttaacttagcagggaattcagtggagatttaagggtggtagcaataaagcttgtgagagtgcttatgagccactgacagcaaccaacactattgtaagggagttgctagataaccaggaacctggtggctgggcagaagccgacaaagttgactgctatgaatttagattgtggcctaccaatatatgaatagacaagagttagacttcactatccctccagaattctttttctgtgcaataccatgttatcattatataacattcatcatttggaaatctcaaaataagttataagatatagcagcatttgctggctggaaaacctttagacatagttacatagcttaatgacccaaaactttctgctttatgtacatatgaaagtagaggttccaaaatgttaagttaattgctatcgtcctctagcaagtctctacagaagtcagaaataggacagctactgtgaataggtactggataatttttcttttttaagaaatgcaagtaaaagcatttactacgtttactatcactgaagtttgatcatctgcagaaaataacttttaatgtgttctttagaatgaagtatacataggtagtatctgccttctttatttcaccatgaagcctagagggcaactggtagcacagaatttagaagatacttttttttttttgcctatcttgcttttattaattttagaatctgtaagttctttgagaaaggttacatactcaggatatgtagtaagagtgcacaaaaattgaattattaataactaaaatgagaaaagaagtttatattgcaggggttcttaaaacttttttggtgtcttgactgctttggctatctagtgaagcctattaacccctcttggagtactgttttaacaaacaatataaaatacaaaggattcaaagaaaacatatcacattgaaatacagttatacaataacttaaaacattgtgatagagtaatgtgtatgcttcttatttacacattataaacagaatatagcggctgggctaataataataaattcaaagtactgacacatagattttcaagacgtctgcaacaactgcaataataaataaaagtatctataagttctatctgtgataaagtcacaggttctgctaataataccgtgttttggtgcctgcatttatatttgaacagaaaactaaatttcagttatatattagtgaaaataaatgatggaattttgcttttcaattcaagtttatggatcctttgaattttctccctggactcctctctgtgggttcaaagtgaagaagtcttctgttgggttctcagctcatcttttcatcacttgcttctcttagataatgttcaaatactggttacaaataggagaataaatgatgagttcattggacgagaattgaggggagttagcagaagatttctgtaagaacacagtctgggtgtcccaaagcaagttataaagtaatacaatttttcttcgatcccacttaccatcctttctgcatcatcttcctccaagtcaggtgctcagtgtttctgagtgagatgaacaattcaatcagatgtaattgttagtcacaatgttttagtcttcccatggatgtattaagtatatatatttacatatattctacaggaagtggcactatttaatcaaggaaatccaatgccaataatggattttggggatctacccaggatagataggtaaagggatatttttggccgttactgacgcctttcagtcacctaatgattggctatttgtcttgcctatttataagtcagttgtaagtttcattgggcaaacaaaggaagttgttgtttttcagtctgctgttggttttacctttcctggcagtaacgtttccctaggggcaagcaaatactccaagttgaacatctcatttacagcactgtcatttggggtgatagttatttgtagtttgtagaggaattatttcattcatatgagtgaacagatgggttaataaagctgtctgaagttgcaaactggtacacagactatttcagggacatccatcatggtgtcatgttgctgaatgctgaactaccaatagactattagattacaagcaccttgaaaaccagaattaaacctaatctaaacccaagccatagcaacagagtatcgaggtaggctttacttctagtcttcaagaagtgaaggtagcttggcatctgctgctatcatgcaggcattagaacatttaaagaaaacatgtaagctgtgacaatgttaatttcataagaaaaaaatgggtttgtataattttattctgaaatgtgtttcctttattttctaactataaaatggttttgacatcttcaaaaacatcatcgcatagatgcaaacatattttttaaagaactaacactttatagactttaggtgaagggattctgcaaggactgtgacatccaatgggagggtgcttatgtgtggtgtgtatagagacctaataagaactacttcaaagttttacagaacttgtcagaagtcttataactcgtaccaaggggaagataacagcaatcaaagttgtaaataaactagatgttgctggctagcaagatttctctacatagaccctaaacggccctattgtcaagatttgtgtgggagatgcaaaggcaaacacctatcctgtgtgagcactttcagcttcaaatatcatttcaataaatgaatgcaaaaaatagtaaaaaaaatacagcaggatcatggctgggctaggtctaaaataacaaaattatttgttattttaattgtgtgcacaagctgtctcctttttgtagtgagctctgttttgtcttacacttcactgaagtatgcactgcatactgagatttgattgaagccacataagaaggaaagatttggaaggcagtgagggagtctgccatggttgctggttctctatgaggctcaattgttggggtgcacatggcatgcaacactgatgcttgacaatataaggcaatggctttcagctatggctgcacattataataacctagcaagcttctaaaacataccaattaaattagagccttttggggtggggttctgtctttggtatacactaaaaacactccaggtgattctaatatgcagccagggttgaaaatcattggtaaaatggatgcaaatatcagtccataaactcaaatgtgcaagaagcagaacttaattttttattcccagcctcaattttgctactaacttcattcttttttatggtttacttaaccctgtagttcagagttcttatgcagcgcaaaattttggggagcagaggaacctcttatttgtaggtcatctgtccactaaagttaccattggatgtcccatcaccccatcaacatgacacttttggtccagtggtgcggcatgcttcgagaactggcatctttctgtgatgtgcctccactcaagaactaggtctgagcctaagggatgccacaaaactcagtagtcacacaagtcatattttaatgtataattactgatgtctaaattaatgcaaaaaatccacaatgaacaaaatatcggaagtttaaataaaaacagtgtcagtacccactctgtccccagcttttcttcttgtggtaggaaatactgcctctctagcaatgtgcagactgcagttttttcctgcttgttcattccagttgaggaaaatgtcatttaatcccggaaaaatatttttccttttgtgtttctgtcttgcatatttaatctactctggagaatattcttttgtacacctgtttccaaattaggtgtaaagttttggaaaagagtatatgaagaaaagtactcagtaggcaacttgcaatgtttgctttgccatttctctcttatttgtcaccgagcatagaattcactacctgcttgaggtatatgtgactgtgtatgtgtgtgtgggtgagtgtgtgtgtgtgcatgaagggatagagtgccataagggtctccttacctccctcttttctttttttcctccctctctcactccctccttccttaccttcctcccctctttccctccctgtgttcttccttccttgctgcaaaataaaggcaaattggtaggcaacttaagatattttttattatttatcaaatattcagatactatttttgccaacatgccctgtagtccatacagggaatttcttggacttgcacctcaccaaaaacttccacctagcaggggcactagaagcttctgtggcatctgtccctgggttctgtgatttgcacaagagaatgctcaacttttccactccacattttactatgtaaggaatgaaaccaaaactgtgtatgtctctctgtctccagagcctttggtggaaacaagtccttctgcctttgttctcctatctctcagatggtggttgataacccccatcttgttatcagcatttcctgcctctattccttgggtgtctttgaataaataatttccttttcttctagacacaaataagagctaacataggaattaacttaagcaaattgagtcttcttgaggagctcctgtgcaaagatgtctggatgtcagcagatcatgtttcttggcaagagagaaggacaatgaattcatggaggctagatcatctagggccctatttgcaaggaatttggctgtttctcagcatgagatgagaaggcatcagaggatactgaatagagaagtgacataacctacatagaacttaaccttagttgcactactctcttgctagcttcctgctcttcctccaacatgcaggcacacttcctcctcagggctttggtacttgctcttctatttgcttgagacgtttgtcccacagatagctgcacggctcagtgcctcaccttctcagcaacatccttcctggtcaccctatttaatacttaaacttcttatactttttcttcgctactttattttccttcattgcatttatctaatactatgtgttaactgtctatgtcatttattttctgtcaaagaaaaataattatattctggacagctggtctgttttttatcaaatagggaatggaaatcttttaactgattatatctttccttcttttatttttggaattagctctaataagctcagcaaactttgtgtaagatctaattaaggggtatcttcttgtatgctaactcttccagatttcatcttactatttggtcatcattacatttgacccagatttaaatttttaaaaaatgtattactgttttatatctacttttgtttcaaataatctttaagcaaggcatgtcataaagaagaatttatccttatatctcctatacccagtgaagtttgtgcatatagaacatgttaataagctgaatatgatatgtaaaatgtaataaaatgttaaaaatattcatatcctatttacctcgggaggtttatactttatttttatttaatttttttataatttcaaattttatgttagatttgggggtaatgagcaggtttgttacataggtatattgtgtgatgccgaggtttgggatacaaatgatcccatctcccagatactaagcatagtacccaacagtttttcaacccttgtccccatacctctctccccactccaacagtcttcagtttctattgttgccatttttgtgtccatgagtactcagtgtttaggtcccacttataggcaagaacatgcagtatttggtgttttgttcctgcattaattcgcttaggataatagccccagctgcatccacgttgctggaaagaacataatttcattcttttttgtggctgtttagtatcccatggtgtatatgtagcacattttctgtatccaatctaccattaaaggcacctaggttgattccacgtctttgctattctgaagagtgctgcaataaatatgtgcatgcatgtgtctttttggtagaacaatatatacatacatatatatatatatatatatatatatctccagtaatgcagtcatggggttgctgggctgaatggtagttctgctttgagttctttgagaaatctctaaactgctttccacagtggctgagctaattaacattcccatcaacagtgtataagcattcccttttcttcacagcctcgccagcatcggttgttttttgactttttaataacggccattcttactggtatgagattgtatcttattttggttttgacttgtgtttctctgatgattagttatgtggagcattttttcatgtttgctgacgtatgaagatgacatatgttgtatgtcttcttgttagaagtgtctgtccatgtcttttgcccattttttaatggggtttgagcatagaatatttttccactggtttgtgtcatctattatttctttgagcagtgttttgtagtagttctccttgtagaaatctttcacctccttggttaaatatatttctaggtattttattttatttttttctgtggctattgtaaatgggattgcattcttgatttggttctcagcttgagtgttattggtgtatggaaatgctagtgagttttgacactgattttgtattgtgaatctttacaaagttatttatcagttccaggagccttttggtgggtctttagggttttctaggcgtagaatcatatcagtgaagagagacagtttgacatcttctttacttatttggatgccttttatttccctctcttgccttcaaaccagagatctatctaggcatggagctgggaaacctttctggccccaagttctctgcatggggatggaaggcagcctaaattcttattccagtagagtgggtgctctagatgcttggagatctgcctgggtgtggagtgtagagggccttgctggaccacaatctctgcacagatagggcgggagagctcaggctggcaagccaggataacaggtactcttactgcttggagatatgcctgtgcatggagtaaagagggctgtgcttcaccatggtgtctgaacaggatgggtgggctggctcaggctgttgattcaggtgagtggatgctccaaatgcctggatatctgccagagggtggagcagagagggcctgggcttcaccacagtctccacacaggaatggttgggtggcttggtatgctgatctgggtgaatggtagctgcaactgctaggagatctgcctgggcatgaagcagagagggccctgctgtaccatgatctctgcacaggcagggtggggtatcttaggttgctagtcaatgtcaccaggtgtttcaaatacctggatttctgcctgggagtggagtggagagggacccactgcaccgtgatcccagagaaggaggttgggccacccagaaatgatacacataaacctgttctatgtctccaagctggtcctggctgcaagtctcctcatccaggagaaactggatgagcagctttcctccagctccaggcctgtgacaggggagagcacaattccagtgcctactgatgaggcactttctgtaattctggctgtagagacctctacaccactccagagcaagcgctccaatctctggcccaagacaaaaatgcctgtgcagccacggtgccagattgccaaagaatggctgactttgtatgcactcgggttaaaaacggcatcctgctttcagtcctgggtctgagaaaatgcctgcagcttttccctgtgtcttttcctctcagcacttccaagcctctctccaagttagctccaggacttgggagaaaaaagtgctctccctcagcctaggttgctgggatccccagtggaaaggtgagtagtagagggaggctctcctcccctctcacgtactggggcttcacacattgtcagccagatgccatcatgagggctgtttgcccacgttcttctccttgggagctggagtatctttcacaatatcaggggattcgtgttgtattagtttgttctcacactgtatgaagaaattcccaagactggataatttataaggaaaaaaggtttaattgactcacagttatccacggtttttaggggaggcctcaggaagcttacaattatggtggaaggcacatcttcacagggtggcaggagagagaatgagtgccaagcaaagggggaagccccttataaaaccatcagatctcatgagaactcatccactatcatgaaaacagcatgggggaaccgcccccatgattcaattatctccacctgatcccgcccttgacacctggggattatcatttcaagattacaattcaagatgagatttgggtggggacacagccatgtgatatcatcccaccactggctcctcccaaatctcatgtcctcaaatttcaaaacacaatcatgccctcccaacagtcccccaaagtcttaattcattccagcattaacccaaaagtcaaagtccaaagtttcatctgagataaggcaagtctcttctgcctatagggctataaaatccaaagcaagttagttccttcctagatacagtggaggtacaggccttgggtaaatacacctattccaaatgggagaaattggccaaaacaaagggtctacagtccccatgcaagtccgacattcaatagggcagtcattaaaacttaaagctccaaaatgatctcctttgactcttatgtctcatatccaggtcacactgatgcaagaggaaggctcccacatccttggcagctctgcccctgtggctttgcagggtgcaggctcctcccagctgttttcacgactggcactgagtgtttgcagttttccaggcgtactgtgaaagctggtgatggatctaccattctggggtctggaggatggtggccctcttctcacagctccactaggcagtgccccagtggggactttgtgtgggggctccaaccccatctttcccttccacactgccctagcagagggttctccatgagggctctaaccctacagcaaatttctgcttggacatctaggtgtttccatatatcctctgaaatctaggtggaggtccccaaacttcaattcttgacttctctgcacccacaggctcaacaccatgtggaaactgccaggcttggggcttgtgccctctgaagccatggccagagctgtaccttgggcatttttagccatggctagagtggctgggaaacagagcaccaagtctctaggctgcacacatcggggggccctggacctggtcccaggaaaccatattttcctcccaggcctctgggcctataatgggaggggctgccatgaaggtcactgacataccctggggacattttcccattgtcttggtgattaacattctgctccttgttacttagcaaattgctgtgataggcttgaatttctcctcaggaaatgggtttttcttttctattgcatcatcaggctgcaaattttccaaacttttatgctctgcttcccttttaaacataagttgcaatcccaaaccatatctttgtgaatacgtaaaactgaatgcttttaacagcacccaagtcacttcttgaatgctttgctgcttagaaatttcttccaccagataccctaaatcatctctctcaagttcaaagttctacagatctctagggcaggggcaaaataccaccagtccctttgctaaagcatagcaatactcacctttattctaattcccaacaagttcctcatctctatctgagaccatctcagcctggacttcattgtccatatctctgtcagcattttagtcaaaaccattagacaagtctctaggaagttccaaactttctcacatcttcctgtcttcttctgagccctccaaactgttccaacctctgcctgttacccacttctaaagtcatctccacattttcagctatctttacagcagcctcccattacccagtaccaagttactgtattagtctgttttcaggctgtgatgaaaaaattcctgaaactgtgtaatttataagggaaaaaggtttaattgactcacagttccacatggctggagagccctcaagaaacttgcaattatggcaggaggcacctcctcacagggtggcaggagagaaaatgagtgccgagaagtggggaaagccctttatatagccatcagatcttgtgagaacccactcaccatcatgagaacagcatgggggaaactgcccccatgattcaattatttccacctggtcccacccttgacacgtggagattatcacaactcaaggtgagatttgagtggggacacaaagccaaaccatattaccaattttccttctcgaattaatgctcacagagttgatctttgtgcaatatcttgctatttccaagtggtcgaggcacactgaaagcttctaatccaccatcttgggaaaaaataatctctctctctctatatatatatatttttttatatatatgtatattttatatatatataatatatatataaaagagagatatagagatatctatgagatacatatagatatatatatttatatataaaagagatataaatatagagatatattttttatatatatatacacacatatatacatataatgttaaaaagcatcttttcaaataaatgctgcttgcatatgttaatttagtttgaacaattttggagtggatttcaggacaggagagagaaaaaagcaaagagcaaaacaactccactctaaagggaagtcatagttcctgggtctgagtggtgcttcttgcctccatcctgccctgacccttcatagtctcgtgactttcacattgctctaataagatatcaaaatttgagtgaggggttcagttcctatctctgttctcccagtaatgcaacaaaaagggtaacttgtccctcctctttacattttaaaataaggaagggttgaattagctcagtgtttctcaaggcttgattcaccttaattgactgaagagctttttaaaaatcccaatttctttggcccttgtcatagacattctgattccttttatttggcagaagacccaggcactgacctaatttttaaaagttctgtatatggttctcttgtgcaggcagaattgagatcattggctttgctaaggtatctccagcactgacatcctgtgactaggtggataatttaactcttcctaactctacagaaaaagtgagaagctctagagattccactggtaacctcttcaaggttatgtcacatgctgccactagatggcgcaggcaattcttgggacggaggagattctggttatttgggattttcattttccctgtgcaatatacttgagacactcagcttaagaagcttcgtgggggaatgacattttagctcctttcccaaagctcgaggcccagaaggtagagctgttttgcttgacaagttgatagagagagactcattaaataaacgttctatcgtctgaagggagaaagtaaaacccccggcataaatattagttcacatttttcttattatttccagcaggtgtgtgttctccccttctctgtgtctttctctctcttactctttgttggtggcctctttttacctttatcttttcccttttcttggtttctgtctgtaaccactgtttgtaaactggttatgatgaatttacaggtggattaaatcttagtttgccacctttgtcgtagataaaaattttaggaatccaaaaacgatacctacacaatattcttagaagggtgaacacattcaggttacaatggaaaaattcttattcaggagacttcctctgcaatgttgtttgttcatagcagctgtggtagcacccgccaaatccaggaagaaagaattttatgccgtatcagggaaaaacagtcaaaatcctttcctctttacagcacaattcgggtgacggccaaagctcttagtgtacatacaagtaggggtttttgcacaataatagggtgtgcttctctgatgcttttcactggaagaccacatagcacattgctgctttattccataaagctgcctctttcccctgggctgtcagaataggaagatgtgttgtgattttttttttcaaagagattgcattccttccctggctttgtcccagcccagctgcttgttgttcagggagatgctgcgcttttggtgccaggatataccactgtgctttctttttccctgagtgacatatactgatgggtcactgcctgaaacagtggaacaaggcatggtgtgtgtccacccgtgaagatccattgtttattcttccctagtttccatctagcagcatcaggttcccatcttcattaagaaacaaaacaaccgaccaaacaaataaaaccccacaaacaatgcaaaataaaccaccacaaatgcaagaaaaaagtcttttttaaattttacattaatagctaacgttgagtgcaaactatattctggatattgttttaatcacttgtcatatgttgtgtcattaatcctcacatcagtgtcatgagctaggtcctattattatccccattttacagatgaagaaattgagtaaaagtagggttaagtaagttgctcaatgtcatgcagctgataagttgctgagccaagctctgattccaggcaatctgacacagtacaccttaactctgtatctagattccaaagggttgtgtattggagtaacaagcaagtaaaggatagattctccaattggatagttgttagaaaagggtgtatttcctgttaatgtagctatatttcttttggtataagattcaacagatgctccaaacccagttctaccccatgctggaggacctaagtacattgtggcatacccacttcttactggcagaaaaattaaaaggcgggaaacttccttctcagttgtgactgggatcatttagtgtgtctgcacaatcctaaataaatttggaaagtgaacaattgggaggacgacctactttttttttctgactcacttctacactacttaaaagtaaataggaataggggctgatatataaggcatttgggagctttttctcgttggtcatacattaacctctttaggtcaacagaagtctggaagaaggaggccaccacacactctgcctaagagtgtgtttttagtgtaattcatgctgtattgggcatgaagaaagcagacagctttctgaaatgagctatttccaagggagtacaatcatattgcaaagaaagcacctagaaggaagaaattcatcctataattagggctctgaaatattttcaatcaacatataggttggtgcaaaagtaattgcagtttttgccattgaaagtagtggccaaaactgcaattactttagcaccaacctaatatcatgaagaaagaaaagaagcacagtccttgctagaaaacagtgataatctcaatagaagaatctaagagctagaagactcagttggaaacagcagaatcgggccaaataggaacagctccagtctactgctcccggcgtgagcgacacagaagacgaatgatttctgcatttccaactgaggtactgggttcatctcactggggagtatcagacagtgggtgcaggacagtgggtgcagtgcactgagcatgagccgaagcagggcgagcatcgcctcacccgggaagcacaaggggtcagggaattccctttcttagccagggaaaggggtgacagagggcacctggaaaattgggtcactcccaccctaacactttgcttttccaaccgtcttagcaaacggcacaccaggagattgtatcccacacctggcacgaagggtcctatgcccacggagacttgctcattgctaatacagcagtctgagatcaaactgcaaggtggcagcgaggctgggggaggggcacctgccattgctgaggcttgagtatgtaaaaaaagcacagggaagctcgaactgggtggagcccaccgcagctcaaggaggcatggctgcctctgtagactccacctctgggggcaggcatagccaaacaaaaggcagcagaaacctctgcagacttaaatgtccctgtctgacagttttgaagagagtagtggttctcccagcatgcagctggagatctggaatggacagactgcctcctcaagtgggtgctgacccccgaatagcctaactgggaggcactccacagtaggggcagactgacacctcacatggccgggtactcctctgagacaaaacttccagaggaacgatcgggcagcaacatttgctgttcgccaatatccgctgttctgcagcctccgcttctgatacccaggcaaacagggtcaggagtggacctccagcaaactccaacagacctgcagctgagggtcctgactgttagaaggaaaactaacaagcagaaaagacatccacaccaaaaccccatctgtatgtcaccatcatcaaagaccaaaggtagataaaaccacaaagatggggaaaaaacagagcagaaaaactgaaaattctaaaatcagagcgcctcttctactctactccaaaggaacgcagctcctcaccagcaatgaaacatggagaatgactctgacgagctgagagaaggcttcagacaatcaaactactccaagctaaaggaggaagttcgaacccatggcaaagaagttaaaaaccttgaaaaaagattagacaaatggctaactagaataaccaatgcaaagaagtccttaaaggacctgatggagctgaaaaccaaggcacgagaactacgtgacgaatgcacaagcctcagtagccaattcgatcaactggaagaaagggtatcagtgatggaagatcaaacgaatgaaatgaagtgagaagagaagtttagagaaaaaagaataaaaagaaatgaacaaagcctccaagaaatatgggactttgtgaaaagaccaaatctatgtctgattggtgtacctgaaagtgacagggagaatgggaccaagttggaaaacactctgcaggatattatccaggagaacttccctaatctagcaaggcaggccaacattcagattcaggaaatacagagaacgccacaaagatactcctcaagaagagcaactccaagacacagaattgtcagattcaccaaagttgaaatgcaggaaaaaatgttaagggcagccagagagaaaggtcgggttacccataaagggaagcctatcagactaacaatggatctctcggcagaaactctagaaggcagaagagagtgggggccaatattcaacattcttaaagaaaagaattttcaacccagaatttcttatccagtgaaactaagcttcataagtgaaggagaaataaaatactttatagataagcaaatgctgagagattttctcaccaccaggcctgccctaaaagagctcctgaaggaagcactaaacatggaaaggaacaactggtaccacccactgcaaaaacatgccaaattgtaaagaccagcgaggctaggaagaaagtgcatcaactaacgagcaaaataaccagctaacatcataatgacaggatcaaattcacacataacaatattaaccttaaatgtaaatgggctaaatgctccaattaaaagacacagactggcaaattggataaagagtcaagacccatcagtgtgctgtattcaggaaacccatctcacatgcagagacacacataggctcaaaataaagggatggaggaagatctaccaagcaaatggaaaacaaaaaaaggcaggggttgcaatcctagtctctgataaaacagactttaaaccaacaaagatcaaaagtgacaaagaaggccattacatgatggtaaagggatcaatgcaacaagaagagctaactatcctaaatatatatgcacccaatacaggagcacccagattcataaagcaagtccttagagacctacaaagagacttagactcccacacaataataatgggagactttaacaccccactgtcaacattagacagatcaacgagacagaaagttaacaaggatatccagaaattgaattcagttctgcaccaagcagacctaatagacatctacagaactctccaccccaaatcaacagaatagacattcttttcagcaccacaccacacctattccaaaattgaccacatagttggaagtaaagcactcctcagcaaatgtaaaagaacagaaattataacaaactgtctctcagaccacagtgcaatcaaactagaactcaggattaagaaactcactcaaaaccactcaactacacggaaactgaacaacctgctcctgagtgactactgggtacataatgaaatgaaggcagaaataaagatgttctttgaaaccaatgagaacaaagacacaacataccagaatctctgggacacattcaaagcagtgtgtagagggaaatttatagcactaaatgcccacaagagaaagcaggaaagatctaaaattgacaccctaacatcacaattaaaagaactagagaagcaagagcaaacacatttaaaagctagcagaaggcaagaaataactaagatcagagcagaactgaaggaaatagagacacaaaaaacccttcaaaaaatcaatgaatccaggagctggttttgtgaaaagatcaacaaaattgatagaccactagcaagactaataaagaagaaaacagagaagaatcaaatagatgcaattaaaaaatgataaaggggatatcaccactgatcctacagaaatacaaactaccatcagagaatagtataaacacctctacgcaaataaactagaaaatctagaagaaatggataaattccttgacacatacaccctcccaagactaaaccaggaagaagttgaatctctgaatagaccgataacaggctctgaaattgaggcaataattaatagcttaccaaccaaaaaaagtccgggaccagacagattcacagctgaattctaccagaggtacaaggaggagctggtaccattccttctgaaactattccaatcaatagaaaaagagggaatcctccctaactcattttatgaggccagcatcatcctgataccaaagcctggcagagacacaacaaaaaaagagaattttagaccaagatccctgatgaacatcaatgcaaaaatcctcaatataatactggcaaaccgaatccagcagcacatcaaaaagcttatccaccatgatcaagtgggcttcatccctgggatgcaaggctggttcaacatatgcaaatcattaaacataatccagtatataaacagaaccaatgacaaaaaccacatgattatctcaatagatgcagaaaaggcctttgacaaaattcaacagcacttcatgctaaaaactctcaataaattaggtattgatgggacatatctcaaaataataagagctatctatgacaaacccacagccaatatcatactgaatgggcaaaaactggaagcattccctttgaaaactggcacatgatagggatgccctctctcaccactcctattcaacatagtgttggaagttctggccagggcaatcaggcaggagaaggaaataaagggtattcagttaggaaaagaggaaatcaaattgttcctgtttgcagatgatgtgatagtatatctagaaaacccatcgtctcagcccaaaatctccttaagctgataggcaacttcagcaaagtctcaggatacaaaatcaatgtgcaaaaatcacaagcattcttataccattagcagacaaacagagagccaaatcatgagtgaactcccattcacaattgcttcagagaataaaatacctaggatccaacttacaagggatgtgaaggacctctttaaggagaactacaaaccactgctcaatgaaaataaaagaggatacaaacaaatggaagaacattccatgctcatgggtaggaacaatcaatatcgtgaaaatggccatactgcccaaggtaatttatagattcaatgccatccccatcaagctaccaatgactttcttcacagaattggagaaaactactttaaagttcatatggaaccaaaaaagagcccgcatcgccaagtcaatcctaagccaaaagaacaaagctggaggcatcacactacctgacttcaaactatactacaaggcaacagtaacccaaacagcatggtactggtaccaaaacagagatctagaccaatggaacagaacagagccctcagaaataatgccacgttatctacaactatctgatctttgacaaacctgacaaaaacaagcaatggggaaaggattccctatttaataaatggtgctgggaaaactggctagccatatgtagaaagctgaaactggatcccttccttacaccttatacaaaaattaattcaagatggattaaagatttaaatgttagacctaaaaccataaaaaccctagaagaaaacctaggcaataccattcaggacataggcatgggcaagggcaaggacttcatgtctaaaacacccaaagcaatggcaacaaaagccaaaactgacaaatgggaactaattaaactaaagagcttctgcacagcaaaagaaactatcatcagagtgaataggcaacctacagaatgggacaaaatttttgcaatctgctcatctgacaaagggctaatatccagaatctacaaagaactcaaacaaatttacaagaaaaaaacaaccccatcaacaagtgggcgaaggatatgaacagacgcttctcaaaagaagacatttatgcagccaaaagacacatgaaaaaatgctcatcatcactggccatcagagaaatgcaaatcaaaaccacaatgagataccatctcacaccagttagaatggcgatcattaagaagtcaggaaacaacaggtgctgaagaggatgtggagaaataggaacaattttacactgttggtgggactgtaaactagttcaacaattgtggaagtcagtgtggcgattcctcagggatctagaactagaaatatcgtttgacccagccatcccattactggatgtatatccaaaggactataaatcatgctgctataaagacacatgcacacgtatgtttattgtggcactattcacaatagcaaagacttggaaccaacccaaatgtccaacaatgatagactggattaagaaaatgtggcacatatacaccatggaatactatgcagccttaaaaaatgatgagttcatgtcctttgtagggacatggatgaagctggaaaccatcattctcagcaaaccatcgcaaggagaaaaaaccaaacaccgcatgttcttactcataggtgggaaatgaacaatgagaacacatggacacaggaaggggaacatcacacacttggggcctgttgtggggtgggggtagcgggtagggagagcattaggagatatacctaatgctaaatgacgagttaatgggtgcagcacaccaacatggcacatgtatacatatgtaacaaacctgcacattgtgcacatgtaccctcaaacttaaattataataataaacaaaaagaaaacagcagaatcacagggcaaatgtccatgggagctgatgaagagagactcagtattcaaagacttttacaacttcataagcaaagcttaagactcagtgataggctcacgtgatactcccggtcaaacctaatgagacaaggacggtaatggggtttgcctagaacaacatagaaaggagctattaccagatccacctggttgagggtaaatacaattcctgaatgagggaggactatagactaaactcaaaactgactgaaatattttacaattgcaggcatatataccttgtgtatttttcttatttacacattgtggtttcaataatcttcaataaatttattcacatcaacatcattctctagttaaagaatttctcttaagtcttattctacatgagtcattgaaccccaaattgagccaaatttcagattcaccaattaattgcctcctgatatttccttaccacccacaggcagctcaagttggacatcattaaaagtgaacttaccatttttccctagccctcttcattttcctagagaccacatttcagagaatgacaaaaccagctgcattgtttctaaagcccgaaacatggatggtgacttttatgtgtgcaaatatttacttatgtttttcttttattattattttttcaacttttattttggattcagacgttacatgtgcaggtttgttacatgggtatattgtgtgatgccaaggtttgggatacaaatgataccatcacccagatagtgggcatagtacccaacaattttccaatccttgtccccatgcctccttccccactccagtattccccagtttctcttgttgccatctttatgttcatgagtacccaatgtttagctcccacttaaaagtaagaacatgcagtatttggttttttgttcctgcattaattcatttaggataatggcctccagctacatccacattgcagcaaaggacatgattttattctttttttatggctgtgtaatattctatggtatatatgcagcatgttttctttgttcaatctaccattaatgggcacctaggttgattccatatctttgctattctgaagagtgctgcaatgaacatgtgtatgcatgtgtctttttggtagaacaatttattttcttttggatacatacatatcctccagtagttttatatatatatatatatatatatatatatatatatatatatatatatatggagagagagatatatatatatggagagagagagatatatatatggagatatacatatatggagatatatatatatagatatatatatatagagatatatatatggagatatatatatatggagatatatatatggagatatatatatatggagagatatatatatggagatatatatatggagatatatatatatggagagatatatatatggagatatatatatatctatatatctatatatttatatatatatggagatatatatatatggagatatatatgtggagatatatatatggagatacatatatatggggatatatatatggagatatatatatatggagatatatatatggggagatatatatatatgtatggatatatatatatatctctctctctccataatgggattgctgggtcaaatggtagttctgctttgagttctttgagaaatctctaaactgctttctacagtagctgagctaatttacattcccttcaacagtgtataagcattcccttttctccacagcctcaccagcatctgtgttttttgactttttaataacagccattcctactggtgtgagatggaatctcactgtggttttgacttgcatttctctgacagttatgtggagcattatttcatatgtttgctgacatatgagaagacatacgttgtatgtcttcttgtgagaaatgtctgtccatgtctgttgcctgttttttaatggggttaagttggtttttgcctgttgaattgttgaagttgcttatagattccagatagtagacctttgttggatgcatagtttgcaaatattttctcccattctgtaggttgtctgtgtactctgttgatagtttcttctgctgtgcagctctttagtttaattaggtcccacttgtgaatttttgtttctgttgcaagtgcttttgaggacttagtcataaattctttcccaaggccaatgtccagaatggtgtttcttaggctttcttctaggattcttatagtttgaggtcttacattaaatctttaatccatcttcagtggctttttgtgtatggtgaaaggtaggagtccagtgtcatttttctgcatatggctagtcagatatcccaggacaatttattgaataggaagttctttccccattgcttgtttttgttgagtttgtcaaagatcagatggctgtacgtggcactgtttctgggctctctattctgtttcattggtctatatgcctgtttttgtagcagtagcatgctgtttttgttactgtagctttatagtatagttttaagttgggtgatgttatgtttccagctttgttctttttgcttagtattcctttggcttctcaagctcttttttggttccatatgaattgtagaatagtttcttctagttctgtaaaaaatgacattggttgtttgataggaatagtgttgaatctgtagcttgctttgggaagtgtggccattttaataatattgattcttcctatccatgaacataaaatgtttttccatttgtttgtgtcatctatgattcctttgaggagtgttttgtatttctccttgtagagatctctcacctccttaggtagatgtattcctaggtatttttttttgtagctattgtaaatgagactgcattcttgattaggctctcagcttgaacattattggtatatggaaatgctctggatttttgtacattgattttatattgtgaaactttactgaaagtgtttatctgttccagaagctttggcagggtctttagggttttctaggcatagaatcatataatcagtgaagagagatagttagacttcttctttacctatttggatgccttttatttccttatcttgcttgattggtctgcttggtacttctagtactatgttgaattggttgaattggagtggtaagaataggcatccttgtcttgttccagttctcaatgggaatgcttctttttttttttttggtctgtttagtgtgatgctggttgtgcatttgtcatagatgactcttcttattttcaggtacattgcttcagtgcctagtttgttgagtttttttttttaatcattaagcgatgttggattttatctaaagctttttctacctcttttacaatgatcatatgttttgttgttaattctctttatgtggtaaatcgaatttattgatatgtgtatgttgcatgaactttacaccctaggaatgaaggctacatcatcatggtgaattaacttttcaatatgctgttgaatttgatttgctagtatcttgttgaagatttttgtgtctatgttgatcaggaatattggcctgcattttgtttttttttctttgtgtcttttccaggttttggtatcaggtgaatgctggcttcatagaatgagttaggaaggagtccttcctctttctgtttttggagtaatttctgtagaattgaaacaagctcttctttgtatgtctggtagaattttgctgtgaatctatttgctgtagagctttttttggttggtaggtttttttttattactgattcaattttggaacttgatattggtctgttaaaggtttcaatatttctttctgattaaatgttagtagattgtgtgtttctaggaatttatgtgtttcctctagattttgtattttgtgtgtgtagatgtgttcatagtcgtctctgagaatcttttgtatttctgtgggattggtgctaatgtcacttttgttgtttctgattgtgcttattttgatctctctctttttgttgttaatctaggtagtggtctcttgatcttgtttattctttcaaagaacccacttttagttttgttgatgttttttgtatagatttttgtgtctcatttcattcagttccactctgttagttatttctttccttttgctagctgcggggttagtttatttacctttttctagttcctgtaggtgtgatgttagatcgttaatttgagatctttctagctttttgaggtgggtatttagtgctataatcttttgtcataacattgcttttgctgcatcacagagattttgctatgttgtatctctgttttcatttatttcaaggaaattaaaaaattttcttccttaatttcattgtttacccaaaagtcatttaggaggagcagggtgttattaatttcatgtaattctgtggttttgagagatcttcttgatattgctttctgtttcattccactgcggtgtgagagtatttctatgtttttgaatttattgaaattcaataaatttgaatggctgagcatgtggttgacctttgagtatgttctgtgtgtagatgtgaaagatgtacattctatggttgctgggtggagtatttttaggtgtctattaggtaccatttgtcaagtgtcatatttaagtccagaattttttgttagttttctgcctcaatgatctgtctaatgctgtcagtggggtttaagttcggttgatgacttcttatacttctctctttcttattctttctctctcaccacctcatccaattgattcacaatgcctacaccttctattttctaacaaactcttgaatttaattgcgccttttcctctttcccagtgtctttaagttcacaatcctttcacttctaacctatgttattgtctttctgtctcctctgaccacattcctatgtgctcttctctttgctttggtgatttttctaacacgcatatctgatcatattacttctctgtttaaactccttcagtagttctgtagagcctttaggacgaaactaaactctgccttactgaattaagcacatgatgatttgaactctggttatctctacctcatacccccacctcatcttttgcatgcagtgctccacatgggctactggatcaggtcttgctatctttatatatgctgttctctctatcatcccttacttgtccttcacaactcagctcatgctatcttctgcagaaagcttttaaatgatagaccccagctatatagttaagacttcactttttctttgattcttcaatatttttccaattcatctctttaccacatctatgatatcaggcttttcttattccatatcagttatttattaaaatattagcttgctttttctaatgtccttttcctgtctctattctttgtctttatgcatatattaatatatgtctattggtgctgagttttggcttagtcttttctatatccctattttatttctctacatattttccatatgatgttttataaacgaggaaatatttcataaaggaccttataattccactttattaataacactaacctaaggaaagtccaagacaaacacattgaactttttcactaaattcttttaagttagtcttgctgtaatcatactgttctcagcagttaaacgtttagttgtatcaaagactaatatactttattggtgcataatcttcaaagagtcttaaggtctccaaaccagagagctagcacaggcataggtcagaagtccacggcgtgctcatgacttattgtaaagtaaaggtttctatttgtcgatgataagacaagtagactaagatcagcccaattcataaatttggtctgggtcagatgcaattcacagatatcaaccaatagatgtgtgaattgcaattgttagtggccttgaactgccccaccttgaatcgagggaaatcaatgtggctttgttcagcagtgactgcctgaaaggaccataaatcaggagcctccacagaacccttttattgtcaaggtaatggcaaagaaaaatgatagcagttattccatttacagagtttagccttttttcttcttcctgattgttgtttcttccagttttctttttgtatctgaataatcacagcatgtagcttttgaatttttttcctagaggaatgtgtgatataaaacaccataaagttcgcagttagaaggatgtcttaaataattttgtcaaaactcttatggctatgctgtagtttgaactggccaaccaaacggtcatccaaaattagagttttatacctttggtaactgttagccaccgtttctaatttcatatcgtaattatatgtcagacccaggccattatacatgctatctatgtgactgaaatttgttcattttcccctataaaaactgattagtagcagtagattgctgttggtaatgctatgatagtttaagtgccatatagtttaagaaccatatatggttctctatagtcatgatgccctgacatttttgtatgttgtggtctgttgtgtctttccagagatttgtcactaatatttctcaaggtaccaactattgtgagtttctaattttataaattagactagatttgcagtgatctctatgatgatgctgttactgccacttaatttctttagtgggagagatagtattgctggggccatttgtcccaggtatattagccaaatgctaattattgctcaatatctgttctcttccttttccttagtaaaagaagaccagatttttcaagtaggtagatgcgtggttagaataaagactatatttcccaaccattcttgtagatagatgtggccatttactgtgttctggccaatggaatgaaggtggaagtaatgtccagcttactgaaagtgtctccaaagggaatggcttgctactttttcttctttcttttttctatatgactggaatacagatatgatggctgaggcaccagcagccatgttggaccttgggaaaggaagtcacgtaagaaaaggaacagggtctcattctgtgtagcctcatagctgcccaactgctgtatttaacagatgtgggagagaactaagtttctaacttattaagcttcggctatttttttttctgaactaaattctctttattacaaaatacaaacaaaataaagattgagaactgacactgacaattacgtgtttcctaaattcccgaccaacatttctgaatgctgaacctttccaggtgggtgacctgcaggccctttaaatctaaatttaccaaattcagctcattatcttaacctcaaaattttctcctcttgtgttttttaaggtttttattaattccaaatgaaagccttaaaaacatctttagttcctacccttctctcaccaattatgtgagtgaaaccagcagagttaagattttcttctgaaatggtcttacaaaatcagaatacaatcttaagtttcttgatgagtttctgtagaaaattagatgtgtttattaacttgtgccaagttgttccttgctctttgtataactgtcccatctttacacattaattattaattttgccttatcagagttgctatttaatactttaattcaacttctggagaactgattgcattttgcccaaggtgtaatcccactttctgaaactacagataagttatatgaaaattctttaaaaatgaatagactatgtgcatctaaagtattcctaatatatttcatattcttttgatgccattctgaaagtgaaactataattcatcactttagtatcagtaataaacattaaaaaggtgttgcatctgaagtttgaaatactgtagtgtacaaaattttctttcctagaaagtgatgcttaaagaaatgttagtagtttggcataggtctaattctgaataattattgtcattgacaactatcattatttgcagctacccattatcttctaaatggccttcagaaatgatggagaaactgacacgttatgagtatttcctgccctacatggattttgaacttgaattcccagcctcgcttgcatctagacacaggcacgtgacccaagccccaccagtcagacaaacccaattgaaactttagttcaaaagcatccagtatgagggagcagtgaagtttgcattttcctgatgaaaatgttggaagaggtatttggctttgttggcggggagggcaatgatttatgcaaaagttcctaatgaaaaaatggctttgttctgggttgtagtgatataatcagagatgcgttccagcatacagtgctcagaggcagctgtggtagctgtggttttctcatcagcctgtctctgtcatgttcctggaaacacatctatatgcttattgttatattcctcagataagttctgagaaatacaaatcgtcattgtttatttacttatatttttaaatcaaatttctgatttattcatgtattccagttcatcctaagatggtgatgtatgcctcggtattgattttgctaaatttatataactttgataaatataaaacacatatattttagaaagtttattaatgtataattgacatccaataaattttactcataaagtatttaattttatgcacttttgcatatgtatacatctgtgaaactattaccagagtcaagatagttaatctagccatcacacccaatgtttctttattttattttactttaagttctgagatacatgtgcagaacatgcaggtttgttacataggtatatatgtgccatggtggtttgctgcacctatcaacccgccatctaggttttaagccccacatgcattagtattggtcctagtgctctccctccccttgtcctccacctcacgatgggccccagtgtgtgatgttcccctccctgtgtccatgtgttctcattgttcaactcccatttataagtgagaacatgcacactcaatatttcttaatgccttttcattatctctcctttttgcctactctgtctgtctctagttgactcttgatctatttctgtcactatacattagtttgaattctaaaattttatacaaatggaatcatacagtatggattattttttgtctagcttctttcaccaaacattattattttgaggttcctccatattgttgtgtttggcaatcaatggttcatttcttttcattgctgagtattccatggtatgaatgtactacaatgttttttactcactcacctgtatgaatatcagaatatttgggtttgtttttagctactacaaaataaagctgctaagagcattcatgtgcaaaagttttatgggcatatgttgtcatttctcttgggggaaaaaggggatccaatagtggatcatgcggtgagtgtatgttaggcttttcatgaagcttcaaaattgtttatcaaagtggttgcaacattttatattcccaccagcagtgtataggagtttcaattctttgaggacctcaccaacatttgccaaggctagtctttcaaattgtagccattcttataagcaggtagtatcatctcatggtaactacaacttgcatttctctaatggctaattttttgaaagatttccttgttacagaatcctagattgacagatttttttctagtagtttaaatatgtttatccttaatccttaatcatcctttcatcctcatcttttttctttctacatgtttcctttttttctcaattttcaagatttttctctttattaatggttttgggcaattttattataatattccttggtgtagttttcttcatgtttcttgtgcttgaggatcattgagcttgcttctactattggtttatagtttttatcaaatttagaagattttaaccactgattttcacatagttttctgttaaaaaattatttttcttttcatgtttcattttacagagtttccattgctatgtgtttgagttcactgctcttttcttctgcaatatatactttggagttaatcccatccagcagatttttaatatcagacattgtagtttttatctccataagtttaatgcttgtttttaaaaatatctctcatgactcaactgcttgaacttatgaaataactactttaatttccttgtcaattctaaaatttgagtcagttccaggttagttttgattgacttatttttctccacattatcaattatatttcctgcttctttgcatgcctggtaatttttattggatgtcagacactgtgatttatttgatgctagagatttttggtttattataaatatccttaagcattgttctaggtcacagctaattacttggtaacagtttgagccttttggatcttgctcttatgacttcttaggtggaatcagacccacatatagactatggctaattatttcccactattgaagcaaggctcttctgactctaatactctgtgaattaggaggtcttttagtttttctgttccctctgatctttccaggtggttcttttcctagccttgggtaacttcttcacatgcgagtgttgaatacttcagggagaccatctgcagatcaccaaagttcttgatatattctggatacatgtctttaccagtaatatgatttacaaatattttctgccagtcagtgttttatgttttcatgttcttaacaatgcctttgaagtcaaatttttaagttttgataaagtccaatttatcattcttgtattttaaggatcaagctttggtgtagttaagtgttatttttaagaattttttttaaactttagctagagtagattttgttgtttgcaagtcagaaatctgactgatatgataattaaagaaaaaggccaagagaattgcattttcattccataaattttgaatctaaaatgtgagtgagatactctggaatcataacaatttattctggactcatagtttctgttgcttgtctttgcttctgtcaaccagatggtgctattggattggctaccaaggaacatccttatctgaatggttgaggttgtattgatctaaaaaatctccagagataatagtggacagttgctatcacttcttgggttcatggacctcatcaccatcttatataattagaaagagcataccaccatcttggtgagacctcaaatataaaaaagagcaccctctaattaaaataccttatgataaatccgtgatttggtcttgggttcttatgagcaggtaaaagtactctgttgtattggaaatcatttgattgtgaaaaatgttctgacagagatcaataattaaattaagtgaaaaaatatattaatccataattaaggcagttaatccattatttattgtaaacaacttaaagctaccatggaattccaacatctgagcaaactctggtgaaataagaaaagaactgaattagaaaatgggagatccagggtaaagtcctggccctaacactaactagctgtgagatactgggcaactctcttttcttatctaagcctctgttttgtcatctgtaaaataagcatgggctatgtaatgtgaagttctttatgttttttctggacctcactgtctgtagagagaaccaactggaaataacttctttgctgccttaaaccagcagactttattttaggacagagtgagtagtttgttgctaacaactttgggggatactggagaaggaataacccgaaaaggtaagttggttgtggcatttgcacactttattaatttttttgtataatgtattttgtattaatttttttgcgtaatggtgcaatatatccatgggtttagtgtaaccattacatacataatgtacaatgtacctgctaaacaatttctcctctctcacctccttcctaccctcccacctttccgagtctccagtgtcttttattctacactctgtgtccacgtggacgcattatttagctcccatttgtcaatgaggacatgaggtctttgattttctgtgtctgagttgtttcacttaagataatggtcttcattcccatccatgttgctgcaaaagacatgatttcattctttttatggctaaatattattccatggtacattttctttatccaataatccaaagaatgaatgttcatgcaggcacatataaagtgcttggcattatttcctgcagtgggtgtgcctgaaggtgaggcagagatggactggaaaagattgacgtttctttgaccagcaatgctgaccctttgctctttactagaggcagtggcttcactgtgcaaaacaaatgtgtgcttagtggagggtacctgaggtcaagggctagccatatagatgactatgagggaaatgcagtccgcattctatgatagtcattactttttgtatattccgcaaagttttggtataccatattaataaaacagcatatgcaaaagcacctaccagaacagctgtcagaacgcaggcactcaatgaacataacttcccttctcccagcttccccatgccttccttctaacatgtactatgctctttatctttataaacctctggagccctcttatgggtctctgaccattcagggttctcagtttgaatctgccccaggctttgatttttttctatagttttacttttataaacatttaatgactgtatatatttttctttcttgaacctacatgatatctagctagtgtaaccaaagggcaatttatttagaaacaaggtattaaattaacttaactaatatttattgaatgcgtactgtatgctagttaatattatagtgatgagaatatagtaggaaataagattagtcaaagttcctgtctccatggagcttataccgaaataatgcaaagtaggactataattaagtagtggatatattatttttgtcatcccaaatgtatttatctgtttccttattttatggtttctataccccagtatttctatggggaacttgtcatccttatttgattggagtcttagtgggactgtacctaaaaatactccaatctcccttagctaattcatggatatagtaaaccatgctggaccaatcagattctctgttaggttgagtaacaagaaaataattggagtgaattcagctcaaagatggcactcagacaaggtcattgactcctgtttcctagaacctcagagctttactagttcttgttggttccaaggctttattttttggctgttctttctgtgcaaaacctccttcagtgtttcttgtttaagttgctgaatgtacttttgtgttgcttggaatccagtagtcctaacttataccaaatctggtaaagtaagaagtattagtttttacaatctctattaattccaattcaattctcaggtttcatccactgaacagacaggaaattaaatctaatttttattggaaggggatcctcctttcccgtagtaataagaactaaggagtctcttgtcatcatcagtcatttttctacttgggtcattattgaaatacctattatcccagcttctgtgccacaccaaggacaaggaaatctttggtatggctgggtatccctgagttaggcttcagcttctacaggcacaccatgtaaaacttagtatatataagcatatataatttctctgaaactttgtactttccagctaattattctgatgcaaaacctccctcagacaattaacttatctgagagactatgctgtcttttaagaacagggcaaactatcatgttcattctgtcttgttcactcacctgtcctctgtaaattactctggatttgtgtactgaactcaagggaacaattaatttattcattcatttagcacgcatttattaaatttttcatgtcttccaggtcctgcatgaggctttgaaattataaagaacttacagcttctgcttgatgatgactcaacagttagagtggggaaggtaaaagtttagtgagctggtggctaaataatcaaataattttggcagtgataagggacacaatagaggtctaaaagtaggcataatgggagcacagaggaagctcttgagtcgtttggagatgtcataccagtgatggcttgcaggagaggatagctgggctgagccttaggaaacaagtagaaatttgcttaatatacaggtggagtaggagtagtacattccaagcaaagtaaaatggagagagagagagagagagagggagagagaaagagaggaggaaggagaagaaggagcagcagtaggagaaagacaaggacaaggacaaggttgggaaaaggagactgggtgagagaaaagaatggcacgtgcaagaaaatgcaagcagtcccacatgactggtatgactgcaatgaagagtccactggggaactaatgggagatgagcatggaaagggaggcagaggacaaagtgtggtgggtaaagaatcagggatgagtttatgtcctttgcagggacatggatgaagctgaaaaccataattctcaacaaactaacacacgaacagaaaaccaaacaccacatgttctcactcataagtgggagttgaactatgagaacccatggacacagggaggggaacatctcacaatggggcttgtcgtgggttggaggggtaggggagggatagcattaggagaaatacctaatgtagatgatgggttgatgggtgcagcaaaccaccatggcacatgtatacctatgtaacaaacctgcacattctgtacatgtatcccagaccttaaaatatattaaaaaaaaaaaagaatgagttttataaataggctgtcctgggcgaaaattccagctttatttctttggtgccatggactcaaggaagttacttaactcagttttcttatctgtaaaagagagaaggtggtaatatgtccgttttaacatattgaaaggactaaatggatttatgaatgaaaagcacctagcatggggcctgccgcatagtagacttcaaagacatttttctttcctcacttccctgccacccctaccccacacaccctgaaatctatcacaagagccataaaactagaggttactgttaaaaagtgcttggtggatacatttgggaagcagtaggaaactgaagagagagaatgaagctgaattaaggagagcctttgaatgggtagcacagattgtacttaaaaatcacaaagatttaaacattactcaattgcaagcatagtattgaaatgaaaacagataccaatgatacaaattgctataatcttgtcactaatcaatcaatactgtaatttatctatgacatttctatttggtaaatgccaaaatctctattttcagtttttacagatttgcagaaatattacgttggtgcaaaaataattgtttttggcattaaaagtaatggcaaaaccacaattagatggcatatgtacctttgaatttttattaaaattaagccttgatatttttaagttattcaatagcctttttttctcttctttatttctttcctttcctttaataatactttgctgtatttctccacatatttctctatgttcataagatactatataaacaaaaacacctatactaagttgatcattttcctagaaatgtaggccagtcacatacatttctttgcaatttacttttcttacatacaaaaatataagggacctccagctaactgcaggactcccataagatggaacattatgcacatattgaaaactaaacatgagatctttagatctacaagggatctaagagatcacctagtctagtggttcctgatgtcacctcagtttaattattttcttagtgggtagagattttgaatgtgagagaagtgttgaaagttctattaaatattaaactggcaatgacagaaaaatagatttggaaggagtaacctggggccatctttcaggtccaactttaatgcaatttcctcaggaagtgtttcctgatatccctgaccaggataagtccctttctgagtgccttaatagaaccttctatttgttctttgttatgtttactagcataatattaataaattatttgttattgtccatcttatggacacgttcaatgtccatacttacccatgaagtatcgtggtaagtatgaacatgatacttcattacctaatatattcttgacagattaaaaaaggctgaaaaataaatgaataaacagagaattttttgtgggggagaggcagtcatacagctttaaaatttgatgcagtggagtgggagaaggttgcatcaggggctcagagactgatattttccttgtgaattcatgacacttaatgttaaattccctagcatttgaggaacataagcttgcatttattggtgttcttaggaatgatcagactctctgtatgaggttcgcagtaaccgaatatatagggatattgttaatttaaaatagaagctgtctctttaaagtgcttacatcctcaacacaagtcaccctgtttgtggagacttgaagtagtactcaattgcttgtttagtgggcatataattagaacaaatggaaggtgatgatcttgaggcacattttatctaggttgccttgtgatcagataaaacatatttaccccaccgcagaaaacagaaacttttttagtgatccaattgcagtctctctgatgtacccagaactactttagatccctataaaaattgtttttacacttatacattatttctttgtgtcaacagcacaattaagctttctggtaatattttaagtaaaatattgtacatttgagagactatctcctctcattatgtattgatttaattcatgtaatgctcaatcttatttctttttgtattggttaaggttcttctggttaaaagtaatggaaatcaataagtcaaagaaaaggtaatttattggaaatacaccaaggtagctcaaagaagggctggattaaccaaacaatagtgccttaggaaaagcagaaacagtgccaagtctggggatctcagtggtgaaccttgtgaactaggatgccattccaatggcatctactacgttgttattcatttagctcctagttcatgagtgtgggggaggcagatctctattttcctaattacttctgactataatagaaaaagatcaagaggatttgaaatagagtacagttagtactaggaatcaagacaactttttttttttttttttttttgagtagcttcctcggaaaatttgacaggacattgtggctagctgactatgagacaagaaacaaaaggatgaataaaaaacgttaacttttacagcatgagttattgagaaaatagtagtgtcgtgagtaagtttggaatgtggagtgctttttagggggaggagattattatatgtttggctttatgcatatttgaatgcaagatggtgagatgtccccgttaagatttttaaagggagttatagtgaaaatagaactgggaatataaagctagtgttaggataatcatgagaaagaaataactctctctggagctaattttgtatgtatttcactcttctcatttctttgaacataggaaccaagccttaatcatttttcaatctcctaaggcttagcacttagtaggtggaactaaaacatcatttagacattaaattgagtgactcagagagaaaagaccagagaaccaagaataatttccactttctcttgggacttgttcaaaatgttgtcttcctttttaaggctctgccagaataaacctattttagagtctacctcttttgataaccagagagtcaacctgcaccatttgttttctccagttaggtttatgcaatttgggaaaggttttttcatttaccttctcttggttgttggactctttgcattacagttgcttaagccataacattagcatcttgagagaaaacaatgagggattcatttcagtctgcattttcctttgaatctgacaaaaagaagaacaagtctggaaagatagcatcccagaatatttttgcttactcttcactatttaatcaatacttccaccagaagtaagacagaatgtcttacttcacattagaagtagaaaccaggttagacatcctgataataagtgaccttattgtggagatggatgaggatggataaaatatggattctatttggtttcatcttaactgcatttattctatccccattttattgcccattcattgctccatgtcagttcaattctattctatttcggcttgagatatacccacaatataatgctagacatttttagtcaaaagcattttcaaatcttgtcaccagattagtcttctcttcttatgcatttcacgtttcctgtagtaaattatagtgaatttaaacttgtaatggttttcaacttgtagaccttaaacattttattaaaagtgtaatataatatcttggtaagggttaccactttataattatttccattgataggaaagttgattctgaaggcaacttagtgacttgcataaaggcatggagtgatttagctaaaagttggacaaagtgataaaatccatgtacaaatggcttgttctattgttaagtaatacagtttttgatgagtggagttactgaacttttcaaatagattagactcttctgatttggaaacgtatttgtggaaaatgccaacaatttctaaatgattttttaaaaattccattgatttttaatactttatactttttcttccaacctcaactataaaaataaaattattcactattttctatcaaatttcctttcttatgttgcaataatagccaaactactgagcattgtgtagaattctgctaaccactttacaagagagagatttacataagattcttttggttctggcttgacgtgagggattaagtgttttcaacactgtaaactcatccataaaacaatgttgaggtgggtataattattttcattccttagatgaagaagctgaggctgaggaggttattcagtttaacctaaggtggtagtcgtgagtggcagtgataaaggcagctgttaaactgagtttaagaaacttactgcagcatcgtaaatactgcctctctttgtgccccaacttccattcacactctatttctgttatgcatgtagctaaccaccacctacttcaggatcaactggaggacttgttaaaaataaaagatgcccacctctaactgtagcaatttagatctggcagatctagtgtggcccaagaatatgcatttctaataatcattccttgcagttaattatgcacagtaagcttggacaacaattgccttagttaatatcagaaaaatgttcatgagaaagaaaactttaaaaaatctttattcttaagtattgtttaaatactttgacaaataactggtaatattgccctaaaaactcttgccatgtcatcagttgaataaaactacaaagtttgaaaactctccaggacgtgacttaacatttctgatctctaatatagaaaaaatgatgacagaaggcacaacttgtcggcaggttgagagatcatggccttggggctgaaaaccctggggaatcaattttagccatagagggcaaagacgggggaaaaaagtacgagctctggagaacagataattctctgccagtttgtaattttgaacagtactcttctgccagccttggctcctgtggtttctatttagcatcgtgtaatggtctctcaattgtcaagtgatttactagttattttaggatttctgtttctttggtacttattattccatgcctactgaaaaactgaacaataaaagtaatcaattgggaacattttaatgaggcaatccaacccaaagctttgcattcaagtgtttgttcaaatttgagggggttatgcctaccagctctgttttacttggcctactcaatgagaaaagacaaaaaagaagagagaatttctggtaactttgagctgcagaagtaaaggtcgtttatcgggaggagttaatagtagaatgctctttggacagatgatgtgcttagattatttacaatccaccaccaaaaaagatttggaaacaagattataatttgccattgataggaggtgaaactttagctagatggtaggatctcctggatgttaaagtttaagtacacatggatagtcaaaacgctattttttatgtttctttgtgtggtacatggttttctagactgcattattcttgtgaggtgaacaccttgaatacagtttttttctattatttgttgggaaaatgtatacttccatgttaagttagcagctcaagtttcccaggtcagcgagagtaagattttctgattggcttacatgatgctttcttccaaggatgtggagtactgttaactctgaaaatcacacaattctttggtattcttttaaagttaggtctctgattaacactacatttctgcatcatggtttttttatttaggggccctggggtgaaagcttaagcatttcattagtcttgaccagatcacaaagaactatgaggcattttagagagcatttaaataattttggagggttattagagagttcaaaacgttaaagtgaagcaacaaggtctgtatcgttgccaaatttcaagagaaaaggctaattagtctttgaccttggagctatttggaaggggaatgtgttgcttggaatgtattagattaaaaattattctgaagaatgaagagagcacctgataaactactatatgaatggctttatacttagcagttctaaattccaaattactcttgtttttaaatagttatacataaatctgaagtaactgcagatttttctgtttctctactgtatcctcttaggactagggtaatgactagaaagggaataagtatagcaatagctaactatgtctttttttttaattaaagtttttttaggtcaagaaagataaccaaatgctttaaattttcctgtagtggtatatgtcccaatgctcaaagttttgaattgctctattaaattaaattactcactagtttcgaaaacattggtttagaaaataactatttctaaataaacatatgtgtttaccagtgagtttaatgccaataaaacagttcctattcagggtgccttatatctggtaagcagaactaccaactgggcagagggccaacccacagtccaaatgggaaatattttttaaagttttgataggacacagtactcagttttaaagatcatactctgattatgattgaccgggtctcctaggttaaacaggtcttcaagaaggtgatcctgcaagaactaatctcagttattatcaagctaatgtgggtagtggacaacaccgtgaaaacaaggggccaattaacttgggaaatgtggggaagagcaacggtgagcggggagggaagtcgctttacaggtgtaagattttcttggagagtagtgtgaccatgaaggacagggaattgccacctggtgaggtctatctctgtctttcccatactacttcctatggatgagtcgtctggactcaaagaagaccttaatccatggaaatggtctctggttttctgaagggttaaatgtagatacagtaagggatttggagaattgaaatcccatgaatagagtcttgagattgcaaaaataacaacaataacagcaaacagtagctaatagttctctgacactatatgctagacaccattgcatgcactctgcctagaaatcacccatttaatcttcactacaatgctatgacacagataatatcattattctaattatacagatggaaaactgaggtacaaagagggtaattaggcaattttcccaagttcactcatttagcaagtggtagagccagaatatgaaccaggaagtcaggctctcgagtctgtgttctccggtacaagcttcacaaaggagggcatttcctaagacatatttgtaccagttgaagctgtgcatatcaagattcattgggctgtaaacagtgataacatgctttttatctgactctgtaaaactataaaaactcatattttctggaaactagtcactttaagtaattcctagttttgcagtttagaggcttcttggatgatccctacagctgtttctggaaggaacctgagggatcatgcaccagacagtggcctaccagggggcattaatcaaatgatcattcataaacactgtgggagcaagttcatttcagagtaatcagaaattatcttttgttcctccatctcttcaaaggaaagccactgggaaacagggcaaccaatcactagaactctctccacttggtttaatgagacagtgaatcgttgaattaagccagtgtccttaagctgcccttagttggttgctccttgattagtcaaagtgtaatttgagtgatacagccatgttggatgttcctgccacatattctgatgagttagcactctgttgctgctgtcacacagcttcttaaaagaagtgtcaggataccctgtggggaaataagcagtgtttcgatggcaaagagactgctcgcgaggggctactcatggatacacatgttgcttaggcgtccagccagccctgcagtgattgatggatgttctgctcccttctggtgtatcttcacttgtgctgggaaagggatgaagggcacctttgaaagaggaggaaccacagtaatcacttcatctctcttctgcttaatgcaaacttactctggaaagataaatgactatccactcctgtaacaactcctcaaaatcattactatatattgctgtgggccagatttgtgcatttctaggattgtcccactgtggcagttatcggctgcagtatgtagcattgattgcatgtttttgttaacttgaaagtatcttagaaggaataagcagtaaattttgaagaggtctcagtgaatctacttgacatggaaatatataattgatgagacattgtaatgggtttaaaatttacagtcataactcaggtatacagaaatgaaacattttatttttctgttactgaacttaggtcaagtccccatttgttcagttggctgaaaacagttacttttgctgtttcaatttaatttagtcacatacagtttattcagtcaaattctacgttctcttcctggtcccttctttgattatccttatagatgatctaagttactgggtggcttataggtcatcctggcatgaggggaggagtgtcctattccttgggtcttctttggtccttgcagacttttgctgagacatagcagttctcttctagcttggggacctcatgtatagcatctggtgtactgggtctgcatgggcctgcctaggcctctggactacatgctcaggctctacacctcatgccctaactctggctctctttcggcaacaggcccactgagcacttccctgtctttcctcaggggatgctcaagaactcatggctactttctgtgcagaaaatagactctgaaactctaggaggcttcttaagctcatctgcctgaaacataccccagcttttgtggtggtccttctgccatgcctgccatgctgctttggtgccatgctgagtgaggggttttcccaagggcttgtagtgttttctggctatgctttgagagcaggttaggcacctacccctgtcagaatgattcaataggctcaatctctcttaccccgttcccctcccaatccctccacatattaaaagctttctatctacctttttgcatttaaaaacctcatgacctcatgtttcatcccttctttaagttttatactataaatgctatgctgaatcatttgagctctggctcattggaacccacaaatcccccttttcacaataataccagaaagcctagcattccaggtttgtctcagctactgactttaaaaaagccagatttgaagatcaaagctgatgaatgacaatgtgattctctgatgtatttaccatctcctctggaaataaggaatgctggtgtttgtttcaatgggtaaggtaggaaacacaaggactcctggggaagaaaatacatctgctaatatttcaaaaacattatcccagctatagcactttctcttttttactacatgtacttaaaaaaagtttagtcccttctccctttttccttgttttttttttttttttttttgataatgacattgaaacttcctcattattgggtaaagttctacgcagcataactcctgcttttccaagtcagattgctgcccacctacagaccatctaaagtaggtgccaactgtgagggaggtgctattatgatcttcatttctcagatgagaaaacttatttggagagattacatccagatgcactcagctcataagtgacaaagttgggattcatggtcaggtctgttgacattatcctgccatttccaatgcaagtctatttcagacttatcatacatgtattaagttaaatccatcctgaatagactacatggagattaagttcctgcaaaatgactttatgtatacacaatttttaaaaactgcatacaagttttaacttggggagaaatcagttctctagttactaataacctcaatttttttttctggatagttttaaatatatgtattttgatttaaatagtgtttaggtacttttttttttttttttttgagatggagtctggctctgtcgcccaggatggagtgcagtggcgtgatctcggctcactgcaagctccgcctcccgggttcacgccattctcctgcctcagcctcccgagtagctgggactacaggcgcccgccaccatgtccggctaatttatttttgtatttttagtagagacgacagggtttcaccgtgttagccaggatggctacgatctcctaacctcgtgatccgcccgcctcggcctcccaaagtgctgggattacaggcgtgagccactgcgcctggccgtatttaggtacttctttagatataagccccatggattggcaatccaaattgagctagtagatcttcaaagaacactggaactacaaataccaactgtggatatttactgtcataaataacacttttgtagagaacactttaatttgcctgatcttatatccattaagagagaaatgagagtaagagagaaagagcgtaagaataaatcattggctggaaaccttaaaaaatttagattacttcttagattaaagttaaatagtaccagataaataaacatgaaaagaaagaagcctatgtggtgatttcactgtttcacatggtagaaacataatcagttgaaagtcactcatgaatttatatcatattcatgaacacaccagaaaaccaaaaagatataaagtccaccattcacttccttaatgataccagatgcatttaaataggaatttcttaaacttttgtactttgacatgctgataagctccagaatgatattatatattagctaaagatgaattatgggttttgggtttccatttccttaaatcaacagcatgttcagttacagcacattgctaagggttaattttcaaaccaatgagtggtgagaagggctagtgaaaataaaaggggaaaaacccaactataactggtaaaactctttctatgtgaataatattttttcttttgcatttgctgtgtcttctggaggaatgacagttgtgtaattcagtctggttggagagacaggcatagggttaataaaggatttgtgtatgggatggtgtactctagcatgaactgccatcctcctccagtggtgtgtctgccacacataagtagcataaataacatctgccaaaacagccctctgaagtattaagcactgacatacccgaatgctttctaggtgttacaggtgtactgttcaagtgctgtttaattgcagtcttaatcaaatatgatagcctgattccaaggtgaatgtcttataccattgatttgtagtaagtcgccacatttctttgaacagtgtgccattttatatgagaattataaaacagcaatgattattttaggatcagagatgttgtgattcatcaggtactgttgatggatgatgcatttgtgcttagtctggccttgcgcagaggctcgagtaatttgttatcctacaagacatgtgctgtttcctcttccatactactccccagtgctactaatattttaaggctaaagaacaacactgtattagatagaactacaggctatatgtaatgttaaatatatgtatttgtatatatgtgtatatcctctgctatacagatcaggtatcatgctaaaaccatataactcttaactgcatttttctggtaattagcaatggattatcttcccaaaaaatatgggttcttcaatcctcctggtcttggggagcacagaatgattcattatctcttctacattagccactttgtttgtggcaggatttgaaataggaatataggttgtataattacttaatgaaattcaaaattaataagatgccattttcagagttttttatgttgttctaatatgttcttcaagttttaaaagccattataaactttataaattcctatatttcctattataataaagtctgtatccttatttctttcaatatttatgcagatacatacataattatagtgccacatttgaaatatcctacttttgtatattacagattgcatgaaatagcccagaatggaggttcagttgatctttaagagaactcaggagaactgaattttgtattagctaaacttatttaatatattaaaatgatatacttatacattttaattttaatcctttacttcattttcttttttaaatagaaattatcttgtctacaatagcaatttctgtattggtgttttctcaggtaatgacattgatccctatttaattactattgcataattaaaaatcagccctttgacatcagtggggatggtagggctacagtgtacaacttattaactttcaaattatccaaaacatttgcttgcattttgttataatttctgtatgataagcatattggagataaagtagaaaataaatattatatattatcatacttttagatgaccaattttagcttcatatattttatcgagtttcagtaacatgagcagtgtattgctttgttcatcatgtgaaaaaattgaaacattacaaataagtttaagatcttcctatgggaaaaaataatttcctctatcagaggaaaaatttattactattatgataataccccttcagacctttttctagtcacttacaggtaaaaattgtagtactggttggtacatagtgtattttattaatgttttactgcgtatattgttgtataaattgctttccgcactcattggcatgccttagaattctttttatttaggcttcatgactaatttgtagtggaacctcaagaagatcacttatgtgcttcactttccacatatgtaaaatgggaataacaacagaatctgcctcatagtactgctgaagggtgacatggggaacacctgtgaggcattcagaacagagcctgtcatacaataaatgccatgtcagtgtttgctcttattctcagtatacagagatctgctttgatcttttcatcttctgcaaaatattccacaaattggcatattgtgttttgtaataatctctattgattattttcaagcaagatttggaattatccgcagtagtttcaaatgtacaaaaaagtaccttattttatttattttttaaataactgatctgatctacgagtctaatctggtaagttttgtcttgagtccagtaatgcagtccaatactccatttaggtaaccctgtccttgcttggtcaatttgttccacttttccaagtttgacctgcttaccctattcctcttcaagagggcatctggttgtttagtttacatgatttagtggtgcagaaggaaagggtaatcagattgatgtatcctctgagtcctccttgatatctgcagagcagctgagctggtctgctctctgtgctgttgacatctgctctttggggcgttagggggtctggtcatttgtcccttgtctgttatgatctacctgcagtggttttctaccttgtccccaggcttcttaattcttcctgtactctcagaacctctgtgttgtcacaaccagacttgggttattttgggtccccagtttccaggccctgaatgccatgggctctgtctcaggaataggtatctgctggcctgctgctgtcatttctactacattgctcctttactgccttaaagagtggtcctggatcaggggttgaaagtggaagtggaaataaaggacgctgatgtgacgtctgtgtttccattcttcttcctaccacttcaccagatgtgaaaaattcatataatctgaatcctctagtttgagttatgataagttaaagcagtttaagaatttaacgaactcccctctccctgattaaatctacttgttagcactgtgttcttactgcaaatcccgttgccttgccagaagataaatattaactttttctttctctttgccttcctgttgtaataattccaaaccacccaaaagaaataggtgagtttgtggagaaggtcagtaaaataatttcaaaagggaaaagaacattcatgcatttaaatattattcccactggttcatttatgctgcaatgaatatctatatatctatgtatgtatctatcattttgtgcacatgttttagtatttttctgagtttcatcctgaaaaaatgtaattgctgtaaggtatgcacattttacatttcactgtataatgacaaatcatgctacaaagtgactagaccaatttatactcttgctatgagtcactgagagaattctttactaacaccagatattttgcgtaacttattctgtttaaattctatcagcaaacctccatagtaggtgtattcccattttgtatatgaagaaactgaggttcggagttaaagcaacttgttcaaggtcacacaaatggtaagtgggtaatttcggaaccttttaaaataaaacatagaagcctactatcttattgttccattctagaaatatgtctgtgtttataatatcgactactttgtattattttaaactttataatattgactactattattttcttcacatcctagttaagaatctaggataaaatggaaaacgatatcacgaaatggaaaaacaatgttattccttagttagcttagtttaaacacctatttaatggtcaaaggcaagtagttgacctcccatctttttgactcacagtcattagttacacaagaaaagcagaacaaaacccagctggatggaggggtggatatgcaagtagctttcacactaggaattgtgaagcctgaggcatagccccaagactcagatcatcgggagtgcactcagtccagagggacaaatgttcagagtctgcatcacctaatattacaagcatctttattgagactgatagaagtgaatttctcaggtcagaaaacagaagagctcttttagctgagttgtgatatttaaaagtctctcattttgaatttcttgcctggccaatcaaactgtcctcccagaacaaattgttggataatgaaatgcatataatgtagcttgagagcgctgtcccatttgcagcactggcttcagcctgaggcacatctctggctgctcctttctatctataagttaaagcaatggcctcagcaagcagtacactctgtacagcagctgcaactcgttatcggctttgtccagaataacaaacagaacaaacacattttgcaagggcttttacccctcttatgtagagaaggaggaattaagcaatcagtgaaatgctgattgatcagttgtgctgactaagagaagtccaaggccacattagtactattaagccctaaaaaacaaagcaaaaagaaaatgttcttagaactttatttaaaccagtatttctgtgatgtgaagtacatttcccccaaagggaaaaatgggaaaatatttgcatttcacttagtacactttactcatccagactgctttgtaatgtaatgatggttaagtatttttacaaagataattcatgttttttggcagattttggttgatcatggagtatcagggttgtgtgaaccaaaggtgtgatgcagagcagctttagtaaaccatcccattcctatgccacccgtttgatttcagtaccaactgctgtggccacatctagaccactctttaccagaaactgtgccaccttcaaaattccagcatccttttcccctcctcccttattttttgatctcatatactcaagtattcttagtgtaacaattctttgagcattctttcttatctagcttaaaatctagggtctaccattataatcattcctttcaagataaccttaacttccacaccccaatttctaactggcctggcaaaactcagacctttggtgcaaaatcctccatctctatgcctgagcccttgtgtttgagaatggctgaagaaaaccatgtgcatggacattctgatgtcactataaattcatggtcacggatctcaaatgggagcccaagactactggctttcctgctgtggttgtctaatgacagcatgatcttactcttcacagatattagtttaaactctccaaccttcaattgaaaagtctacatcttactttattagaaagtagaaacaatcaagggttatgctcccattttcacactaccaagtaaacaaaccttcagtaagagaagatatatttcctatatctcctcctaccctcctgttaaaagggtgcaaacgtcccccctcctaacaaaaaccaatccttcttcatgctctttagatgccgtgttgtctctctttctcaaagtcttcattttttggttatactctttctctcatgcaaatttttctctctttttcaagtagagcaggctcagcagcctacaaacgtgtcttgggcacctttcatcaaaaaataaaaaacataaaaacaacaaacgaaacccttcttggctccacattctcatccagtttctattctttcacttagctgcttttcttctcatgttttgtctattttttaacatcctagtcactctctgatctacttcagtttgacttctacctccatcacttgagtaaattcaatacatggtttcaagtatattctagccctagcctgatccacagggaaggttctggaccacaagcaacatggcagagttgttcactcttgaggtaaaggagtttggcacctcatgcccctataatggattaaagaaacactccttaatcggggttagtccctgggaaaggttttaggtgtgagcaattagcaaccatcacccacagtggctgggagaggggggcactagcccaataaagaggatctaagtagtgcacccaagcaggtctaccacagttagcttcctatgtgggctcacgttgcatgcagtgcatctctatacagcaattaatctatttcataatattaataaaataatttcactttccatgttaaaatccttcaatgacttcctattgcactataaatggcaaatcaatatgttaacatgccctgccaacacctacagggtctggggtctgattgcctttcagatctctcctgataatctcccctgcttggttcaatatccttctgtttcaccaggaagatatcatcaatttccagctcaaagccttcacatatgatgttccttctggctggggtgcttttcctcccacatgacccatttaattaatatgtatcattcacatctcagtttcctcggactgttttaagcatccaatctaaattttgttctccactattattttctagcaaaacagcctactttattcctgcagagtttgtaatcatatattgtaataaaatttgtaattatatattgtgagattgattactaagctgtcttaatatactgaaagctccaattcatttatatttctttagcatctcccatgaggtatcatgaggtttgggaccatgtcatttcatttcaccattgcctaatggggtatctggtatgtaataaaagatactcaacttgttgaatgaataaataaatgcataaatgatgaataaattagatacacaaaattaggacgtcaagaaagaatcacttccccccctcccgcaagttattccttaacaattctcctagggctatcagcactgggacatgagaggtttaatcaaatttgtgttcctttggtgctctcttctgggatcatagggcttgatggatattctctcattaactcgtacacatccctgccatttttgtgacactgatttgcgcagtttttagagaaactgggaaataggaagattaatagacttggctgaggatagaatgaggttatgacagaaccagggatagagtgtgcttctacttattgactagcttagcatgctgcacacttgttagcagttaaagaaaacacattgggaatcagtccatgtcagtaggtacgtaatcctggaaacttccttctgaaatgtattactataaatattctttctctgcacacagctcatttgatgaggtacatctttaggccaagagctcttcttgatgattaatcctactcaattttcttatgagaaaatgatgcacacaaaggttaaataactcagccactgtaatagaatgaattcatgtcaaacctcagctctgaggcttctagttgacctgtacaaacatgtagctgttttccatcttcatttcaagaatgttttatatatttaatattaaaactcctaattctgcttgttgctgagcttaactctatgtaacatttatatatgtaaatattacttgaaatagttttaaagccacaaattattttcaactggatttaattagaattttcctcgtactagtttgagagggtagctattccttgacaatctttttcttcaggctgaaatataaatgcagataaaatttggagcagaattctgccagttaatttaaactggggtatggcattctgaagtataatataataggtatgtaaaaatggttgttatatttagtcttaaagtttaagatatttagggaatgtatttactgaggaaatacgttgactttgagaatttctttatggagttgaagtgcctagtacattttttttttctcctcatactaattctaagtcaggtggtccaacaaggcctctcatcctattggtattacagtatgacctgtctcctgaactttgaagccatttctttccttcagaggagataagaaaatgtgtcttatcttaagtctggaagaaacacggagcccagtatcaagggagtggagtagttcttttcccagacgtagcacagggtttttcaagcctgaagaaaaagattaatctccttaaaacaaggctttgttgacttgggtctggtcatggcaatcctgtttccagccatcctgtgtataagctctaacggtcagaagtttgtttgctttgattttgatgtggctcatcttttcttagctgctcatattcaagatttggaaaagaaggaacggtggtgagctgagcaattaattggattctgataaggagttctggagaaattttattattcctgagttttaaacccgtgtaactttaatataactttggtatgagcctttacattttttctctgtgtttttgtaattatattgtggcattcttattgggtgtggtagtagcaataaattataaatgtatgaatttatacattatggatttataatttcataagtttttgagattttaagacttactattttttacacgatgccttatgtatttatagcatttaatattaatctaaattcattttgagatatattttatcatgcttttatcttttatatgttattagaaagcacttggtattttaaaaatatatattaatgtgagatttcacaatttataccttgtctttgtagtcacatgcgtagaggatatttacaattttactcaagttaatttgctcagtgttgatcatcagaccttttagccagtattggctgggaaaaaaagtgtaattctttttgttctcttgagaattttttggatctaaagtgattcctagggtgtgggtcaacttctatgatatgaaagatgacatggaggttttttattttgtgaagtgcattaataggtgatcacatttcatcctgggagagctgctggagaggaatattgatttagcctgttatggttgagtctttggggtcttgagcttcttagatttttagttctttttgttattctttattgttcaatcttgagagtagaaaatacacatttttgtccacttctaagaataaaactgaaaggcttctcaagagggagcttttgagggacaagtctgtgttccagacttatttttattctcggatctagcaccatgcttggcatgtaaaagggctttaataagtatttatagaaggaattgaagaattaattattacttatggactatgagaggtcatggttgttactctttctaatttgtcgatattaaacagagacagtgaagatactaatttagatcacacaacgtgaatgaagcaaacaaaagcctaaagctttagaaaaatgaatatattatatttttaacttcgcactgtagttaagcagtgtggagctatttaatgatttcaaccaggaagatattaatgtgtgaaataagagtacgtggacagtatattaattgtatgatacaaacaagatatacatacataaagttcattaaaagagtatgatttcatatggctttgaaggattgataggatatagacaaattgataaaattgatctaaccaatatttaactttaggtttcttcatcagataaaatattgcatcattttatgttggctaagtgatttgcagtctatttcaattaattattctttatagtttttctctgtcaatgccatttaataaagagaaaacttcagcagacagaagttatatgatctttggcactattggctgtgtgttaagccacagtaaggttcagttacgtattttattgttttataatcacacatttctcctttgattcatttcttatctacaccccttctttcacatcctaaatattttctttggataaatgtgtagggcaagatgaagaaaagaagagaaaaaagtagtcagagcttgggagtactgaaacgctttggactccagccagctgccatcactgaggtggtgaaagaacaccgtagtataactggatggccctggtccctgccaggagtcaggatggactttcagtgttgaagagccatcttggcctgttactagcgctgccccacaccattgtgtttgcctaagagctgagccaaagaatttacatatgtatgagccaaggtctgaaaatagaagttaaaaaaatggtgctaaattgacatatttgctattttatttttttggtcagttaatatgataaacttttatttaaatgtaaacattattttaaaaagcactttgttttaaataactgattttcattgaaattaattctggcctctaagcagagttagctacaaagacaatttgtaaaaatgcagaaaattcagagtttaacttggagttgtttaaagtttattttcatatttgagtctgatatttcagttcactgtaatatttcaatttatttaaaatattatcaagacaaatattgggttaccttcacaatatttttttcatttttcttaccccatatattaaaaatgaacaaaaatgaaagaattatatagtctagtggatggcaattctcttggtacagtactcacaggatgtcagaagtgctttgatttgcatgcaaatagaaactgcattcctaaaagacccttaattgaagatattaataattttcattaggttttaagtcttttaaccttatcatatggatagaaaagtaaaagatgtgtttaataaaatgtcttttacttatttttatttgtcatttatttaaaggtttattagtgaatctgtttacctggaaaatgtgcaattctatttgcaaatttggagcactacatatatttaagagaatccttagtttctgttgggagtggcaatattttataactgggccttcatattcctatgttacagccctggtccctgaaagtcctacagctatctttgtttcaagtgtgtatgtgttataataagataagtgttaattagttaatcaagtactaattaacctttttaatttatagaaaaacagacatttatggacaagtaaatttttggggtcaaagtctttaataatttgaagaatgcagttatttttagcacaaatattctaatgtgaaaagaatttctttttctgagttatatatttttatgccattcagagtcactaatatagtactaataatactttttctattgtgtacctttgtttctctcatttgtcttacattttatgtctaatcatcatttcacaaaatttctatcattactgcttgacctcgacttctaacatggcaattaatttttatacacaaatttttgaaatcttgacagagtttttaacttcctcataccgagttctttgcttttttagtttacaagatgttcaagaatgctcttttgaaataatcaattacctaatgcaagataaattagcaacaacattacatatttttcttactatcaactgagaatgatcttgataggggcaagtataggttaaaaataaatgacatcaaaaaacaataccagaataaaacatttaattcttcaacactcaaaggcatgtcaggtattgaaatccaagtaggcacttttgactaattgttagtagtttgtagaattcaaggattagggttggcttccttttgtctttctttctcttcttcctccccttcttcatctccttcttgttcttcttttttttcccctctccagatcactaatcttctccaacaaatttttagcctatataaaataaaaaaaggtactcctgccctatgactcaacttacaaatctacaaacctggaggaagaaatagctctgtgatccattcctggggaattgcaataaagttttagggaagatggaacttaatgtttgtgaaagcacgggtcctatttccgatttccaggagggtggaatgtatcttcctgaatcacattccgctgaaaataggaggccatggaagaaatcaggttcagtataacaaattttctacaaaagggggtggagtaggaatgtgcgtaggtgacctgttctctacgtcattccagtgtaaactactgccccttacacttcacgaagtcggtaacttcaagacatgttgcaccacatgcttctctgtgatcctcaaatatgtttaatttaaagagggtccagtagtgtcctggcacatgatctggattgccatagataaccatctacctcacagctagggttgctctttagaatcttgcaaaatcatttgtttactcttgacaaaagttaagaaaacaagcccatcagagttgtttgttctgtcagcatgttagaagatggttttgttgcaatgataatcgttgtgcaaagaagactgatgatgatttttttttacattttcttaacagtatttgctatttagaatgaatgttgtctaattatttagccattttattttgtaaaatttatgttgtaggcatatttagaccaagttataagaaaatgcttcagccaaaattaagtgttgagtttgatttgtgtaattgttagtttctttactagttgttccatcatttacacaattatttctatttgaaatgcagtaattgttcagaacttatatttctatactgatgtctactaacagctttagatcaaatattaaataactcaagaataatgagatgatcttggcttacttagatatttggtttttatatctatagaacaaaggaattagaaaataattttgaagatttcatccagctatgtaaaactatctagggaatacatttactaggttttcaattttctacaaaacatctttcagcagaaagcaatcctgtttcctgatatacaatgtctgatacatagaaactactcagtacataattcctgaattgattattcttttggaaatcctagatttgatttctgaacaatcataaacatttaatggcatgaaattacccagattccatggttctggaatacataacttcaagcaataagatgcaagatagaaacatataagacattctttgctattttaggtaagtccagctgaatcagttaatcagctagaaacgtggctcacagatgaattagttttattattaggtggattactgaaaaattaatagctttatttccgtattaccttatcatttatttaatataaaacataataaaccagagaagttgtggttactttcttctgtctcattgttcagtttttactgaagttatgttttactgattttcacgaaatgcaaatatttctgagcatcagaaatccagcttttgctacctcccactcatgtattcttcccatcaaattgaatcttaaccaggtcactctttcctgttcattccatgctgttgcccctgttttctccagatataattgacatgctccaagaggatgaacattgcctaagacttgatttctggtcttggctttgcaacttactagctgtgtgaccttgaacaagctacttaattctctgagactcatcattattgtttataaaatagggatagcattagcttatttcaagaattgtttttaaaattagcaaggaaggcataccaatgcctagctcaggggatcaacaagtggcaagtacctcaactttcaggcaagatcatacttatcatcagtggagccaatagaacagatttatttaaataccctattttcacttactggcataacagcaagtggtgtacatatttatatatctctctatatagatgcagataatatactaatatattgtggttatatcttccaatgttttagtttctattgaggggtctttcttatttattacacaagaataataattattatttttttactttcaggaagattgaaagactttgcttaggactcctatgtgacatgattttaaatttaatagttagctcatggtcaaactccatttttagaattttaatttattcaatatttagctttttatgtgaacattgagtttcttttcttaaattccactctaagttctgctttctatattgggatttttaaattacagcttaacatgattaactttgggcctcttgctatgttttataattgctatatatgctttttggctcatttccatataaatcaatcctctacaacttttatttatttacagcttgtttttctttctctttttggactaacttacacgtgacctccctttgggtgcactttgtgtttggctatgtcttcaattttccaaagtcactgaattctgaatcaactttctaaggcatttcccactgttcttctcatttcacaaatacacaagaaacttcgtgaattcactggataatccactctgtccttttacattggcaataactcatttatatacattctttagcaaatgtgtatgcacataacattggcctagaatatatactccatgctgttgaattaacatctaacatgtctacttggtctgggagtagtgtcttttttaagcagaaattagcatgacaagatttactgtttataaatacatgctccttgtactgactaacttgttctccttaaggtgtttgcaaatggggtcttatgaatgatagctttttttttgttattctagaataaatcacatgtgccctgagctttaatatgtgaaaccaattttacaaggtctcttttccagcttcatttttcaccttcttttgtatcactccaaactttatgttatcaaatgttagattgataagcatattcatcataatttgatcctcactttctattcctcaaaatgccaattggatcttaatgaataggttttacttgattggatttccaaggatatctggttagtttgaaccctcatcatctaacaacatgatatctgtctgtcattttcaatccttgacatattgggaaggttttcaaacaactttaagtcttcttcctggccaaactttgaggaatcctcctaccagcttgtcctagtttctgtgataggagaaaatgtgtgccttttacatgggtacaatccacaccactttccctcagagatgccttcttcatccatatctttaattgtgaccgtgttccttgttatgatactaaggctaataaaaatcatagaactgaacccaattacttctaccttttatattctattttcacacatttctggtcaaacacaaaacagtagaactttcttcagggagttattgcacctccttttactctgaatttgtttgctctccagtcataccttactccttgctttaatgtatctcttcaaaaatagactttatagaattattgattgccaggttttttttttcatgactcctaagcatccttatttcctctcatgcttaactgatgtaattttatttgttcctgcttaaataatcatcactgatcaggcaggaattaagcacacagcaatccattcattcagtcatttttccagaagcatctcttgcatgcttgctatgttagagactttttgatagatgcaccaacttcttagagttgtttctgattcattacttaggaacatttcaagagggcagttggaagtctctgtaccttcaaaggaattactaacacccttattttctcttcattccaaaacctaagacctttattctctaagacatcctgttctcattttttttttcaatctgtagcaggtcttcccttgcttatgtcagtggactgtttaaatgaagagtggactgtttgagaagtggactgtttaaatcagtatagacacaggctgtcagtgtttctttatgtttcctttaaagacattttcgtaatgattaatataaatgagttaatggaaacaaaaatgtaaacagtagttgataaaagaatagtatcaattaaaaacatactgtgaagtattcaacttcaccagtgatttaaaatagaaatgaaagcaaaataatattttctacagcggagcaaataaaatgaaagataatacataatgttggtgaggacatttttaaagggacacccatatattgcactggtatgtaggtgagtacactctctttggagagaaatttgtaaatagtaatcaaatatggcaatattgacatgcattgtagcagcaatgaaaatggaatattttgtaatcatttaaagtaatgttttaaaagaactttgtaataacatcaaaatacatttaacataatattgcctccaaaaagcattatgcaagtcaatggcaattttcaaaactatgttctgagcattgacataaatgctagaagataatactttagtgttaacagagattatgtttgtgtggtgggttattatctattattctgtatttccacatttctttaaatatcaaatgaaagtgaatacaacctagtacttgacattttaacattttcaataccagatatgtcaataaggaattcataaaataaagtgccctgagggatttcacaggctaaatgcttctattttttaaaatgtattaatagaaaagaagactaaatctaaaaaaaaaaattcattttatcagagagtgactcataagtttagaaaacctttgatgacctggctcacaaagaatgtacttccaagtacacagggtccccagcctgatgtgtgtgcctgcattcatgcctgtcactctgctcagctgcgtgcagacagcttatatgaaggaggactgtgtacatgtggtcagagaagaaaaaaatgcttattttttaaaatgttttgaaaaataatctgtcctaaaagtgtaacatttccactaaattttttcatgtctgactttaacattccctaccaaccaactcttatagcctcaactcctttgatctatcctaatgtaaactccctcactaatgtgtaatatatttttttccagtttggttatagatttcagtctagcctgaacactcaagtatgaaactagccactattttatttattggctgttccaacctccattgtggaattataattgatggattttccaagtctctaattcagaatatttaatcaaattttccaaaatttctgccttctcctccttcattctgatgactaaagacatggaccataaaatatatatacatatatacatacatatgtatatgtatgtatatacacatatatatatgtatgtatatatacatacatatatatatgtatatatacacacacatatacatatgtatgtatatatacacacacacatatatatatgtatgtatatatatacacacacatatatatatgtatgtatatatatacacacacatatatatatgtatgtatatatatacacacacacaccgtagtttgcaagtctgcatctgggaccctttactgataaaaatgaaagcccattaaaactctcatgcccacatttctctctagactttagagtaggagaattctatcctagaattgttgattgttgacatttctatggaaaaacatgtttaattcatcatgctttgtagtcaactgctataaatggtgatgaagtcttttccttggtcaagctctggactcctcagtacttccactgtcatatttgattaaaacataagtgatgaagggaggaaatatattatagtattcattgcatgggtaccttagggtaatgggactatgactgatttaaatttattttgcatcctaaaaagtttccattagtgggtgcagcacaccagcatggcacatgtatacatatgtaactaacctgcacaatgtgcacatgtaccctaaaacttaaagtataataataaaagaaaaaaaaacttaaaaagaaaagtttccataatgaggattgagtttatatcgttttcttaattaaggaaagacaaccctcactacacacacacacacacacacacacacacacataaaaagacaagaggtgagatcaaggcgtaaactagtattggactaagccagtaagtactgcttctcagtcctcagttctctaggttgggagttttccttttgctattttcattctcctccaattcatttttcaatgatcttcaacacaaatttcgcctttatttcttgttcaaaatacttccatgactattatgaatactatttatggatgaaggctgaacattttaaggcatactaagtctcccatgatatggtaccttttcattttcccattctataccctgcatctaggcttttaaaaaatataccacatgacttcatgcctctaggctattgctcatgccacggcatcccttctgggttttttcccctctttatctacttggtgaatttgcatccttcagtataacacagctcaacataattctatgcttaaactttactgaaaatgcacaaggaacttgatctttctttcttattttccccattttatttattttcccattgcatttgggcaactttcatggcaccagttattttattaattatttgtataaactagtatgagcctattttgtttagctttctatcaccaggagccatgaagcactttgaaatcaaatactgtttgtacttgaatatattaagtaagcgtgaggacttaaattaaactttgttcctctttaaaaaaatccttaccccaactctagcactgattctatgttattgaagcttacaatctttatgtcattttctgtcatcttttctgttatgagaagacctaggtatgagtctattgcctttattccttggccttctttgcaagggtatcaaagaacactgctgcagtacttcctgttctacatagtcatgtgacttaagcaagagcatctgccagccagtgaggccccttgagagcctggttaaacatgggactgaagggttaagtgaatcactttttattcatgttgaaatatgaatgctgaagtttggaaaattttatatataacattttaataactaaaaaaacttgacttaggaatagtgcttatattaaaatcagtgtttgtcattgtttcatgaagtttttacaaatctaagaggcttaagagggatataatagtccactttgctttagttgtgttttacttgatattactgattgctttaactttgaaacacagaacaatgctatagtaagaatgtagtatactactctattaacccaaaacataatatagataggtttattgtatatttgtggagaaaagtttattctaacgttctttttacaaatagtaaaaatgctatttgtaggatgctctgatttttactttttgtaaaaagaacattgtctttttaccccaacagaaaatggcaagcgttcagctttctttgggaatccaaaatctcttatgaggcatattaggtatcacatgtgacataagcaaaagcctgtgatccttagcatgttggaaagttgctactctttaggataaggttgtccatgatgtctaggtcattccattcagctgcataaacaattcctttgatggatggctggttttctacaaccccagcattattttagcaggagaaggtagtatttgatgtgttgcaatttgtgttacatgcccatggaacatctctggacattacctcaggaggaggggttaagagaaggaggagctgtggctgaagacatttaatggcagaatgaatggaaattcaaagatcgctgtgcagtcagccttaaacactgactgcacccctcccagatttcttttacattaactaaaaagtcttatcacacaatctcataaaatttatgtaatttcatttaattttagccacaaatcatcaaaatgacgaggattttgacagctttcaaagtggtgaggacactgaagactggttttggctttaccaatgtgactgcacaccaaaaatggaaattttcaagacctggcatcaggctcctttctgtcaaggtaatacccatattgattgtttctgataaaatactatggggtatagtttagcagtgaagcaaaggtgtcccttacaaggcaaatacagttttgaatgtagctctgaagtactaatgtattaatgtttcctttactgtggaacctactgacttagcaaatgctaatttttatcttatctgagtaacatgacagtaatttttacccaacataaagaatgatgacaattcttgtgaacatgtaaaatgtaagtacactgcttgaaaaagaaacatcttttctttcatagatagctttctgtgactagatactattgcttacagtttggatttaaaaaatggagctgcttatatgtgtgtgagccacattatggtacacagtgtgttaaggtctgttctataaatagggcttactgaaaagttctcttttgaaatatcatttaaacattttaaaaacataattagaaaatatgtgtttttgagatttgcaggtcatcatgtagacactgctttagctttttccttttccttctggctgtttttttgggcaggctaaacttattattttcattttgtagagtaatacatagaggcagatagcagctgataattctgtccctccacaggtatctataattgagagggcaagcccaggaaagaaacattaattgcccttcttcctgccccccagcattgaattatgaaattcctgtaggaacctctgctccttcctgcaactttatgaagacgttcattatcagagaagcctgaagttactccataggaactttgccaatgaaaataatctttagtgactataagtttaagtaattatattagctttagatatattgcttctttagcagcaaaagctgtaaaatttgaaatagaaaaaacaaaagaaaacctctgtctgttgatgtgaaaatgggaactcacagtttggagtgttctgcttatactttgcatgctcattgagttgactaagcttctattgtttcagttgctcaagtcaggattcagtggggttttggtcctgacacctgcaaggccaaggaatattcatagattcctgtggctgccagggatagggatgggaaaggaatgggagtaaaagaaaaggaagagagatggagacagggggaggggaaggggagaagtgtgagggatgggagggagagagagagagaaagagagagaaactagctcaagatcccaggagaaaagaggaaatacatatagtagccttagtggtgtgttaacaacttcagcctttaacattgagaagattctaacaagagtataggaaattaccattttaaattaagaaaaccagaaaggaaaatgtcttttatgttgttacatattccaatgtatccaattttactctttttaaatggacatcatgttttaaagatagttaaaatcattaggatgtagttacataatggccataaagggcactgggagcagtcactaaaggttagtggcattatgtctagttatatatattttcttgaatttagcttaattatagcaaaagaatgggaaaggagaatattctaaactaacatcaaagacattgtaactagatgtaaactatgagaatttattgttagtaatacctcaaggtactcatgtatcagttcagagaaaatcaatagtaatgaaagttatcccctatgattatatgtgccatctaatacttcaaagttgggtgacttggaatatcttcttctcactctgtgagaaggtaggtatgtaggtaaggataggtgcatcttcatcagaccccagaaaccgcgaaattgagtacttacttaaaatggcacagatatgattgaaattagaatccaattctccaagatcacaataagtgctccatacaaccaccaccacaatcacaaccacgacaaaatggtctaattatgtggatggattactgtgaaagcagttctagctcatggtgacagatctgtttcaagggtctgtcacagtgcacagctaagaatgacaaatttgtaggagcactaagccatcatttcatggtgtaaaagccattactcacactcaatcattactggccagagttttggaggaatgccaagcacaaaaaatagaagttcttgaacttcacaatagtgaattaaaattccatagaacagcccaaggggacttgtgttattattcagttattgtgaaatagtcctctatctacttttcttcctgccttcactttaaaaactcaactgtcttagaaaaatatatccaaatttactatttttagatggacatcatattttaaagatagttaaaatcattaggatgtagttacataatggtcagtgaagggcactgagaacagtcactttaaaggttagtagcattatgtccagttatagatggtaaatggattgggaaagacaccctgtagtcacatctataatcattgccctgtaaattgggttgctttttcgacatatttagaggtttgcttttcctctctctttgatgacagagacggtgggtttgacgacagcaatgacgcacttataattttatgtggcccttccctgggtatttgtcagcggctaatatttatagagtgctttgccaatcggcacagttgtattttacttacaggaaagaggaaagaatttcaaggtgctctatattttaaagaaagttgatatcaagggtataaatgatcaacaaccataaaatactaaatactaaaaagttttagataccataatctttttccattagtactgaaaatgttcagcactcattattacattcagcaggctgtaacagtgtaatagtgggatatactctggattgggcacaaaaagatctggaatctaacccctgttatgcatttcctaatgccctgttcttggacaagtcacatattctctgaacctaagttttgtcatctgtatagtgcaaatgatgactgatttacttgacaaattatgtgattgtcacacatgaacaattctcaaaaatctttaaagttttaaatttaaaccattaaactgaacattttaaagcaaaaactggatatttaaaaaaaaattccattctatacattttagtagaaggacttagtagagggttagatcaaagagtccttatgttttttatggactacaagttgttgcaatgacaaggtatttgataagaattctcaaatatttataataatgatttgttcacctttgccttaatattaaacatctctaagaagatatttcttataataaatcagactcaaggaaaatgaagcaaataatctttttttttcagtatggcaaatttaattccaaaaggcagaatagacaccataataacctatttcattcattcattcatttattctttaataaacacggaacctctaccatgggagtatacaggaagaatgataaatagaaataagtggatcataagagtatagtctctgatttcaagaaacttacagacttcagaattctgagttcacaagtctgggaaagtcatcaaagctaaatagttttatttttacttgcaaatgaatttggaaatcaaaagtattaaattgtaaagcttaagttccctatgaatagaaaagtgttcaataagtactccttctaacattaatccactcattttttaacaatggtgacctgtgttataattaagctaggaacctaacaatccaagtgtcctctctgatacttcagctacgaatgagcactggtagtcattatttcttttgaaaggcattcatttttaagattttatattctgattttcacatagaagtatctatttagttccgtcttgaggagctattgtcatttgattagaaattggcaactataaaaactcctacaattagaataatttacttacattgtagtagctttaaagatagtcacaggaaatataactcattatcatattggagcctctgtacacgttagatgtaagagtggggatggggttatcacacacttttaagaataactattttattggacttttactacatatagacacattttaggacggatttcatctatggcaaactacatttttgaaatattaattgtgttcagtcccaaatgagctgttgcagaattagtttgcctgatggacaactttacatacttttggcatgcaatacttctctaattgggagatggcctttcttttgaacattttaattttttccattttttatatccccaattttctaaaatatagattcatttattagtcaccaacaacgccttgacattatgagcttcttgacataaaactcttgaaaaaactatagtttaaatgtcctagactaggttaagtgagtgaggtacctgagatgcaaaatttaaggaggctgtcactgttagtgtcatggtgtatctctttgagagttaggccctaagcacatcactcagtaccctagtcccagctttgggtcagaagctaagcattctggctgtagaactgcccaagggactagtactaatcttgacctgtgctttcctctccctcattccaatttgctcatgtctagccagactttctgacgatctagaggtgacattaggtcttattgctatggaaatggagactattcctctgcctttacatctgtattagactttcttcatatttccaacctgttccaaaaattgaggggtgctgtagaaagttttcagtatctcttaggcaatgggcatgctagaattcacttcaagccttcaggaggagtttggtatgctacgctgactgcccttgatgggatttgtatttcctggggcatttgcaatgacggaggcccgaaaaaagctgcgcgggccaaggtcaaagtttgtgttaggctccttagccctagggatctttagcttccatttgattttcttcatgtgatctaaatgagttgaacttataaaaatattttcaaggctactctgtttgctttttatttttttcaacttgttaaatgctatacattgatcttttaaatttcatagggaggtaactgactaatttgaagttctcataaatgaatcaatagggttgctacattatgaaagaattttactaagtttcttctataatgcagactgaaatataagaccattttaatttatcaccaccatacagtaaaaattagcttatgatatgtaggttcctccaggattctgaacaacttgccacatagcagatgctcagtaaggcatattaataaacctacactttatgaacatactttgtaatgaaatttttataaatgctgtattttatttacaatgagaaaccttattagaataaaaatgattcataaatcttaatcttttgtttataaatgttcaaacataaaagtacttaagtaaattaaccttttgattttgtccccttaacattggcttatgtttaaccaaagaccgatgacttaatattaacttggaatgttgtaagattattaactgagaatgtggtaaggcctaattgattactgctgttacagtgcttcagaattttgaagtgttaggccttgtaactgcagagaagtctcatgaaatatttcaaagacaaattgtgctgaaattctaaatttcaaaaatccatatcttaatagtgtaattccaagaataaaagaataagatttcatttacttgattttaactttttaccatattatctacacaataattacctgaaataaattctggctttaggctttctacttttcagtgcttagttcagatttattttttaagaggatgagtactgaggcgaactaatagcttagaaacatcaggtaagccagaaagcacgtatgttatatagccttaggccttggtgaaaatggaaaaaaaacatgtggggcctctactttttctgaagtgcaaatagtttacgtagataaatgattcaacagcaataccataatcccagagtaaattattttcatttttactactagctcaagggaattactgacttttaaatggtgtttttttttttttttcaaaccttttatggaatctattgctgaattagcttaaggctttacaggcagaacattttagtggtggagtctcatatctaggagaagaaacatttctgttcctcccatttcacagatatgtaagtgctgaagttaaaacaaggacacatggatgcctgtttttgtacgtaaaacaaaatatacattagcaaatttggttagaattttaattaggcttcaaacaacagatggatctttttaatttgaagttttgttattgtacttatatacccgatgccatagttgtgtttaacctggcttcagaatgttctaagtcatttcttctgctgttattttattgcttactcaagggctcatttacatactgaatgttatggcaatacgacacaaatttgatttttccttttctttttttgagaataggttgtttaaatcaaagcataaggaaggattcttgctttatatggctgtcaacaattatataaataggacattttagggcaatgctgtttacagttgacgtatttcttccatttcaacctaaatattgtcatgtgtttgtaacaaaacatgctgtttttcagtttcaatgtgtttcttcctcttatagtcctgtaagctccacatatacaaaagcctaatgcaattttaggctgcaagaaaagtctcattttgacttgttttccatcttgatataaaagacccgaagaaaactggttcgaagtaaaggatcgatgtccttagaattagttcagaatgctgatgggttgtgaaacaatacatgagcaatgagtagatgatttttaataacataatactgaatgcaaaggagaacctaacaataatgataaacactaggctgcttcaaaaacttttatagattaaattacaaattatgtttgaattttgactgttacttcctaagactaagccctctcaatcagtttagcatagcaccagggacagatgctcaaacctttttcaaggggaatgtagctgtgtgactctcattaatagctgttgcattattctgattctggaaaacactttgaaacatctacccttttaaactgaatctcagactgagtattaaagggtaaaattgcagtcacttatttgtggtcccataaagtttatgaatcatcttactaagaaatgaaaatatatccataaatgtaggcttacaatgaattttaattgtgaggaaaatttaaaacccctaaaagagatgagatttttagagaaatttcagagcttgcagtattctatcttgtaacatcattagaacattgaaatattgtttgacaatggtgaaacaataatatcaacatccacggcagacaaaccaaaacaattgagagtttattggaatttctacttatatgtaaccccccctcacaaaaatgtattttcattaaaaattacttataacctgtgaaagaaatctcagactttacaaatattaagaattgcaacattaaatttagttaacaatgatttttttttttttgagatggagtctcgctctgtcgcccaggctggagtgcagtgctgcgatctcggctcactgcaaggtccgcctccggggttcacgccattctcctgcctcagcctcccgagtagctgggactacaggtgcctgccaccacgcctggctaatttttttgtatttttagtagagacggggtttcaccgtgttagccaggatggtctcgatctcctgaccttgtgatccgcccgcctcggcctcccaaagtgctgggattacaggcgtgagccaccgcgcccggcctagaatgctcattttaaaagtaatataggaatgggggccggacttggtggctcacacctgtaattccagcactttggaaagccaaagcaggcagatctcttgaggtcaggagtttgagaccagcatggccaacatggtgaaaccccatctctactaaaaatacaaaattagctgggtgtggtggcgcaaagtgcctgtaatctcagctactcgggaggctgaaacaggagaattgcttgaacctaggaggcagaggttgcagtgagccaagatcatgccactgcactccagcttggtcgacagagagatttcatctcaaaaaataaataaataaaaataaaaataaataaataaataaaaaataaaagtaatatgagaatggagatcatatagctatttttgtaattcagtttaatttagaaataggagtactaaataaaattataaagtaagattaaacatggagcaattacatatacataggaaaattccgttttagtccttctaaatattgtgtgtgaaaaaatctgcagtcttatgaatcttcctccaataaattttctaacaaaggaaacatttagtattactaggccgtagagactagtaatttaatctttaatttttaaatttatatgaagtaacaagagaacacaatttttcaccgcttattttataacctgattggctcccagattcacaatacgtgtaggctccagactaaaaaatgccaaactgttagtggaaagtaaccttaaggcatttttcttgatatccatattagctacaatccttggcctatttctttggagtatgtttacatgttttatgaatataattacataggtgggagaagaaaaacatacaaacataatttcaaaaagatggaaataatgttaataattgcagccacaatttaaacatattggttcaaaagtttaaacgtatttctttgttttatgagattcaaacaaaatctcataaaaacatgagatttttagaaagtacagaaaaatctctctctctgtatgaattttattttaggcagttgcatgctaaacttgtgcttggttgttcaaataaagtgaatgttcacatgtggactccactcttgaacatcaggcaacttggaagtaacattaactttggcataaggactttgactgatcatttggtttaagtgcctagcatgacttaggttctctgtaaacaaatgctgagatgatgtttggggagcatgctctctattagggatcagcatctgtgaagcttcaggaagtagaactggacagagaactaaactgtaatgcagttttgataaagccttggccaacgggataggaagctgctgcccaccagactttcctggatgtggcctgaacctttctatccaggcctaacttagacactggtcatggggtattccaagaaagtcatggggcaatgcagccctctacagctgagatagaccctgaaaaatttgacagcaggagatggtttgctgacctcactcctcacagcagggcagcaagtttttccattattaatatgaataattatctatgttatctagaaattgaatcctccatcactggggaaaagggaggggggactgagaggtggatctccttattcatcacagcatctagggttccaacaatcttcagtgcttgagaactcaagggcctaggatcagtgcaaattgttctcgaaacctgctgattctcctcagattataatgactcaggtaattcatgacttgacatttcactttgacaatttacagatttatagataggtagttcttggttgacctgggcctgttgtggcttatccatggcaattttgaattaaggctcttataaataaatttaaatagagttcatgcttaaatttcttttaatcctcacttacgaaattggaaagcagaaataaaagtaagcttagaaaaagaaaaagaggttataagtcaaacagactgggttcagaaaccgctgctcttccagttgctaatagaatgatctttacttctctgaggctcagttagttcaagtgtaaaatggagatttcaatattacctacatcattattttttgtgaagattagatgagaaaacccactaatggctttaaagatagtattcagtacgttcatgttaactgttattaaggatgtcatagggaattgatcagaatggagttctcggtgacacaacatgctcccaaaccttacttttccaacatagcttcataattctgtttgaagtaagatacctttcccagaacagtataaatttattattcaaatccaaattctcaacttatttgtacaactgcatatagactttaataaacatagataattatatatgcaacccagtttatgttttaataggttatcagtaaagtaatggcagaaggtagaaataggatagtgacaggtcaatctacgtctaccagacatgcttaagaagtgttaacgctttactttatccaaatatcagtattacagcttttttaagggaggtattttaacatttgaactcacactagtgtaagtttaaagtatacgttatctttaattactatttccaaaattaattataccaacatttactgaatgccaaagatgtaccaggattatacatagatctcaacaacaaaaaacagtaaaaatataatagcctcagtatttttaatagagggagaattattattagttataacatagttggggacttggtatagaaatgtaatattgtaagcatgagaccacatcagtgaattaaaacaaacaaattttttgctgacatacagtaaaatttggcaagcattttagatgaaaagtaaaggaagaaaaagagaatgtttgggttatatatactgaatgcagctttattcttttccctagtgatggaggattagatttctacataacataggtaattattaatattaatgatagaaacaattcatgaggaaacctaaagaatgacatttagaaatcacctttttgggtcttcttctgaaggcattacttatatgacacctgaatggtagaagaaagcctaagggtactttttgggcagcaattgccacccagccttaactcattccttactttcatcttctatcttttagcatgaactatacctatgtgaaatatttgtctttgctttcaagaggagaagatgaaaattagtaaaatgaccagaagtcagtgagcatcaaataactattttgaaaacaccatagtgtcagcattgtaacatgctaatatcacataatgaagtacatttctatgcattcaccaactgtgtagtgagaacattactgtgtggacaacagtgggctatttcagtggggatacagcatggaattaggcattgtgttttccagatgtaacattgagaagttaaaatctagtacggtagataaatacctttagcaattaaaaggtaacacacaacagtatacaccaaatgcagtcagtggaagcacaagaaaatcagtgattaattctgatttagtacacaccatgggtactaggaagcagtaccaggatgtaaaaggcaacgaggaagacatttatgcacaaaggactgacagagaggtggggaatctaaggtattccatatagagagcgagccagatgagaggactttgaatgtgaattgaggaatttggggaatggtgtcacccaattaatgtttaagaaagccttaactatatttcataggacaggtagaagtaaggagagactggaggcaggcagaacaagtaggaggcaatagcaggtgatgatgggatttttgtcttgggtggccatgcaatttcatatagtgtgaagttaattctaaaaaccaataggtaactatttattagttagagccattattattattagatactatgtgatgaggtagaactatttttaattggagtattatttaaataactagcctgtaggaccagatgtgacttgacagttgtgactccaagatacactaggaaaatatgacaaagggagagaggttgagactccaagaaacttaatatttaaggttttaaaatattcgtaagactaaccactgctagaaaaaacgttgcattagatatctacattttagataagttccaccaataataaaacaagtgaattaagaatttgaaacatggttaaaataaaaaattatatgcagtgtaagatgaaaaaattactgtttaatattttcagaattaaaagaaataatcaggaggatgggtgtggggtaggagagcatatgctttttttttctactataacttttcctctcttatcaaattcactatttaatcatttagaaacattctgctaaatactcagttgattatctgactaaagtaatttcactaaagtgtgaacaaagcttagtgacttgtctactctgtgctagccactggtataggctggaggtgcactagtgcaagaagcagacccaatactctgcctgcatgaagttcactttctaatgtgatgaaatagataataaaaaaatcactagatggtatgttaaaaggtaatgagtattatgaagaaagagcagaccaaggagaaagagggctggggaacatactgtaattttaaatgaggccatcaaggcagacctctccgagaaaatgacatctaagccaagaggaaggaatctttaaattttggatttttaatacaaaatttggcaagtttttttattgaaattttaatttttattgcttaaaacatcagtggaaaagaaagggcaaattctttggttaaagcttaatctctcaagggaaaaatatttatctttgtatttccacgtatttcagtgacgcctcagtgatatccttattgaagttttctctgttttgtaatccattcccttatctagccttttactaaacgagaagactggagacattcatccatttatctacagagcctagcaaggtgcttgacacctggtaggagttcagtgtctgagacttgaatgtctaaatggtcttattggcatatacatttttattaaacacatagggatcatgtcatgataaggtcctttattttatagaactcacatttatataatcctttggttacttttcctgacattctacaagaatacactcttcttttcattaagatttcctttgtacttccccttttcaaagtaagacgtgctctggcagtaggcacttaaattatacttaaatgttataatctaattcctagcctgtggacctctgtcaacgaggactgaggatactaaaatatcttatgatagtaacaaggtgatttcttttatactccttggaatgaaatagcatttggggaactgttagttagaagaaaggattccaaataatagctctttgttcagtgtttgtccatcaattcatagataagtcaattggcactcatcattttaaatgcatcaggggccagtgtagttaggagatatatagagagtactttaggcagtaaacagaggctttgtaacaatataatgtgtagtgggaaagaggattggaagatctataaaaactgccaaaagaaccaaaaatataattaaagcagcaaaaagacatattgaacacaatctcagggactatttcacgcaatagcaaatgtctcttcaactacagagatggaaagcaaaatagaaaactagtttcatgaagggagtgagaaaaataccaaacagaattgtaggaataggctcacaagtgttgattttcttatgctaatttttacccttctttaaaatgatcagaaagtgtctaacccagatatgggataatttgaaattctcagatgagaaaagagaaaagcaaaataaaaatataaacaaaggtaatattttaagcaagcatgtctcagagtagcacagataaactgatatgtagaaaactattgaaatttacagtctacactcaaattttgccaactaaatacagttggtttaggttctatcaaagttacatattatctaaatttttttctttttcttttcattttgtaaaagcatggaggtttacacacgatttcctcaagaacaaaaaaaacaatatttccagtagaaaatatttttcgatggcaaattttcattacttagacgagaggtttcacctaataaaacacatcagagttacctggggagttttcctaataaacacacttctattcagacccattagcagagatatttgcatagcttataataatctttagaaatacactgaatactatcactcttactttctaaaatcttcaacttctgtcttgaattgtaattagacaaaaactagcaaattaaaacaaaatttagaatcagaatagcacattatcagaagaaacatgcgaagctgatttcctggatacagaagcagaattcagacttctgtattaagatcatttcttccatagaagtctggtttcactcataataaataataaataaataaattattgtggtttcctttgtgctgagtaactctaaagtatttttaaatttagtgaagacaaactccaactatttaaagtgtcaagcttgagatttcaaacactgggtcgaaggaaatagataaatctttaactcaaagataatttgataagcctagtaaaggacaaaatatttttggctaatcttgcccaggaacacacgcatatgctcactcacacacatacaaacacacataaaatgtacagtagagtacattgttcaatctttctcagaaatacaaacttgaaattcacatatcgtacctctgatttaaaaaaactaataaaattatctgttgagaggaacatcttaaacatatcctatcaattttaatggaaaacactaacatagttttgtgtgtaaatgtaagttaataggtatacacactcacacataaacaagacgtcggaatatagtatattggtttaaaggtaatcaagacattattttacattgcagaacacaatcattctaatgacaagagacttgggtgctttggatctaaaagaggcatcttatttctacagagagaattattatagaaaaataacgggctttcttcattttaacatttgaaaaattgagtgcatgttataaagcaagaggaacatagaaacaaaggtctagaaatcatttatggagttcctgctgcctactaaagtttgtgtgtgtgtgtgtgtgtgtgtgtgtgtgtgtgtgtgtgtgtgtgtgtgtgtgtatgtgtaatgggagtggaggtggggtggcaagatttaaaaggattaggcactttggcctcagtcctaaaactgtaagggaagtaaaatgaagaattagtatttttttttgtcttcgatgactacacttaaaccttgcagaaagaatagcacaatgaactcctttacttcaggaaattcgactcatggccagacttcttttctctatatgcctgtctatccccctgactgctgattactttgaaggaaatctcagatatcatactattttatccttgaatattacagtgtatatcttttaaaaggcaacaacttaaaaatgtaactacaatcctaagaagatcaatcttaaaaaattacttagtataatcaaatatcaatttatgattctaatttcctcaattattgcagatatgtttttctttatactttaatttttaaaaaccacattctaattagtttgtcctatagagtttcttagagaatctgtattttgtctcctaaggtgtagttgaaaacatttctctctcccttgaattttacggaaattgagagttagatttaaatggtttcaacaacagaatttagagtatttataaggagtagatgatgtctgcttcttaaatgtttttccagttgtccctcttcttagctaagaatttggtagacactggctcaaagattattatggcaaagttatcaaattccgaatgccatagtatagagaaggaagtagacatggatataattaactctaataaaaaagcaaaatacaatatacttctagaatgttccacagtgcttggttttgtgtcagcattaagagagtgataaagtttcagtttcttcatgaacataattctggcatggaaagggcaacccttgggacaactccatcaaacacaagagctctgtggaacacagtttgatagataatcttgaagattccttctggctctaaatctcagagtgatgatgagctgtatggtacaattcacaatgtttttgcaaactcatgaactttccttaaagctattcttgagcaaagctagggaatgataaaggggaaaagacagatacataacatttcagctaaagtgaagtatttctggcttgttaacaactctacaagtaaacttagaatagacaatgtatctgcatgcttcagttcctcttccaagaaaacaaaacaaaacatctgccagttacaagagctatatatttgaagaaaagtgacaagtaataggaaagcaactggaaatctgggcattatggtttcattaaatatactgtgcctttatttaatatgtctgtgtattttacctttggaatatttttgtgtgttttgtattatgtattctgctaagattcatgcaactgtttcttcaggcacagacagcacacattgtcctggaagatggaactaagatgaaaggttactcctttggccatccatcctctgttgctggtgaagtggtttttaatactggcctgggagggtgagtaatgcttttccaaggctttatttttcctctagtagagaaataactggaagatctcactcatggtggtaagttgaaatcactgcatcgtagtaagactacgtattgtcctgaagttgcaccatgccttgtgcatagcctactgctgccgtccttgaaagaaagttagacatgaacttcctgctactgtaaatgaaagacaacatgggcacactggtggtcccctggataaaaagaacaaaatgaattctagaaacttaggttgtgaggacacaggttatgtgagattaccaaatggtttctgtaaggggaggtatgggtctgattaaggtgaaaatcggagcaaggaaaagaatagatagtatattctagtgctatttcattaggaaagaatcaattttgcacatctaatatgaaatactataagaagattagaaagtccttgggtattttatataattttgcactctagtaagaaagttgaaataacagatacatttattatctttaatcaatgagggagcatctgtgtagatctaatattttcaataattatcaactgtgacctgccttagtatttaagacctgctaacatgtacagcaatgaaaacgagagttgctacagaaattaagtggctgcttttacctagttaataaatgtttgttcacctgggaatcaggaggctgaagttctagtctcaattctaaggataactaattatataatattgggaacatcacttaagctttttgagttctagtttcttcatataaaaagtgagggggttggattaaatactaatttacagctggggatttaaacaattatgtgtcttaaaaacatgactagattgattgaaggggtttccaatacagattcaatccaactagtattctatgaaatatttgataaattctttagagaaattcaagttagtctcataaagacaagggggcattaggttcactgatactgaatatactaattgaccaaacttccattatattattaatttatattctttcttaaactcttgcctccctgtgtgaaatgaagaatattagaggggtttttaaatagttccactggtgagaacattaaattacagtgtatgaaatctgtttgcaaagttttgcttcaccaggcaattatttaaacttttcgacagcactaattactagctgtgttaatatacctgccaacaaacaactgtttaatatagatcagcatgatggagggcactagagttttcttctctgtgatagtttacaggtaataaatcttgtcacatcacaaaagtcaaacaggagctgatggattaatttgctcccaacactgtagttctctaaaacaaagtatatttattcatttactgaagagtattgtaagcatatgtttaaagggaatggtaagttcttttatggaaagaaagaagaaagagaagtaaaatcaaattaattaaagtttttttttgatgtaggaaaaggtattcatctataagattagtccatagaccctattttccattgagaaatgcttctttcattcattacgtgcctcactcagtaaggtggttgataattaaaggggttattttgtttttcatctttaagcaatgcatttatattgtgggcaagccttggttaaaaaattatcagttcctgacagataagagacatctgagaaattagctgatggaagctgcggaaaaacaccacagccctcgagtcaccttagggattgcagagctgaaagactatgtattttgttgacaaggttagttctggtaggcgttagtctggatggtgttgaagaatttatgttgactactgcctgcgttaaactttattggtttcaaagtcgttgattctgtgcccctgagcacctaaattcactttcagttgtaatccacaaaaaaggatttagcttaactcattttgcagaaagtggacatggaagagagcaggaaaaaaacctcaattgcagtgtattccagtgcatggaaaaagtgtagatagctcctggtattcatgggaataacgtttcttcttcttaagaataagaaatatgtgtgtgtgtgtatatacacacacgatatgtatatgcacacacacacacacacacacacacacgatatatttgtatttttcctctcacccaaacttaaaaatatagccctcctgcattcctccctaattccatatcagtactttaaaatagttagttggcatcttttaacttagaagtcagaaatccctcaagtcaagtctgcgagatgaatttttttctaagcagataataactttcaaacttatatgcttctttctaaaattaaaatattttaaaaatcaactttattgagttattctttcatataaattaactcacttattctaaatattcattgaattttaataatcatatatactcatgcaaccaccactaacacaatcaggctactcttcagtatcctaaaaaatatcaagaaaaacttttcaatgtttcgatggttactatcttggtgaaactggcagccctcaacagtaaatatcagtttgggctcaatgatatctggtaggccagggaaatctttagagtatctgcaaactttaaatagagcagggatattttaaaaattaagatgctagcaagggatttttaaaggaattaaaaaatttaaagaaattgagggaataaaacttatatgaaaatataccttggtactcacgagttggtttttctttatatcaatgacatcgtggtataaatttttatattctgtcataacatttccccaggtacgttaaaatctagagacattcttgttggattcttctcattttcaagggttaaataattcagagcatgtatgcagattatagctttgtagttacatacattatttgctgataattttttggcatgtttacccaggtacccagaagctattactgaccctgcctacaaaggacagattctcacaatggccaaccctattattgggaatggtggagctcctgatactactgctctggatgaactgggacttagcaaatatttggagtctaatggaatcaaggtagtaccagtggtggccatttaaaaagtctcaatttgagggagtatagttgacttattcttaagaattaggatggccaaactttcttcctcaatacggtagtacaaatcattaagctcatgtattcaatcttattcctaggtacatgagaataatctttaacttgacagtattttgagtttcatttctcagggcactttgaattttaatgcgttggatgaaacttggcttaacttgaaaaaaatgttataagttcaaataacaactatgctataaaaggattggggaagaatcaccttttaaaaggaatttggtaatgaattctgtatcaattatttgctttttaatcttagcctctaggggatgatttaaagatagcttttatgccagtctaaaagtaaacatattaagatttcctaaacaaggtaattttggatactctcttaggaatatatatcatataaacaattcaaaaatttatattccaaattcaatactattttttcaccattccatttttgaatgacttcaactgatcatttaacttagttttcactatttctcacaatttcccatcaattttttctctgctttaagtataaattaaaaatgattttgttcatcatgtgcattaagccagtaattattaattaaattcttgataaatgccatgcatgtcagaagggggacctagtttagtctcaggatttaccaagccaggtaagcctgctccctctcaggataattaatgcaacaattacatattttaaaagaagggcattgatttttttttttttgcctcttgtttttaaaaatcctaagtctcatgtcagtggatatcataaaacttaaaaacaaatgcaaattgactcacaagagttggataatatcttgtgataacctctttaaaatgactgtctgtctttctaggtttcaggtttgctggtgctggattatagtaaagactacaaccactggctggctaccaagagtttagggcaatggctacaggaagaaaaggtaagaaatgtaatagggcatccatcatcacctaaggaaggttgagaaggtgcctgtagattcagaagtgccaagcagacagaggaagatcatgtagtttgggatctttgcatttcagagagggattccttctcttactacataaaggctgaaatgtctgaattcctccttaaatgctgatgagcacatattttcagtttatccactaggtggcactcatacatgcttggtagcacttcacatttgggaagggaggggtaagataaaattttagcattttctcttctctttagcaattgagtcttttactctccttcaccgttttatctagaatgtagtaatggaacttgcttcatgggttctagtgttctagtaccagctctactgttaactggttgtgtaactttgtgcaggtcacataatcattctatgcaatacttgcatcatctctcattcttatgagtataagcagattaccatcaagtctcgttgggcttcaacattatgacatgtaattatatataatttcatttgacatattaataatgtaagaaaagggttataaaactttatcttacacttttagtttaaatattaatttcttttcttttttttgagatggactttcactcttgttgcccaggctggagtgcaatggggcaatctcagctcactgcaacctccacctccagggttcaagctattcacctgcttcagcctccccagtagctgggagtacaggagcctgccaccatgcccggctaattttttgtatttttagtagagacggggtttcaccatgttggccaggctggtctcaaactcctgacttcatgtgatccacccgactcagcctcccaaagtgctgggattacaggctcacatgagccaccgcgcccagccataaatattaatttccaatgaaaaaagagcatttgccttgtttggatgttagaagtacttaagttaatggacctgcttcaattaacttcatctccagtgttgctgtagctgctttttgttcaactgctgggcctgtaattgacagaattttattctacgaaagtgctgcctctccaatgagtgtctatctatgggggctaaacattgctgctttctgaaaaataaaaaaaatcttgatcctggctctttagatctcattctttctaaattttaaaagggagaagaaggcatccatatcatatcctgggccatagccattttcttctcaactattatctgaatttatcttccttatccaggcagctaatttctgtaatcgtcatttgggagacacttctctccccccagcccccaacaacccaagctttccttttcctttttgttatttaggacacttgttctcatagcttttctatgtcagaactaatagttttagtgtaagcctaaccaacggcttgtaagttcgttttttaaatgtgctttgaaccttcttccatgatcacagacatgtagagtagaaaagaatccaagataataaccagttcacctccttcaatttaccggtgagaacaaatacattgcttaaacatttctcagataattagtggaagaaaaaaaaactagaacatgttttcattttttaacctctttttaaaaaaatcttattttagtaaaaagcctcccgtgggatagaacctgttttcttgattcctaactcattactctttcattataccacatgtgtctctatccaacgtagtcaaagaaccttaaaacaaatggtggtcctgcctgatggactaacaggatgatcatgttttagtacaacatgactactcaacatggcccttcagaaaaatgtgttgagtgcctactctgtgccaggaacatttggctcaaaacatggatttgcatattattgcttatgaagttcaccaatgtgatttaacttacttaacatcctgggttaaaagcaatagaagtgtagcagaagattgatgttcagaatttctcatttttttactctgagaaagaacctgggtattaagagtcctatgcctaactgtagcaacaatttactgtgttctgacaatacagtcaccctgggtcagagaaaagaaagagtggagaaattatttactgctcaagaagatagatgaggccaagtttgtaacttgaaaacaatatgctggatttaatctcctccaatttcactgtcactacaatttttttcttataggttcctgcaatttatggagtggacacaagaatgctgactaaaataattcgggataaggtataatcatcatctttagccaaatctatgtttcttcgggtgtgtgtgtgtgtgtgtgtgtgtggtgtttccctcagtgcctaagggatccattaatatgtaaaggagtgaatctggccagcttctgctatctgggtctctgttattttgttttactattttcactgtaattttcaagattgaatacttgattggtatgtttttaactgaatggacttgagattcattcacctggcagcttattgagtgcccactatgtgttcattataccaacaagtcaaggaatttataattcagctcatgtgatagaactttagtgaaacaagtggagaaggtaacaaattgcataacaattttgcctgaagtgaaaacctacatgctgaaaaatacactccaggaagtgtacagcattgttactgttatttgttttgtccttgtgaaagagttatttgtaaaattaatgcattatctttcatgaatgtgccaaataagccttgcatgcattacttcaattatatagtctttgttgagaccatatcaataaccaaggtgataaaagggaaggttatcttttgctttcagtgaagtctgattgctacaacatctgacccctcctctgagaatatctcatcaccatctgcttgttgagtttattattattttacttgaaatttccatattccaaatctgaaagaaacattacgtcactaacgttaactaaattccccaaatgcaactaaagttttcttactaaatataattacataaaaataaaaagataaatgacacaatttgaaactacacatgtgggctgggtgcagtgggtcatgcctgtaatcccagcactttgggaggctgaggcaaacggatcacttgaggtcaggagttcgagaccagcctagccaacatggtgaaacccatctctactaaatatacaaaaactagccagttatagtggtgcacacctgtaatcccagctacttaggaggctgaggcagaagaatcacttgaacccgggaggcggaggttgcagtgagctgagatcatgccactgcactccaacctgggcgactacaggaccctgtctcaaaaaaaaaaaaaaaaagtacatatgggaaaaggagtcttcaaaaaatttttttgtagatttcttgttaggatatatacatatatatattgacacaggctttctgtaaacagaaggaaaaaacagctttgaaaataaaaacatggccaaatacccatgaccagaaggaagacagtgagagtttatgccatcattctatcccacctctgattttattcactctaccacgattttcctgagaataggtgttagtgaaattatatatcccagggagattcttgtgttctctcagcctaatgatgtgtgtgagcagtaagcaatgacgaggctatgagggcgggaaaggaatacagttgggaaaatcaattcagatggcagaattggcaggttgaataaaatatagtcaggcctaatgattcaggaaaactttacaagaccgcacttgtctttcatgtgatatgttaggttaaaacgagccctccttttatcataggcagttaggttttcaaaattggcggaatagattggcacagacaaaacagtattgcctcatatttctttatcagtgatggtggttcatattaaaaatgtatattatggctttcacttctattaaccttaatttgaaaagtaagatcgtatttcattcagcatgttttaagaaaaggggaaggagaactaaaaaccaattttcaaaattagggatccataaatatagacaaggggttatgcgacttggattataaaagtaaatacaggccaccatgaaatgtagtaatctactatggaagtgaaaggtggtttttaggtagtgttcccagacttagaggcagcactctgaatttaataacagcactgaaacatccatcatgcttgcatgacacataggtactttctactctcacttacccccaagtgacttctccttcaaggaatacatttaaaagggaaatgaaagcttccttctatttccttccatgcaataatttcatcagagaagggcatatcaatgaattattttgaatttttacccctcaatagaatcttgattactaaatatagcatgccatttttctaagtagttcaaagcagacttactaacaaataagtaaatctcaagatacagctgaaaaaaggtgacattgtcgtgttcaagctagcaaggatagtttgtgaaaactttacagagggttgaacattctttcaattcaggcccataggaacacttggatatgaacatgcctaaacagtgaatattttcatttcaaattctagaagtttatgacttatgttgcatttcatcttctttgtgaattaatattactatcataatgaatgaattcccgctttttttgtgatttttagattccttattgtctcaatagattttttttgtccatttctctcatgaaatgtctttaggtcatatacgctgagtagtgtaagtttactaaatatcccgatttgcatcagcctggagcctggagacctgaattctgatgccttttgactttgccttcatcaggcaatggtgtcagccctagaagaactaattgtatttccaagagtatttcccaaaatgtatgtgcaaattgcttaatcttttcagtttgagaagatgaagatcttccatgatggttacgagtagttataaagacatctaagtcttgcagcagctgtttaaagtccctgtgagtttatcttgtcaacacctttatcgttgcttccttttaactgtctaatttttttaatttgatagggtaccatgcttgggaagattgaatttgaaggtcagcctgtggattttgtggatccaaataaacagaatttgattgctgaggtttcaaccaaggtgaggggttttcctttatattttgtagttttatttgatcccatttagaccttcttgaaatatcaaaatctttatttaggcagagtttatcttccagaagcaccagtgttcaggggtagaaagggatctcatagcagctaaaatacaccttacaaaatcagtgcatttaaagctggttttacttacaggcttacatgggaaacttcatgccccaatttagaggatttttactaaatttagtgttccttccaccttttctgattcttcagcttaggattttaacaatgtaaaataaaggaagcactgaattgccaaagataggtccagtgatgatgaggagtcagagctagtaacctgccagagagccaagagaattttacagaaatcaggcacagtaatcagaatctgggggcattttgtgcaggaaaaatatttattcatacactaaagatttattgtgttatagctttgtttcaaaattaatgttcgtaacgatgactgagtcaccctaaagtgaaatatctttagtatacatttataaaaaggtaaagaatacattttagaaagaagtccattggttttgattgaatatctactaatgtaggtgtgagtgagtttcttgagctacagtctctgtccttggggagcatagagcctggtggaacaaacaagcaagtaaatcaccatgtgcagaatcctgtgataaatgctgtccttggagtgttcatagcatgctgcaagggcatgcatggggcagcattgaaatgggataggtggatcagagaaggccctgtagaaatgtgagtcctgttttgagacacaaagagcgggtagtaacagtaaggtagatgaagaaccaggagaactttgtttcaggcagaaggaatggcttgccaagaggcatagaggtacagaacaacatagtatatttgaagagttacgcacagtttgggatggctgaaccaaggggttcacacctattggtttacacacttgggcaaggataagtggagatggactgactgaagctaggtctagaaggtttcatatcattggctaatcagcacttccagaaactattgtcaactcatttggtgtcattttggagcaaagtaaagctgaataaaagagcaagcaactagaaggttattgtaacttatcagaacaaaactcacgagagcctgaactgagcagtagtagcaagaacagatacggcaacctaggccgcttatacaaatgggaggaagaggggctgaatgaggtcaggtaaaagatcaccttactttctcagctaaggatttcaactagttaggttgagcatagtgattatgtcatttgatatctgagatgtttatgggatactgctatgaaatttttttaaagaaaagtttttgatccgctttgaaacttaaaggaagaattgctaccttctgtttttactacatacaatgggagttaaaaatagagcttctctttcctaggactatgtatttggttaccatggggctttacatgtggagaatttagccctgtggaagcctatgtggcatcacagctattggctggttctaccttggggtttatttatactatagcagagatggctacaaacttctcttccatcaccagtgtggcaatggaatttctcagagaaactctactttatccaagtagaaagtgagtgttattttgacaaaggcgattgaaattcttagaaaggaaggagtagaaaatgtacatgtggacgcaaaatttgattttaaatagatgtattcaccacaacattttatttctagatataacatacacttttttgcccatgatatttcataattatcgtggtccattcaatgtggcagctctggtcttcaaggaaaataataacaaccaagcttttttgaacactcagttaattttcataaaaactccatgtcatagatgaagaaactgaggcttagcaagtaagtctatttaaaatcaaatgtaacttgcccaagtttagtgtcaatttgaattcaagtgactccagagtctctgtggctaacctcatgctatttttctttccattttgatgggagtttgacggaaaagctttaaaaagctcaatttctagatttatgttccatgaattcaagaaacctcttcaagactccctgtgaaccaattttctatttggcctgcttcttacaaggcctgaatatgtttgtttgcttctctacgtagaaatcttttcccatgctttctccttccccttctcgcctgaagaagtcagtttcaagagtcagctcattgttcctttgtgaagcttccatgactcatctcacctttggatcccatgtcatttaataaatagcttcagtataacaaggatcaaattgcatttaactctttgaaaggattgtctctttcacttgtcttggttggctctttgaggggagaggccatggtttacttatttgaatccccagcactgcctatagtacctttcacatagtacatggtcaacaaataatgaataaataaaggaatatacaaagccagtaaatggtagttacagttggtggtaaagaaattgcacattcttattttcccttcaaatcctttaatcagtgtttcttatggttctatgacctccattattaatataataaaattatcattattactaataactgtaagtcttattaataaaaaataggcacgatctattgagtacttattatctgctaggtttcttctcaatgctttacactgattaatttattccatcttcagtgtaattatatgagatgggtattattaggaactcatttactgatgaagaaactagggtgtagagagattaaataccttcttcagtgtgaatggccataggattatacataggaaggcttggtctagtgtctgtctctcagaaaacatcatcccatactgcctttcaacatagtagaaataatagttatgcaactaacagttatactattagtaaccatccttatactaccatgtgataatattcaaataagtttacattgtttcactccttataccttttacatatgcagagtaaggattcaagaattttaaatcagaaatggtaaaatatgtgaatatgtgaatagactggaaactgactctgcttgtatgggtatcctacccgctcctgtgacaaaaccttgtcattgagagtctttagaaaggatgttcccatgcccttcctgacacctgttcatctgggaaatgattcatgttgtgatacagcaccaatcagaaggcgtatagaggacatttcataaggaagagttccagcgtgagagtttttaaaggctttaaaaaaagttattaaaagagtaaaacagtctgatcagtaacatgtaagactcagagaaaacacacattgatattatctggtattccggctcctgtcacgtgaaaatgagagacaaggattttgggttcctagaaattagtactgagtcgtgatgttcatgtcgggcagggatgtgcattcaaaacatgctgaagcctaagaagtatgtgttgttaaagaaaatcaattttaaattagatatgtaattacttatatgtatggaatttgatcatggtgtttgcaatactcacttctgatttttaattttaaaattggtcccattcatatgacttccccttgttttacatatttccctgtgaaatgatttagtttgaaacacagcatgatagagggtgatgatagatgatagaatgttagaattgagaactgccttggtggtttagtctagcatttcctaaactggaaaacagtggtgtggagcaattcatcttaaaaaattctgtggtcaagcaaggttgcaaaatgctgcataagatattcctctctgttaagtccaagcacaaatccatatatgcaagtatccatgaggtcttgtgtaacttctgttattcttatggacagtatttaatgtgtttgtgtagagaccagcaaaaatgagcatatctgtgtttttatctgtgtccaatcaagggagatgctgcagtggtgaaagctggctcctttgtttcttaatgtcagtgcaattaaataatattactatagctatgataaaatgcgtatttgtatcaggagattacatatattttgtgagttttgtttgactacatgccttggaaatgttgataacttcattcattatcttgtaattacaattttctgtagctacaactagatggtaatattgctttattttacatcagaagcctaaggttaagaaaagatctatactttttcaaattatttgatgagaaagattacctgtgacattcaattcagcaataactccccccagatcttgaaaggattagggtatttttttttccttcagaatagtcagtgggagaaaaaaaaccccagatatagtttatatattttttcctcaactacagtctaaggattataatttcacattctatacagacttagtggagaggtagatatttcagtcaaaataaactgttctttcaaatactcagtttgtacttttcatctgaaaattttcacaaacgatgaaatcatcctaaattcatagcgtgctagctaactctcaaagcaggaaccggtgtgtgtgcccacccttctaggctttctctctattatttctccttttatgactttggggagctgcttcttgggttaatgcctgtgaaaatagatctgcctcccagccgtgcttcagacatagataatgattatgatatgctctgggatctttttatgaaatctaccatttaaatgcaaacaattgcacggcaacctaaagggactggtggtctatacctgcttagcaattcctgtgactcttatactgattttatccattaggcccaactgcagaagccttatgtacagtaattcagctttaccccatttgatctttactgcaagttgaggatcaagtggtatttaaagcatgatgtatctattgccacatctgtctagtgctgaatcaggcaataatgcttaaacatttcattgctaccagttgttaatgaggcaaaacatgagaaagatggttaactatgcatgcaaccagtttcttagagatcattgttattactataatcaaccgtttatataaaacagcaaagtctttttttctcataaaaaagatacagtctgtggcacttgttgtgcctttcttacaaactgtttgttaactgccagtcactccctagtagttaacaatcaatctgttaccaatctaagttcaaaacattgtcagatgtgtttatgattttggtctgttgcccatagctgggacttccctctcattctctggtttttaaaatggcaggatgtcaaagtgtacggcaaaggaaaccccacaaaagtggtagctgtagactgtgggattaaaaacaatgtaatccgcctgctagtaaaggtaagtaatttgttcatttcaaaggtgagggtttgtcatattgaccattagtgttcagctaatttcctctgtcacagagaaacttatgcattctttcagaatgtcaggggtctacattcttcttgttgcttttgatttacaaaataacacatttatccctgttcaaattaaaaatatagactgctatgttttttctttaaaaaaaaaacctcaagggccactaaaacatggaagaaaatgatgactgttcttgtcattaattgactgacagtctgagatgcatcatgttcactttctttgtggtatagagatgaccaaaaagctagagtctgtctgatagcatctcctttgggcttacatttattttgtaccacacgtttgtaggaatcatgccctgacagagtacgaactttcacattgtttttatatcaactcttagacaaccagttaaaattaaaccttaaaaattctcaaggagaacttaaccatcataataatgtttcttaaataaagttttgttaggatttttccttctcctcactcctctctcagtctgtctctgtctacacatctcccctccatacacatacacacacatacacacatatttgcataacaccaaattagcatgcgtattgggagactcttcatcgtacctccttattagagaataccagcaatattcaaatcatgatttcaaattcttgtcaattttattaacaaacatttgcatggatagcatgcatggtagcagatgctgtggatggcctgtgtatatctcaatctcaagttaccattttaattcatgttgcccatcttccaattgcaaatatctatatctctttgcctgatggctggagcctactggcaggcagtaaatggcatagaattaatgatctctggagtagcccccaaccaaagcacagaaaaagccagtgtttaaccaccctggctcctttgtcccatggataggcagtctctaaggtaactattccacacgggctctcagagttccctactgggcttaaacttcacttatccctagtggtaactacttgctaatgcataatttattggggtgtttcatgatgtcacttcctctctgtttagtatggaagtaccttccaaataagcttttgttctcttaaatccttgtttcaggaaatgcttcatgggaaaccctcaaagacaccttcctatgtgcttttatattaaaagaaatttctaagttttccattcgaatataaatcttacagaaaatgagaaaaccctaggaaagaaggctgattaaaatttgataagactaaaaggcaagactgaaaaaggtctgacgtgggccaacttaacattttcagaaaatggatttatatctttttgcaactggtcgtgtgaaggtaacctactctcctgtcagtccagtcatggcatttgtaggcactgaaacttctcttgagtgcaggagagtgcattatccattttttcaggatcaaaacttttaatggtgtttatttttatttttatttttattttgagacagggtcttactttgttgtccagcctagagtgcaatggtgtgatcttggctcgctggaacctgtgactcctggactcgggtgatcctcccacctcagttttctgggtagctgggaccatacctggctaatttttgttttatcttttttggtagagatagggttttgccctgtttcccaggctagtcttgacttcctgggctcaagcaattcccccctatcttgagcttccctatgtgctaggatcaccggcatgagccaccaagcccggccccaaagaaatttttgctcagcattatttattttaaatgtttacaaatttttccttccctttaaggaatggttagtcaagagaaagtctagcaaaattatactttggcaaagaaacatgttattaaattcatcattcttgtgtctcttttccagcgaggagctgaagtgcacttagttccctggaaccatgatttcaccaagatggagtatgatgggattttgatcgcgggaggaccggggaacccagctcttgcagaaccactaattcagaatgtcagaaaggtgcaatgaaccttgaattcatgtgtatctgtgtgggaggtgggggcttccgctctataccctcaaagggctgtgatacattttatttattcaggcatttttcaatgctggtatttgtgacttctgaggcagtgtcagtagagatattctgtaggggaaccaatgaggagagaatatcagagaaaatagggtttttcttcaggcaaagtaacttggggatcatgtccttgagttaaaagaactggagtccaatggccaaatgtattttgctttacagttttaaaccgacaactcatggttccttatcatgaccttgggacccataagacctgcaggtctctaaagaaatattaaattagatttagtttagtttgaatgtaaagtacatcttaatgaattataatgctacaaatttgtcaattatgtccttttttatattcttctttaattcagttactattctctttaccttcttaagaaaaaaggatacctcatttttgttcattcagaagcaacattttttggaactgtactaattggttaataaaaattctccctgatttagattttggagagtgatcgcaaggagccattgtttggaatcagtacaggaaacttaataacaggattggctgctggtgccaaaacctacaagatgtccatggccaacaggtgaggtattttcacttttgcttacagtaaaccagctctgacatactaactaaatacaaagaactcagagcacttacctgccatttctttagagtaaataaatgcacatgtaccctaaaacttaaagtataataaaaataaataaataaataaataaataaataaaataaaaaataaaataaataaccataccttacgtggttgacagttgtttgactacctgataccacttttgttgcatttttggaaagcagccttctctaatgataaccttgctataatttaaagttattttccttcccttggcataaattgaggttataatactcaatcaaatgatattccaagggaaattgttctgattttaagcttgatttcagaacattgtaacattttaagaaggtaagtgtgacttaagagccgaggaacctttagatcctcttggtttctcttttttgcctcaaacaatattaatttattaaacatcaggctttttcccatggcccaccctctacataaattataattcaggtctgagcagtcatctctttgttatctccctataactctcgggctttaaaattattgtagttctcttaaagtaagtcacttatatttcttagtttctgttaagccggtgagcaaccctttttgttatgagtgcaatgcccccctttctaaaaccgattatagaatttaatagacctgcgtatttaacacacaacaaagcttcctgaattgatttttgttgggaaaattactgggattaacaatctgtgacttttctcacagagtgattttcactaagcaattgaaattttgaattttaataggctttacttgttcactactttataaggaatacatttatattattctcttcacttttccttttccctattctttttctccttttctctccagagggcagaatcagcctgttttgaatatcacaaacaaacaggctttcattactgctcagaatcatggctatgccttggacaacaccctccctgctggctggaaaccactttttgtgaatgtcaacgatcaaacaaatgaggtaaatgatgtcaataaacctgttcagttggtgatgagaaacgcagggcttttaaaaataattgatacataagcattgtatatatttatgagatacatgtgatattttgatacatgcatatcatatgtaatgatcaaatcacactaggataaccatcacctcattttttatttctttgtattgagaacatttcaaatcttctcttctagctgttttgaaatatgcaataaattattcactcagaatattcacccagagtttttaaatacactatgatgcaaatacctttctcctgtttgtttgtgatttttttggggttgagtgttgaaaaacagctataggttttctcccatagccctctgtgttttaaaacgtcatttctctctcttattctctcatcagttgacttgttaagattcactatttgagttattaatcaacaactatctcatatattcaatgttagtgggctgttggtccaaatctgtttgagccccatctgggtgggtctctgggacttacttggcactggtgtagtgtttgagaagacccttggaaaagtaatttcggacttggggataagatgaggacttgagtttactctgaacagaacccagaggggtcccaaagactatagaccaaattttttatttatttatttattttaaaggaaaacacattcagttgagtcttcattgacccattttccatacttaatcaaaaaggtcagatatgtaagtccttaagatatcggaccatgttacttaatagtactgttagttacaaaaattttgttaagcatctaactcagtttttaaatttgagctttattgttccctgaataatacatagccacacttgacattcattgttacagaaggaatttcttcctgtttcttattcctttaggggattatgcatgagagcaaacccttcttcgctgtgcagttccacccagaggtcaccccggggccaatagacactgaggtacgtcaaaaagatgaggcctattatgtatgcaaaaaaaaaatgtatttgtgtggaaattcgagaaaccaaaataatcaccccagatgatcttgagcagaacattctcaagaagagtgctttggtaacacacattttgtattaaaatctccccatgaatgtcacagaggaaatttttatcttttttaaaatttaaagtgggaaagcccttaagaaacccgaagcgatggtatttttatttaaacccattatcattctaatatatttagttctgaaatttacaattgttgtactatgcaaatgaattcccttttgctctctctcgttctcatgactgaaatgaaattttaatcccccatctgtgacttcacaaaaatccctatggcaactggttgtgtagccactaagggagaataaacagcagcaggagaaggaggggaagggtgttggaggggagagagggcatgcatgcacatacatagatgattcagacggcttcagaaaagaaccacaaggaatgcttagaggagttttgtatttaatctaaatatttttacttttttgtgtgtgagctcttagttcattgttcaaacccatctttccaaataaattcttctggtgatatccagaaaaatctgaagtctattgtgacttccccacacccaggggcctccagtagcaaatcttcattgtcagaactctcagaaaagacttcgaggtaaaatggggaagagaataagagctttctttctgcaagctctgctctactctctcatgtctgaattgccgttttagatatttatattttgttcttgttttaatattattaggaaatattggttcttaatagccaaaatcagtattatattaccaacccatgatgaaactcataaatcaaatttagttatgtgtatcatctaacacatgctaagtagttttttaatttaaaatttaaattagcatatattagtacttcggattaggaacattgcaattaagatgtaataatatccactgtcacataattctccttttttgtctttccaataattgcaaaatgaatattctttgttgtaatttgtcatatctagtgaaacaacagaagtaaatcctttggcaaagattaagaataatcttcagaaactgttttttagagccgatagaaatttaaatttaaattagtatttctaattttctatatcataagtgatatagcttcaattgttatatccacctagaatttgatttagaagaaacaaatgatatacaatttactaaaaacttggcattctcagaaggtatctgatatgtttactgcttgttggaaacttcttttttataagacttgaagtgaacagaagtgtttatttgattaaattctcacactaacagatatttagttattgacaaaaaagcaaaaaaagctgaaatgctataataaaaattatttgttgcttatctgaagttcaaatttaactgggtatattgtgttttatctggtgaacttaggaattttgaagcttctaactagttggttgtatttttttctagtacctgtttgattcctttttctcactgataaagaaaggaaaagctaccaccattacatcagtcttaccgaagccagcactagttgcatctcgggttgaggtcagtatgtgggcttatttttggtttatgaattttggattgtccctatcacatgaagatttttaaaaactaagtgatgtaaggcatactagtgtttaataaaagatgactggtaatattgtaatagactgtcattttgtaactaattatttggttccttcttgatgatgtctagtggaacttctcatgttttgatttaaaataatgtcttttaaagtttacttcttccagagtatttgtaataacataacaaagaatagtgtttagtttagaatttatttcccattatccaaaaagccatagctctatgtaaacatgagatacatttcagactacagaatcattatagatgatagaattctttttgtttcaactagaataactgttattcaacatcatgtactgagtattattttacctctaaaaagcaaatggacaagaatataacacttaaatccttaatttgaatatgtatgttagtgtgataaagtttttacccatttccttcataaactacacattcatatcattatttaaaatttagaaggatatatgtgtatttgaaaaaataccacacatagatatatttacatatatgtatatatttttggatatttatatatgtttaaataaaatgtaaacctctgccaaaaattttttacttaagagaaaaaccttaataaactttggaagtcacattgaaatcagagatgttttaagttattagtctttttccctatatattacatatttttcattacattagaccttagatgaccacataaactcagacaatgtggtttgtcttctccaatcttgaaaatgccttatttcccccattttagcagtaataacagtgtctttttcttattgcttataggtttccaaagtccttattctaggatcaggaggtctgtccattggtcaggctggagaatttgattactcaggatctcaagctgtaaaagccatgaaggtgagagaatatgatccttactagaattaatatgcttcctttaatgagtctaattagtattttataatttagatttatgacactacctcttttcaaagttgctataattattttccttaactgtgcctttataaatcttgtattaaagaagcttgatcacgagcaagaatttcaactttctgtaatgtgcacatctgtaaattgaggaggttaatctccaaaattatttaggttattgcctccttatagtgaaaacatataaagccacatttatttatgctgtttatttcttttgaggcagtgagtttttcaaatatacttatcttttatgtgaaagagaaattttgggcatctttggtgctttaaagtatttcaagtgctctacaggatgcttcgggcatctctgtggttgaaatgggaaactccagttggagaagcaagggcaacagtacattttgttcaggtgttataaattattatctgtcactgggggacacagttctcccatcagtgcctgggaaacgggatgatatggcaacattttcaagtagaaaaaaagatttgatacacaggtgtggaaggacatccttcctgtttctttaaactctctggagatctcccaacacttactgtagtaaaataaaactttagaaaaattccgttgtatatttaatgtatttctcttgaggagttcagttggtacccctcgttgtgctaatcaggccattcggaggcaatgtgagctcttggtgacattgcctcaggctttgcagtgtaatgccattcaccagagaccaggctagtagagtcagcatagaatggcaacagaagactaggacagcaaacctgggaaaaatagttggccaaaggttttcttatttttctttttgttagtattctatagtcaaagattttcacctgatgggcgtctgttgaagaggtagaacacagtctcaatgactttactctttttcccatttgtttttattttttaatactctcctccattcatgtgcatgcatactcacatattttttggaataaattttcaaaacgatgttttacttctttgtattatgctttaatttctcattagataattggagactgtccagtggtttagattagttagtacacaatctaagtgtgttcagagtttagaatacatttaactgtatacagtttttattctatttgggagttttgcaaataattagaatttctatagttttgtattttaatgtgttttacatcaattgggtaaagttatatagttttaactaaagaacaggaattattagattagattgtgatcacttagaaggttaataactagaggtggatttttaaactaaaaaaataattggtgcatatattgcaacaagaattagaaaaatcagaatgatttaaaattaagattgcaataaggtttaaaataaatgaacactcatcatgtgtatgtataggatcttttcctgtataatttgacttataaaaaatcgccatattcattgtatagaacattcagaaaaatacttaaatatactaaagtttgttggtacttttctttagttgtgaggctttctataacttctgttgctggtatgttctcagttgggactcaattattaaaattcatcacatattataaaagcatttgcttacctgtttgtatcttcctgacattttgttaataatattactcttaaaatcttgagagatgactcgtattgaggaaagagcataggatttgaatcataacatttgaattagagccctaatattgccacttattagctatgtgacctttagcaaaccatttaaccttactgaatctcaatttcttcatccaaaaggttgaaatctctttcatagtcttggtataaaaatcaaatacattactaaaaagtacattacaagcattaagtcactatttgaatttaaagcagcataaaatatatttaatgttttattcagatcctccccaaagatatgtggggttttcaataataatttctatacttttatctgaatattttgttgactttttaggagaatttaaaattgacatgctaatgtatgaaataattagaaccatctggctgtatgttataataattattttgctaagtgtcaccctcatcttggtttataaaacaattatccttagtagcctacataaagaattattttgaaggtctctcccgatgtaaggaatgagatagagctatgaataccttcatatatatacacacacacacaaacatacacacacacatgcatgcatacacatagttttatttcttttaccatatggttttttaaatatgtacaaacagttgtataatgctttttgttaaagcactatagcaagcatgaatctagaaaataaatagaaaccagcagaaggctctcagtgcttccagcaagaagggagcacattattctgcattttaaatgtacattcaatgttcttcttagacaaataaatacaagggggagcagcttttttttttaacttttattttaggtctgggggttaacatgtgaaggataaataagatcctttttgaataagcaaatattgagggaattcattaccaccagactagccttacaaaatatcttgaaaggaacactaagtatagaaagaccactaccagctaatacaaaaatgcacgtagacacacagaccagtgtcactgtaaagtaactacacaaacaaaccaacataataaccagctaatagcacaatggcaggatcaaatccacatatcaatactaaccttgaatataaacaggctaaatgtcccacttaaaaggaatggagtggcaagctggataaaaaagcaaaacccaatggtatgctgtcttcaagatacccatctcacatgtagtgacacccatgcgctcaaaataaagggatagaggaaaatctaccaagcaaatggaaaacagaaaaaaaaaggggatacaatcctaatttcagaaaaaacagatttcaaatgaacgaggatttaaaaacagacaaagaagggcattatgtaatagtaatgggttcaattcaagaagaagatctaactatcctaaatatatatgcacccaacacaggagcacccagtttcataaagcaagttcttagagacctgcaaagagacttagactcccacacaataatagtgggaggtatcaacactccactgatagtattaaacaaatcattgaggcagaaatttaacaaagatattcaggacctaaacttgacattggaccaaatggatctgatagacctttgtaagaactctccaccccaaaacaacagaatatacatttttctcattgccacatgacacatactctaaaattgaccacataattataagcagctttcgtattgcctctagttccattttatatttactaatttaaaatttttggaatatgttattcttttaaggttgattgaactacagggttcagtaatatttgtggctctctagaccaattatatagaaatggtctccagctttgccaacagtggcaaagatcacctcatggcgatcttcatgagacagccaattcttttggatagtttcattttcaagaatttcttcatttctttgaccaaatgcttgtcttcctttaacttccattcactagtcctgttacggatctctacggcccacagataacctaaaagcttagttaccccatgtctttttatttaagtgtggtcattctcttctttagaccatatattcatgtactggattcttttgtttctttcaggaagaaaatgtcaaaactgttctgatgaacccaaacattgcatcagtccagaccaatgaggtgggcttaaagcaagcggatactgtctactttcttcccatcacccctcagtttgtcacagaggtcatcaaggcagaacagccagatgggttaattctgggcatgggtggccagacagctctgaactgtggtgagttcttataagcttaattgcagagttttgacatatgcactgctgtgtaatgtattttatttgagctcatctaacaattgtgctttgtgtgttcataaaacctttcctctactgtgtgagaaagcagttagcaaacagccacttaatatagtcatatgatgaatactactagttaatttcacaaaatagctgatagacaaagaaacctttcactttaatgctccagagtggccagtaggtttcttgcatttctctactctatcgcaggatattgcttttctctgttgctattgaggtcttgagaactattatgaatgaaaaatgagaattaacattggttaagtgctcttaggtatcagccctgcagcaatttcctctcaaacacattttcatgatagcatagatcagtctttctactattacttcatacttctgctgagtctactgctttgttctctttaaaattcttcaaatctttggaactggatcatgaataagagtctctttagctagtttgggtaagcaattggtgatataacttgtatgtcaaaaaaaaaaaaaggactaaggcaaaattaggtggctaggtagtggaaacacaaaccattttgaggataattttttagcccaggtaggtactcatatatttgggattttttaaattatagaatctcattatagaaatggactttaggaggaaagggaatatattgaaatcttaaggctcagtataatactatgacttttattaataaggataaaaatgattttcagaagatggtaatataagtaaaagtagcatcagtaacatattttgtcagaccgtcttcagaatttttatttcaatttttttccctaagtgcaattctattgtagacagtggtaacttctcggattttaagattaaaaaagtagttgtattcagttgtctattaaaaaaggcacaaaattcaagattttaaaaactaatcctatttggttcttctttaggagtggaactattcaagagaggtgtgctcaaggaatatggtgtgaaagtcctgggaacttcagttgagtccattatggctacggaagacaggcagctgttttcagataaactaaatgagatcaatgaaaagattgctccaagttttgcagtggaatcggtaaggattctttgctttggaaaaacaagggcattatttgtcttgtgttgtagggagaatgatttttcatgcctaataataatagttaagattattatacttgcatgcattttcttctagaattgtgttaatagtttagaaatattgtgtattacagcactcaatgctgaaattataggtattaacattttactttatgcaaagagaaacagaagtccagagatgaagtggtttatcaaggcttgaagtgccaatgaatctcagatctcctgaactgaaactaagaaccataccaacttgcaataacaaagcaatttttaccttgtttctgggatcaatcacatattttgcatgtgtgaattccctgcaaatgagaaatttgctttaaattttttttaaataaaataaacattttagaataaaatggatccagtcattaaaatgactggaaaacctgtagtttagatatttaaggaagatttgcttttctgttatttatttccattgccccttatgcctatcaataagctattaacagttaccaggaaaaagaatcaactcactttatatctgtttttgcccctgactttatttttgacttcaggctcatagctggtgaagtggaggtgctaggggcagtgttaaatccaacttctccatggtagaaacaggcacacccttaggaataaagcaggtactgctgggacaactaaaaatgggttatgtatgtttcagaagacaatgctaccaagtatcttttgtgttacaaacttgtcaatcaaataatcccaggataactctgctgcacaatttgggaagctcttgccatacatttgttctttcattgccagatttaattatgtccttgcttcctcaggaaaagaaacaggcatatgggaaaggtgtaattacattcccattggtagtgtaataatattccatgacagaaaaatatagccaccatatgttgtattctgtaagttaaaaaaaagaattccaagcttctgggactatgctcagactgaacttgaaaatgaaaaatccatttatatacagtgttcctaatggcttattgtggtaacatcaagctagcttcagcagcagagaacctggtttcattaagacagagacttttaagctgcatgtaaaaatcgtaaaaatccaataattcaatatggctgccattctcaaatgaatgatgattatttctgctttgaccatggttctgtttcaataggacaggataaaatttaccgcaaaagtgtatttcttagaagatatatatatatatatcctcccttctagaattttacttaacatttgagtaacaacacttgcttttcagaatgagatgagggaataatagaacatttctagattcactctccccacataagttggtttacctgattgccagactctcttggtgtggtctgttctgccagtgtgctcagcttttaaaatgttgagtccttgttcttgttgacagattgaggatgcactgaaggcagcagacaccattggctacccagtgatgatccgttccgcctatgcactgggtgggttaggctcaggcatctgtcccaacagagagactttgatggacctcagcacaaaggtatgtatttttgtagacaatattcttaccaaccaaaaaaactggcttgatagaccttttcaactagagaaagttatgtagatgagaaattacattttctttattaaatcatgatcatgttctccaaaagcgtattccaaaagatgacacttttgcgagagcatgcagtgcaactcttcatgccaggatgcaatgataaaccacatggttcaaggtaaaccagtggtcactttacctcaaattccacttttatagtacaatctattgacttcaaggagatgaacttaattcaactccttcttcctttgtttcaaaatctactctcaaatatttaaaatgctaaaatatgttttagtggttaaggaaaaataggacataatgtctcatttttaattttttagaaataatgtggctggcatgggtgacatccagaaagtgaaacaaagcacattgagtagtttgactttactcaaaattaaggtgtctaaaatatacatggtataaaccactcaatacagtaaatgactgaactccaccaactgccatatactcataaaaacacgagagatttgagggtttataatttattttctatcaaaatcactttaacatattaggaactacttctttctttgcatgttagaggaaaactcttgagaaaagtaagctatgctacaaaaactaaattagagactaatgcagaaaatatgctccaggaaaacagagacttttgtctatactctatttccacaaaatagaacagtgcctggaaataccaggagttcaataatgtctttgaagaatgattacacgtgcagccaagaaacctgtgtaacttacatggcagtcatagaagtgaatttgacagaattactgtaagggctattttgggaattatttaggaaatagctcacggacagcttattgcttcatctttacttactttttgaactgaagtgaaatgagacccttgaattgttgacatagaattttgaaaacagataagtacaattcagcatatttaaataactacaatggcagacttacatataaacaacttgggtttcgtttttctaaagttgtgaaaattacaaaaaagggaaacatacctcacataaatgtttcttgttaccattctggacatatgaatcacatatttagagcaaaaacatgtttttgaagatagaaagtttatttcctctagcatgttagaggctccaaatattttcaatattaacaacttcataactgccaattgtgacagtgtatacatattctctattaatttttttactctataagaaaccaatctgaagactgaacttttcatgtaagaaagtttataataaagagaattttggaatgaaatagctttcaattatttatattgtactcaaataatcaatagtcccttaaatggtttttcttgttgaaaaaaaccctcgctcttcccttgagaataattagtcatatcattatgtcctaaacaatcccctattctcttgaggttataattagcaccattaaaagctgcattaacttatccaggtccctaaattaactttttacataaaatcgaagacttcaaaaaataaaaataaaaataagctgaggaaacaggtgaagataatttcaaattttccctgtatctaaatatccattttacttcattagaatgcaaaatacttttccaaatttataccctttgtttcctagatttcttcttttagcaggcaaccggaatgatgaattaatcattattaaattgttaacattggctactgaattttctaaccactttgagaacctcatcgtgggcagctgtggggacaaatgtgtcacattttcatttgcacgtgctggagcctgtagtgatgactgaagtttaaaaaaatcctattaaggcacattacagaaaaacttacattaaattattattttaatgcctattaataatttgaaaaaattcaaactgctttccctttcactgtcaatccaaatcaaatatattataagacaataagacatttctcccttggattatcagccactgcatgtcctaaggtcaaagattaccactttcctattttgggttcagtattctacccattgtgggtgtgccgtaaatatgaaattataattatgctaattcatatctgtctaatcaggcatacatgatatatgactcagagtatttaagcatttaggcagtgattaaccataataatagtcccatatgattcttctaattctcaagttttatatgccatcttggctaaccgtttacaaccatcatcatctcctttctcctcctcatcaacatcaactaacttttattgtgtgtgtcactgtacaaagcaccctcagctattttagagagagccagagtctttagacttatttttccatatttattcacacttatcacattttctggtttcacagaagcctagctgctgaaataatttcatttccctctgcctgattgctcaattattttctctttttcctaaattagtttgatttactgtcatatcagcactttgaatggcaagcctcaataatgtaaatcaagcatattcactgcaggatgctattcctagtacctcactgattttctgacacattgtgccttctgtgcaggggagaatggagacggggtttgagagttcagtgctgaccaggatttatgccagggtattttgccaaatatccttgttgaagccagtgctttttcttactctttgatatcttttgtcaccaatttctaggcctttgctatgaccaaccaaattctggtggagaagtcagtgacaggttggaaagaaatagaatatgaagtggttcgagatgctgatgacaattgtgtcactgtctgtaacatggaaaatgttgatgccatgggtgttcacacaggtaggcaaagtatcttcaagaactatagtaatgctttcagttcatgtctttgatggccaaggcagtctttataaagttgttgcctttaaattactatttctagttgacagactagtgataacattttggacaagcatagtattttacagtattgaaaatgttctcacatttaatttgatcttcacacaaaccctgtgaagtaaggcggatattacactgagttaattgaggaagagccaaaggtaagcaatatggtagaaataagatccataaaacttagtgttgagaaataagaagggaggttgagacagtttaaagcagactgagctggtaatcacccagtaaatgagaaaataggcacaataatagaaataagtttttcagaaaagtacactagttagataagagggcaaagatgataacttaggatttaaaagtgctaaatttggggtgtgagcagagctgtcaaaaaagggagttgagaatgtggagatggaatttaagaaataaaatagaaataaataagttgatacaaagacactggaaactgttggcataaaaggggaaattgaagttgtaggcatagacaaagtattcaaggacataggtatagaaagaggagagaatagggttgaactttgaactctgggaaacatttagatttatagggcaggggaaagaggaagtattactgttgaagatagaaggggagaataaagagttaagaggaaaatcaggtagtactgtaccaactaagccaatgcaagaactattttataaaagagctttgtttttggcagtatcaaatgctatgcaagaccaagactgattatttaatttggctcttttggatgtccaagagaacaatttcattgcaaagtcagttctgtgagctctattaaaaggaattacatggtatcaagtggtaagcagaattggcaaactttcaagaagctcattcatgtaaagaatgagagagaagctttgtatggttgtctggcaatgttgggagaagacttccggaggcagtgaagatctgagcgtgtttgaaggcagaagggatggagactaagattgcagatataaggggctatgatgagggaagtgaagatggaaagggatgagatacagaaagccagctgatgagccagtctgagtgataatattcaatgaaaggaagaacttcagaaataatttgagatgaagagcagggaagttgaagtcaatctagtaagtagacgattgaagccttgatagctacttactagatagatgaacttgggaaaggttagagaggtttctaaaagtactgtatcagagtaatatgggcaaaacaggaattgggggaatacctgatatcacatatatatcccaacaaaccctcagactgttctatgtcttgcatcgtgcaagtagatggttaagtcgctgaagttggttatttcaatatgccaccaagtaatgagtgcttcttggatatataggtgactcagttgttgtggctcctgcccagacactctccaatgccgagtttcagatgttgagacgtacttcaatcaatgttgttcgccacttgggcattgtgggtgaatgcaacattcagtttgcccttcatcctacctcaatggaatactgcatcattgaagtgaatgccagactgtcccgaagctctgctctggcctcaaaagccactgggtaagaccagaataattgaccatgggtttgcagattcttttcagatagaaatgaaaaattgacagatagtggaagactgtactgcatttacaaactatgttccctttttctgtatgttagctccaaatcatttatagcaccctgaggacatgattattaatgagcttgttgccagattgaggtaaattatattgctagctggctttgtttgcaggctaatctaaacgaatcaaaatctaggtggctaaagcaggctgtgaaaaatctgcttcctaattgcactttgcagatgttgttaaaagtgcagattaatccttaattttagtcttcagctgttttcttcaggtgtatagccctatagcaaatagttgacagaaaatatagctcacttgactcaagcatgcaatacacattacttttattttatcaaaactccacaagactgaacagtgcggaattttttcacaagtaactgttacaaccaaacaaatacatctgctgtctatgtaacagccactagcaggcatgattggagggaaaggtaatcaaaacctttggtttctaataatatatttagcaccttacacttaaattatggcatttaaatgaacacaatatttacttctttatattttttttacgtagttccacagcactgcgtggagtggtgaaaggcatgttgccctgtacaggagtcacaattctgcattctcacttggttcttctgttgaccgtgtgattttgagcacatcactcattgtctttatcagtttcctcatttgttaggtggaagttgtactaaagaactcatttttaattctatagttctatgaattattttctcaaacagaataacccaaactgacattctggatgaagatagtcaagttctcaaagtgttagttttgtaaggagcccaaagttcaaagataatttggagacagagcaaggacccaaacttgaaatgcctacattttctgaccattatgtactctcttgtactagctaactccactgtattcttaggtacagatatgtatatgtacagatatgtatatattttctcaaaaaatattttgcagattctcatcttagtggaggttaaatacaaataaaggttaaactttatttatcaataaagctatcgattttgggttgaagaggtgaaggttgagcgttgtagcaatgcatgtagtgcacagagagtaaattctcctgtgacctgtgcctctatactttgtatcatgactcctattattccgcaagtggctactaaatattgatgcagaacagagaatcaagtgtcttataccctgaagtagaataataccagaaattttaagaaagaccaatttatgttttggtctgttttcaataattgctcgaagaaaaaaaaataaatttgtcttctttttatagctacccattggcattcattgctgcaaagattgccctaggaatcccacttccagaaattaagaacgtcgtatccgggaagacatcagcctgttttgaacctagcctggattacatggtcaccaagattccccgctgggatcttgaccgttttcatggaacatctagccgaattggtagctctatgaaaagtgtaggagaggtgagtccttggtttattacgcttttcttcttgttctcagttattttgttaaatttgtgacaccattgacagtgttaaagttgcctggataccatcaacacatggacagtgttaaaggtgcaattgacagtgttaaagttgcctgaatattagcatactaatatgctaacagtctctatgtgattgtttacatattacatatgttacatggccattttgctggatttgaaggtcttcctattcaaaaggtgaggccatatatctggctatatagtatagatacacatatgaaaacacattcatatacatataactgagttgtaatatattttataaccaaatcaagaaagtaatatagaatataatatatcaaaaagaccactgaactgagcttaagaattcaactttagtccattcatgcaaattgtggctctaacttcctgagacctcattccccacatctataaaagaagaggctggactagttcatctctcaggatccttccagctctaaaattctaaattgatatgagcatagtagattattaagccctctttaattatactaaaaagttctaagcttttaacatctttagaagattttttagaatgtgctgttatactatttgaaattaaagttagcctttgattattgcatcttcaaagatgcagtgttcttctgtgtgagaggaaagaaaggaattcatatctctgctgagattcactcccttgcctccttccaccaagtcctaatcattttctgcatccagaaggtttgggatagtggagaaaacatgaaacttggaaccagctggacttggatattactcttggcattgccacttattagctacagactctcaggcaagactgagtttcaggatccacacctataaaatagaaataataatacctaccttgcaggattcttataataccccctcttaataaatgtaatccatcattattgttattattaaattagtattcataaatgttgcatggggtagatgagtgctgaagtatgaacaaatctcagtctttctctatcatttgtctatctaccatttatcttagtttatctgtatctcatctctatttctgttgtggccagtgtgggagcttttagtctatgtatctaagttgattagagtacagagcaaaaggctgtttatgacatatttttccatattgttctttatttgtcccataacacagattatagcctaaacccaggccagccatttcagaaatgcatgtcactaatcacagaaaatatagattaaatctgtcaccaatacagggaaaaagaaaaagaaatgctttactggtctatcatattcacacatgaaaggcagaattatttctattttggcttccttaatttgtaagatactaatgaaagattttaaagtagtaacaaatcaacaaattggccttttaaattaaaatgtcttactagttgtaaaacactaaatattagttttttctccattatagttgttttaaatcttatttttcaaatcatactttttagtgtacaaaagaaatagaacgcaaataccatgaaaatctatgttgctagtgtttgcaccaaataaacaactgttatttagtttacatttcatgggaagggtcctttttaaataatgttcaccataaaattggtagttcaaggaacttgagaaaattatgtaatattttcatttggggcttcttatctgagggattttgttgtcaaacaaaaaataaaaggtaggggggagttttgttgtctaacaccttacatttagttcaaaaagtgagcaaacatttcctgagttcttactaaacgcaagacactgggaggatttaaaaaaggaatagattatagataattgagatacattgtctgcagttggtaaattcagaatacctaaactgacccgaatagacaatgaattattaatctctggtaaatattaaaagatagtacttatatatagatgctatgagaatatagtagaatagggttgaggaagcccattatagtcattccactggaaaatgtgaaatagtcactcaaggaaggtgcattttaatagtatagggcaaatgtggtgggaggacgacttgagcccagggggtccagtctgtagtgagccctatagtgccgctacactccagcctgggtaacagagtgagaacctgtttcaaaaagcaaaaatatatagagagagtattgaaaagcacaatttttgagcaaacatttatagatacatattcctttgttatacacgttttttttttaattgaatggatcccatgtaccattatatagattgtgcttaagaataataaaaatatatggagagttacttatagaactaatttcagataaattttaaatatgtaatacttcaaattttcttaaatatacccaaaatatttccttaattttacagaacaataaaatgtctgatttctggcagtcttttccatgcccaggctagacaatctataaacatattgtctaactcttcaagataccactatgacttgcaaattgcatatctgaattgcattaacaggttgtttattcctgctcttgtaaattttcccttatttctaattaaatttggaacagtgtgaaaaggttatctgtttggctttagtgatcattgaatatgtatcttgtcacataattgacatgaagatttcctaaactgacattagtggtaatttgagtctatttgaggaatcacaaaagtttactgaaaatagcattatgactgctattattttaaattggagaccaaaaatgcatagcaatctattattctatgaaaagattcaaacaatgtttatccagcgaaaataactgggtaggttgcaagatcaatttaagtttagttctgacatgcaacttgtccaaactaaatcaccacataatttttctaattgattagtgtatgatgagctgtaaagattgtggaaagacacattgaatttgtcacagaaagtttagtctcctcctacgttcaaaatcataatcatcagtatttgttatgactctcaaggttctattaatattaatgcttagctgtaaggaaagccaacctgtcttgaatactgactgatactcatttacaaatagtttctgtttcagtgttaatatatttctggtttctttttatttgccttccattctaaagaacatgcgcataaagcaagatcttactaagaaaaggtctctatgcttcaaccttgaatttcttattttaatactatggtccagagcaggtacaggtgatttcctcatcaatctcagcaaatacagctgaactccctgagtggtaaaagactgacctaatgaagatgcattataccaaaaccatggagaaagtgagagaggaagaaaaaaaggaacacctttttttttttttaatttgagaggctttatgatatattttttgttcttatttgttttataaaatatattttacgtccagttcagttacaaattaaagatacataagctctttctttcaatatgaggtcttaaacatgtattacaggtcatggctattggtcgtacctttgaggagagtttccagaaagctttacggatgtgccacccatctatagaaggtttcactccccgtctcccaatgaacaaagaatggccatctaatttagatcttagaaaagagttgtctgaaccaagcagcacgcgtatctatgccattgccaaggtaagatgttacaaggggcccacagctactagttgcttttccagaatgtagtcagtctggacattaaaataaaactgaatcacaaagtggttttaaatcagggatttttggaaaatttttaattcttttatagtattaaactggaaacatctatagatttcattagagtcttttacaattaatgataaattatcatttttatttgactttaagcctggatttaagggcaaattgcagttttaaaggatgattaaatagataaaatgtccccctttttaagtatacttagtactaatactcaagtagatttgactatattgacttgtcctttactattaactttattacatgttccttgaatgtgtaaaattgtattgtagaaaggaaggtgcatacaataatgtcccttagtatgtgccacttgagtctagaataatcttaatttatttgcttctctttctgtgtttaaaaaacagcaacagactataaaggcccacatgattatagggttttccatgtaattattttattggtcttactttcaggaaaaaaggccctacatttctcacttccctccactacttgcttctcatgcaaattaaatgccatgttaatctacttttatatttactgtgcttagagttttgaagtttcagctcatctgattttataaaaggtgacttgggcagctggaatctgtctggtcagaaatccctgaaaggctttttgacatttaaggaagcacaagcgttaatcctccaacagtatcaaaccgcactggttctacaaagctctactgaccattttatgtttgtgtgtgtgtatgtgtgtgcatgtgggatgagtcggtgaaaacatgaactttctctttaaaaggattcccgtctttgtaatttgcctgtgtagaaacagaaaaatgttgttagtgattttgaactcatcgcaacttttatgtccatattttgagtccttaagagacctgaaggagaggaagggatatttccttaattgcatccaatgtatattctcctcgctcttatggtttctaaatggaaaatatttaagccctactgaaattctgggagttgctattatctcttgatggacattttcccatgttgagtttcaaggtaattagaatttttctctggcggtggcgggtgggatagcagtgataagaagttattttagaaagccatttcaccttcatcatttattatccctatttcagtcttttatttaagaagcagctcatgacattcatatgtgtgtgtgtgtgtgtatatatatatataaaatttttttctcaggcaaaggacagtaaatagattttttccttaagtctagcaatcatgtttctgccactttgaaggagatgaaaaaggcaagcatttccaagttcccagctaagctgtaaaactcaagcaaatctctcattcttttctaacagacttataaaagatgagaatctgggaaaaatgtgtggaggttctttctttcacagggtaccctatgtatgagcaagaagtgcaggggctgcgtgtaaattattgcctgctcgagtgctgggagaaggaactgatttctgtttgttagaggtcatcattactgttcatttcaacagcagccgggaacttggtgattttgacagagagtgtaaggacggtggagggctgaaggggaaaaagaatgaagggagtgtgtaaatctttgcttgctttcatgagtcttagaaagagcaacttgctctgaggtctgatttttacagcagtcttatttcaggatgactggatcatcacctcttttgatttggggagaatgcggggcattatttttgatttttggaacattaaagtaacctcaaacttgtttgggggtcattatagacttcattacagtgatgttacatagcaaagctgcagtgcttggagatgaggtcttaagactggcaggatcttgcttgctgttgagaaatcatggatttttttttttatccagtctatcattgatgggcgtttgggttggttccaagtctttggtattacgaatagtgctgcaataaacatacgtgtgcatgtgtctctatagtagaatgatttataatcctttgggtatatacccagtaatgggattgctgggtcaaatggtatttctggatctagatccttgaggaaatgccacactgtctttcacagtggttgaactaatttacactcccaccagctgtgtaaaagtattcctatttctcagcatcctctccaggatctgttgtttcctgaatttttaatgacagccattctaactagcatgagatggtatctcattgtggttttgatttgcatttctctaatgaccagtgatgatgagcttttaaatgtggcacatatacaccatggaatactatgcagccataaaaaaggatgaattcatgtcctttgcagggacatggatgaagctggaaaccatcattctcagcaaactaacacaggaacagaaaaccaagtaccacatgttctcactcataagtgggagtggaacaatgagaacatatgagcacagggaggggaacatttcacaccggggcctgtcggggggtggggaggtaggggatgcatagcactaggagaaatacctaatgtagatgacaggttgatgggtgcagcaaaccatcatggcccgtgtatacctatgtaacaaacctgcacgtcctgcacatgtatcccagaacttaaagtatatatatatatataaaagaaagaaatcatggatttgactgtagtcctttccttccttccagtgaaatgactacaggattctaggccctccctcactgtatgtgcttgtgtgaaaacctcctttgatctcttaaaagtttcagtaacttaaggttctctccacctcacagtgtagatggccgacagctaattgtgcctttaatcacttagaaagtaagacagaatattaagtctttgggaacctgactgtaattacagggagaattaaacaaaagaaacatacattgactaggaaatgaacatggctttgagtatttctgttaaatgtcatcttactctagtcaacaaaattatgagccatgccatatctcaacaattataatcatggtctctctgatactatcattatgtaaaagctttaagaaaagtaagctccctgggctgaaatataccagcagagttactagttgcatatatttcttaatgggtcttaaaaacgcagtgtgttattctaaaatatgttgttctggaatattttcagatttttcacagggtatatacacgtacacatacacacatacaagaataagagtagacatctttttgtataaagattttggttttgagagtttatctcttttttcagttaaattttctactcagcttaatgacccatagttgtagttttacttttgagaaattgataaagtaagcttgaggaagaggctgagctgcctatcagaacagaagttattactacattgttttggaatatattaggattttaaaaaatgcctgccttagcacaaaaatcatagtgactgattcaaaacaattttttatttgaagtcctctgtgaggaaatattctggaggaataaagccaagccagatccgacccataaattctcactgactattgtatgtttgtgtgaatgtggagtgaggtgataaaaatatgctatctcctacaagataactatcaacactacaagttaagagatcattatattaattctagattttcttaccaatttggcttaactgtagtttcaagagactttctttaattccaaagagatgtaccaaatttagggtataatgggtaacacaatcaaataaagaggagcgagtcaaaacctgttaggagatttttctgagaacacaccactcaaggcaagcacctactctgtatgccatttgtggatatagttggcaccatctttatgtttattggaaggaatgtcagtgatgtcagtttcatgttttgtaactcagtctacagtctcgggctctctaaataacacacagaggcatgactgctatgtattttaaaccaaataagacatttagaaaaatgtttgccaaagaaagtatctcttctcctcttggcaggccattgatgacaacatgtcccttgatgagattgagaagctcacatacattgacaagtggtttttgtataagatgcgtgatattttaaacatggaaaagacactgaaaggcctcaacaggtaaggcagtgctgctctcattcatgccagacaccttcagtgcaatttttaaagagtcttcttcctactcttaagcatttggtctacattgtgattcaatgaggtagatagtgccattgttggaaaatagtacccgtagccagaagacaaatggcaggtttttttttttttagatgtttacctttagaaatgtatccattaatctttttaatcatcttctattcccacccttgtcatcagacatagtaataaggtcttttgaatgcacaaaattggtatacattgatgaacgtgtattatttaattatgaagtattatctagatttaaattttattaatcaattaaatgaatatttgttttctataaattttcctctacattctgaagtctgttttccccttttaatatcaatctatacattgctgtatattgaggagaaaatgcattccttttgcgctctactgtttttaaattgggacattcagttcagcatacaattaagccacattcaggtttctcttaacagactcttcacctctgactaatttacatttttatctccatcatggccaattatttttaaacttcattttatgttgagaatattttgataatgtagtccttaaaatctacttttaaatttttcatgggaaactgctggggcaccttaggctgatgaaagcatggatcagttttaaacatctatcttcaataagaggagcatttattagcagattaagaaagacaatatagtcctcttgaacttcttccctctgaaagcactctgaaatacactactattggaaagacgtcttacctgcaaactagggatgtgtttagagaaggaaaaattttgtttgtataaaaattgttctcaaatgatttgacaaaatgtagatactttaatcacttaaaatatctttgaggacagtggaaaatctcaaaacctggattgctcaactatttagcaattgcaacatatacttgggttactgtatttgcctgatcaatatgtgtacaaactaggtaataaaacacttgcttttctttttgagaaaaattaggttctttttcatctatttaattattgcccatgtcaaatgcttggttttgaaaactgaggaattctatctgacaaagatgaaaccagctatagttgcttgtaaatcatcctttctagtgatcacataaaatgaacagtagacagcaaataatttaggaattgaacctatacatttatcttataattttgctgacttaagtttccctttcttggtttatgatgccagcagaacttctgtgtaaaattatagtctgttctactgttctcagtttcaggcaactgatttcaaatgcctatgaaaccactccaattaagccacatgggggtgctagaaacttatagtatgccagtcacagcagtggaaaagacctggggtggaaaatagcagatgttattgtgatttaaatttccacttgacatacgttctgatttttggacaaattcaatgttttaattgaatagttttcgttacaaccagaaggcaggttgagattctaactaagcataaataagggtatattgatagtgaaaaaggtccttggaggattaaaacaacacactgttacagatcatttataatatttttctgacttccacattctgttgcatttatttgccgacaatttgacattttcaatctccattttctggcataaatatatttgtaaatagggatattttctattgttcataatgatctacatttaaaactctttatgtaaagctttatatcatttcaaaaatttcaaaaacttacacttaaaatcatctctactgtataaatttgtttttgatccagggaggttgaagtgtctattatatagcaaaagctaaagtaaacctgaagtggaactcacagatgatccacggcgttagcaaacctaaaccctgaactcattatctgagtgtcactttatggtttaattcctttctttttgaagtgtcattgatgcacgcatagcaatttgataatgattgttatttagcggtattagataaataacaagaatagatggccactaaagctacctgtctccatcattttgtggcacataggggtctgaagttgaaagaatacgacagctgatggaatgaatgttaagtatgtaaggccttgagtttccttgccctattttaattatactcaccattagtctgggtctgagtcctctgctttttctcggcccctcaatatccagggaggcttagtcatcaaggtacgtactgctccaacagtaacaagagctccctattaatgacctatagctgacttacatattgcgagtttggagagaggctgagaagattagttgttctttttcatttgtatttatttatggtttactttgaagatctcaactgcttctgtgttagaatggctgtctttagctgtaggcctaggagctagcgatttatttggtgtgcgttcagagaactccaaaattctcctgcctcaacatctatctctgctgccaatgtaccgcactccctttgtacttttcatagagatccttgagaagacaggcagtggggctctcacttgggaaaagagaagtaaattaagagaaaaaatatagaatgctagacgtgggttttctggttccacccttgtgcattggaaggagcagactatggagccagagattggtgcgcagtcctccccactgtagaatcagacgtacatcacctctttcatttctccagattcatgttctttctcttaatctctgcttctagtttttttgtgaagcttaatttatataagtataaatgacatctgacatattgtgagggcccaagaaaatttttcctcttttcccctgaaaataaaaatgctacttgttgtaataaaggttactttatgattttagatatgtattatatattatgattttagatatgtagatatgatagttaaatatttaaagattcattttcagactcacaatttttatttgcttttatattttgcaatgtatcatttcttaatttcctttatgatgcatcacttattttaatatcagacctattttttaaaggaagcaattgatagctacgatgcaaatgctattcttattaaaagataaatagctttcccttatgctaatgaataaaaattcctactctacagttgttaatcaatctcgagttctaaagtccgataaacacatttaatagcagaggatgagcatatcattaaattgatggtcagtctctgacttgtgtttacatatagtcatctgaaatgaagttcagaatttgagtcccaaatagactatacccacgcatggacacagggaggggaacatcacacaccggggcctgttggggggtggggggctaagggagggatagcattaggaaaaatacctaatgtagatgacgggttgatgggtgcaacaaatcaccatggcacgtgtatacctatgtaacaagcctgcatgttctgtacatgtatcccagaacttaaagtataatataaaaaaagaaatataaaaacaagaacatagtttatgtttgaaatgtaaacaataaatgtgcttatttatgcaatagcttcaaacaatatattttaagataaaatacaatggaaattattaaaaaagatatactcacatatttagtatatataaatattcacagactgagatggggaaaacaaaacaatgattgtaactaggtagatattatggaaataactgatgagttttccatgcctgtgagatagtagaaattataatcagaaacccttctctttgaaggggagagataaacatgtttcatgttcatgattacgtatgaagtctcatctttctgcagggtgatgagacaagagggataggtgtattaggccattcttgcattgctatgaagaaatatctgagactgggtagtttatgaagaggtttaattggctcacagttctgtaaacttcacaggaagtgtggtgctagcatctgcttggcttctagggaggcctcagaaatcttacaatcatggcggaaggcaaaaggaaagcagccgtgtcctatggaaaaagcaggagccagccagagagagggagtcggtgggggaggtgccacatactttcagacaaccagattatgcaagaattcactcactattgccaggagagcaccagggggttggtgctacatcattcatgagaaatctgctcccattatccagtcacctcccaccagtccccatctccaacactggggattaaatatcaatctgagatttgggcagggacaaacataaaaactatatcaacaggtatcagaataatcaactcagcatcctagctttgagtgcttgccccctcagaactcagtatgctgtctctaatacctgaatatagtagcaatggcaaccctcacaagacttctgaagcaatatctattcttaccagcttaggtaataaccattatttagacagcttcagccaaaaaaagatctctttcctgtttacgctcactgactttctccttttccacttaaactgcttattgctacccaagggcatggtagggaagctgactgttctaggcagttccccaaatttataggctggtgtagtagcattaactgacctagggtgataacatatttacagtggatttctttaggatttgagaagtttctttttactcagtacgatataagttgtgtcatgtaggattcgaatacttgttatgtgtatgctttggaatttagatgtttaatggtcaccaaaggtcttttaacttcacattgtcagatcaccctgcaaggagtttgaggaaaatgaagtctatataaatttttagtggaaccacaacatgtgcataatctctgtccattagctttcactgctaagctattgatattttagtctatttttcccatactcactctcccaatgccgacgctttcacatattgtgctcttcccatgtagtattttaataaataccaaaagaaaaatatccttactccgatctgtaagaaattataaaaatctcacctatagttcttttttccattagtgcatagattcaattttggtcatgtaaagatctcctgcctggagagaggaaatgcaggtaccataaatcaaataaagatgtcaaatgtcttcaccaactaggttcttctgatatagcctattccttattgtaaccaaataatgaatttataactcttaatactgaaacttgaattttgattcagtttaataattctgaatgccttccaagggtaagataataatcacaaaaatttttggactacatattaagcactgttctaagcacattattttgtttaattcctaacacaacattaagaaatcagtgattgtcctaattttattgatagtaaactgaggcactgagagattcagcagtttcctctacatcacatactaataaataacagaattgggatcaagtctaagcaggactccagaacccaggatacttgctatttaaccccttatatttgatatataattatattcttatatactttttactttagtaaaaagtaaacattgtttttatgtacaatgttgctatttatgtgagcaatattgtggatgaagcttagaaagaatacttacatgtaagtatatacctacatacttaaatatcaaatataatatatttatatttgtgtataccatagatgactgcttaaaaataatacatatatgtgtatgcttatatacttacatatcaagtatatggtatgtaagtgtgcatgtaaatatattaaatatatgtaaacataagcatatatatacacacacagaaacaggtttgcttggggtatagaaacagatttgtttagaggtgtagataacatctagaggaaataagaagtaagactacctaaaatagacagcttcagtttagaaacagtagccaataaaggggtgatagtcctatcatggtagaatcagcatatataatgaaggtttctactatattattaataaacaagcacaggtacaaatatccttcagttggactccccttgctataagtatgtaaggaattcaactataatagaacttgtgagaaagaactatttcaggactttacacccccaagcattattatttataataccaatttggattggcaattttatattgaaagacaatcatgatacttaaaaaaaaaaaaaagacacatgaacaggcaagaaaaaaaaagtgagagtacaattaccagctttaagcatctgcttatccctctggctgtaactgtttttaatttttttatttccttattttgtttttttggtttctttagctatttctgactgacatatccagcttggagattttattatacctgcctaaattgtataatttcgctcttttactggctaaaactaagctgaattaagttttgaatccttgcttcaagtgattatcttaaagaagatggccagcctctgcttttgctataccatgttaaatcatcaaagtgaaggttttctaccatttatgatgattgcttgttcttgtgcattccattcattttgggcaattttccttcaatggtccattttgctctcttgtttttatgtacaatgccgctatttatgttagcaatgttgtagatgactacttaaaaagaatctattttcattcattttacacgttcaaaagtaggagatataaccattgtgatacaatttataccatacgagtattggaagctaaaatttgtatttgtttccctattgttgacataaactttactatggatttatttacaaattatccagatattgcttttgtctaatattctgtaggtttcatgtggtttttttttgctatcttcactctaataactttaatattctctttcctctttactgcttatagtcaatatagttttaaaaaaaagagtaaagtgcacttttcaagggtccaatttccatccgaaatcactatgttcaatgtgataaactatgtccattggtgagtggtgaaaaatcataggcgtgcctattgcttaggaaaacaatctaggacaaccctggtgagttccacttgggcattcaagtgctaaattgagctcagtaaagttggccatttccctgcagccacaaacttctggcagatgtaataatgcaggtgtcacgttagctggaacactccctttgaatgtcctctcctacacatgctaacttctattgactttttatttaacttgctcatgaggcatggcaaaaatcaggcaagaacgttttgtgcttatgcttgattgaagtttctgggggaaaagtgtcacctaagagttgttggaacttagatataagaaacagaagggtcagtactttactttctgatgacaatgtatattttctggtagaaaaaaatcaacaactttcatcttaaactactaaatatacaagtaatttaaagaaagataatataacatataatcacattataatttttgtgatactttactatgacatgtttttgtgatagcatctattattttggatatagaaatgagaatggagatgattgaacactttagtggaacccattaatttgatttgcagaaaatggtcttatgtcttctcatattactactaactcacacgatattctaagcctcagtttcaccctagtaaaaacaaaacaaaaagaaacaacacaaactcccttcttattttactggtcagtcatgcagctagctgaatatatactatatgtgaagtaacaaactttaaagaaaaacagtcttaccagttattacatattaccattctatgctttcagtcttcatactccaagccatttatataatgaacctcttcaggtgtactaaaaaatggggcttatatatacaagtacttatttctttgtaagagaagagtaataccatgggaaattttataactctgtgaactaatgccaaaaatacattttatttttaatttgcttttatgttccatgtaataaaaggatattttaggtgatgtcataggtttgataggactccactaatttttaaagtaataatttattgagatagatataaaattttacatcaaatatttaatgttctgagagtcttcatttgttatttaaatagtgttttcatagttttggcaaatgattgtgcatttttgaatttgtgagagagtacttccgagtctggcatggacaagatgaatgttttgcttaaaaggttttcagagtaatattcagatgactcataaagtgcctattatgtttctgtatattaattattgtatgtttgctagttcataagaatatacaacttaaaaattttaagttgatttaaaataacacatactcagaatatgtgtatatatatctataaatagtcaataattaatacattattcctgtgttaatgtctctgaactaagcgtgatgggatatatatttacttgatggcatttctttttattaggagctggtattagaccaaatggtatttgttcttctattcagtcattatgtattgggtacctactatgtgtaaggttttgtgctagttccaaagccatttgttgatgaataatcactagttattagaccaaatggtatttgttcttctattcagtcattatttattgggtatctactatgtgtaaggctttgtgctagttccaaagccatttgttgatgaataatcaccagtcattgaatctataatataggtttataacctatacaaagagctatatatagacaggacacattaatggacatgtgagaagcagaaatatgaattcatgaaagtttagtggaggttagaaacaaaagctcttagctaactttacacatgttatctcatacaagtctcgatgtacagtttttaggaggtatgtgtctctatcccatattttatgaaagaaatgatgactcagaatgtttaagtaaattctccttactccatattggagccaggttttgagttcagaaatctctcagtccaaggacaatattctttccttcaatatatcccactgtcatgggagccaaaggaagaaggaagagagaatttaaaataaatgaaatagaaagacactttcaagaggattgcatggtttagagagagaagagagaaacagaattaagtcctcatttgatgttgggtaggtaggagtggaagctaggctataaggtccaaacacatagtgagaaacaggtaggtaaaggtatgaattctactcaggaactgacaaattgtgtttgctctttatcctatttatgctatttttcataacagtgaaaatctgactatgaagaaattaagatagtataagaagaaaaactaaagtggatattagctacctgtttgttcattgggtgaaatagttgacgccacacagtcttacttcattgttccgtaaatattgcatatatcctaatatcatcccccaattaaattgtgattttcattagggaaagtatccaataccataatgtcttaatatgtttttattataggtctttcttagcaaaaaattgtgttaatttgtatgaatgcagaatagagttcactgtggcataaggtataagtcataatttctgaaacagatacaaatggtttccaattctttatttaccatatattttcttgggaattgatatatggtgctttgtataaacactcaacaatatttgtatgataatataacaaataaactttcttggtagaaagtgaaaatcatcatttcttagtgatggcaaaggagggggaattgtagtggagcaaaatgcatatgattcctggttgttcaaagggattgaattcacaaaattcacaaaattattaattagaaaatacatagcccaagatataaactgactgtgttgggaaatattgtaaaccaacatctctaggttttaatttcttaaagtagttatgtatctactaattagctaggaaggctctgaataaactgttttttaataaaaagagatttatctaattgttttatattgtcaaagattatatacatgtaggcagtataggtatatcgtgaaatctctaactcctggtgagaactaaccagtgtttgtgtattcttgatcttcaaaaattattcacgttttcaaatttttgcattttctgagaagtttttgtgagaaatattcacagacattttcaactatatgaagggatatgattttattaaccagtgaagaaggttaaggcaaaaataaatacttatttaaaatacaggcatctactgtatatctccggtgaccttaaagtacatttctattataataaaggtgaaaaatatcactatcctatttttatggatggtgaaactgaatcacacgaggtgtgtgtcatactttatgtcacaccaatcagaggaaaacaaggaatctagcccagggctcccactttcagttttagtcactaacccttttcaaaagcttcttttgcgagatatgacttttaaatcagacagctggagatcagttcctgcttagcggtcaagttgtgagccacctgcattgttgaccccacttagagaggagacattgtgaggaatttgcccttttccaaaactcttgggggaaaacacaggaagtctggcagggagaaagccccagcaagtcacctttgaaaaatgtaaacaggattttcaagggtacaaagacccaggataataattttctttttaagttttgctttatttataataaaagatttgtatatatttatacacaatatatgtctataggtatcttttctttaaagtacaaataccttgccttccatgtttagggaggtgtgagtaaaacaactcttgagcgtagaatggaattaaatttacgcaaaataggctgccagagctataattacagaagctagataattagttgctgaccccagaatttcttcagctgctaatttatacttgagatgcctttatggggcataaagcctttgagtctgaccttaggatagagtcatgcacttcgtatccaaagactataaggcagcgaccatgcctcctaacagtggagtaaatacccgagagcactctctctctagaagatcaattttgacttgcagggagtcgtaagtatggtggccctcaccacctcaaagtgtgagtacagaaatactacacaggagaggaaagaaaacaaagggagctgaggtgctgggccaaatgtaggtgacttgctagttttgctcttctaaacttctcctcctgcttcttctcttctttctcttcctctttctcctccctgttggtctggttctttcccttcctccttttcctccagcaattgtatctattaagcacttattaccttcttggtgttgtgctgaacacttgccacatttattattttatctggctgatgagtctttttctcaggatggtggagcatgactacaggttttgggcaaaggtatttgcctatctaaggttgaagtaggtattttgacaccatttgcctatataactataatgatgataatgtaatggccatcacagcaatatccacctggcagtattaaattgcagttacttcttctacccctccccttctacccactcttcagctgataaactgacaagtatacagttgtagtgtcaagtggatggtaatttttgctttcatggattttaatgtgcattttctatgtcttcttatgaaaaaccccagataataaagatatctgctttccatgtaggtagtaagcctcatatcaacatagactgaatatgacatgtcaccaggaatttaattctagcattttcccacatcctcctaaaaataacttctccttttcctcctttctaaaaatggcttacattttttccttcaagaactagaaaaatgtagtcaaaaattattcttatatatcttacatttttctaggaaaaaaataagcagtagttattagtagataggcttctgttaagtttttaggaggctgagacaggcagatcacaaggtcaggagtttgagaccagcctggccaacatagtgaaatactgtctctactaaaaatacaaaaattagctgggcgtggtggcaggcgcctgcagttccagctacttcggagactgaggcaggagaatcgcctgaactggggaggtggaggttgcagtgagccaagatcacgccactgcacttcagcctgggcaacagagtgagactctatctcaaaaaaaaaaaaagttatttattttaacaaggctctaagtaattctttctagaagtcaaagaaagatatattgaaatatatttatatatttgttgcttggtacaacctaagtgatgtttggaaaactgctctgtggaaacatgatgatttaaacaaagatgatggagatgttttaaaatataggagtttcaaataaatttatttgcaataacaaattgtaaaacatcaaagagtgcccattcaatccctattttctatgaggccttataaagtgtttcttcttatctgttagatttaaattctgtacacataaaaatcttatattcaggggaaaatccagagttttgcttactgaatacatcttctttattttggggaaggcatacattgaatagatttaaaattataaataaatgtattcatcagaaataacagaagcaacatttcatagtatggacttaacccgttaatccaattggctcaagcaaaagctatttgattggtatcagcatcctttttttttctttttttttgagacggagtctcgctctgtcgcccaggctggagtgcagtggcgcgatctcggctcactgcaaggtccgcctcccgggttcacgccattctcctgcctcagcctcccgagtagctcggactacaggcgcctgccaccacgcccagctaatttttttgtatttttagtagagacggggtttcaccgtgttagccaggacggtcttgatctcctgacctcgtgatccgcccgcctcggcctctcaaagtgctgggattacaggcgtgagccaccgcgcccagccagaacactttcttatatacgaattgacataacttactactttggttaggcagtttccatttgtttttcatcttggtaaagacgaatggtaaaattcaaatttggtaaaatcaagggcagagagagagtcattgcatcttaaattaagaaccatgggccgggctcggtggctcacgcctgtgatcccagcactttgggaggctgaggcgggcagatcatgaggtcaggagatcgagaccatcctggctaacacggtgaaaccccgactctaataaaaatacaaaaaaaaaattaaattaaaaaaataaaattagccgggcgtggtggcaggcgcctgtagtcccagctactcgagaggctgaggcaggagaatggtgtgaacctgggaggcggagtttgcagtgagccgagatcctgccactgcactccagcctgggagagagagcgagactatgtctcaaaaaacaaaaaaacaaaacaaaaaaaaaaaacaaaaccatgaaaaaacaaaatgtggtttattatggctcaaaaattgcaattaacctacattaagcgtttttcttcatcattattccttgtattcatagagcataattatgacattatattcaatactaaatgagtggctttaccagattaagagtaatatcatgatatttctggattattagggtcattaaagattagcaaaaaagaacaggaaattcagaaaattaaaacttgcctatttaaagatatctacattatcagtttctcataaggtttcctttttaatgttgattttactgttattattactagcctttaaggtgaaatatagttttaagtatgccattttttgaaaactattacttgtaacattttagcattattgtgatagaatctgggtccacttagcactattagataattttcttgatgccatactgtcacgtgaacattggatctaggtattatttgctctgtacaagaaatataaagattcaagtcttcttaaattccttcaaagacctcattcctgtatagaaacagccatggtactcaaaaattaagacaaaatagtagtgcctacccaattgcctgggtttttatactttgcttttctaaatgccacttctatttttgaaaattgtcttttgcatttctcgtaaggaaacacatagcaacttgtctccttgaatgaagagaggtgacaaataatttctccactgatggcattattgtgattgtggcatggtcttgaacccgtgaaacgccaaaaataataagtgaagcagtaaaaaactcaagagagaggctagtgagggttcatgagtcagagaacatatatcttactcaattctcttattaaagcagatgtcattactgaacgtcaggcttagtttttttctgccttttggagtgttttttttttttttttaaagaggataataataaaattgcaaacccattccataattgtaggccaggtggagtgctcattttcacattagagcttgtgcaatctggagggaaatttggtttagtattactcgtgagttggtggatcagatgaaagccagtcaagtggaagagaggactgtgtgaagtgcgctggctcccctgataattagaatgctgcaggcgttcctccagtcagctaatagatttccccagctcctctgtgccaggtgaaaatttcctcattaaggggaatttattccatttccttttatcatttattattgaagactaagtgtgagtggaggaaatttcagagatgacagggaggaattttaaacaacaacaacaatatctacattggaagtcttagagaatgaggagaaaggcttgtattgtttgtaaaccagagaacacaccagagactttttgctatagaagccgagccatgctgtctcaccattaaaagattatggcagagtgtgtaaaagtctgatggtctggttttaagacatttttttcaccttctaaaatttcagtcattttgtgctgctaagtagaaagaaactgaagattatgaaaaggccagcatcacagccatttggtgtgttgttttattgtatagattctattatgcaatgatgaaagtctaaccttttgtaaagtttgcccttgaactctcaaagcaaggcaaactggcacgggaaagaatagttgtatatataatagcatattttagaggacacagttctgaaatatggatttaatgtgtatatgttcaaaagagtaaaaattaacataaaatactagtacatacaaatatatatcaaagaacagaaggataatttattatgcatattttaaaattgtgtgcttttgtgcaatatgctttcttcagctgatcacatttctagctgggcataaagctgtcttgatttacaacataatataaatggagtattccctattgaggtttcaaaaagcagtgttgaattataaattcagtatttatatttcttttagtaattattctgttttgagtttgtttcaaattaaggtttttattttccttcagaaaaataaaaatgttatagccttgttttgaaaataagcttttacctagtttgatcaaaaaaacaaaaacaaaaacccaccatgatggaaattggttttggcaaacaaaatggagggagcataatgtgggcagataaagatgaggaacatctatctgagtctccacattgttaaatgagctttatgtttgcttaagattatgcatcttgtatttatttgactctgaggagatttaacctgatctaaatcactgccccacaactaatgaattgtgtctttgaactgtctttttttttctttgattataatgggacacacaatacaattttgtatcagaataagctgggactaaagtcaattttctactgtgtataatgacatctcagccagcctggtgttacaccaaagagagaaaacagaggagaggaaaggtgaggacaatacagagaattgacctgcttccattaggagtaccttgtggaattaggcagcactgactgtgggaagggatctaacttgcctgtgcctctctaatggccctggtgggtcagtatcaacaatgatttctcagtgaggaggattgctaagtgttttgcactatttcatgatcatgtctaaagagcagaaataaccagagagaccatgaacaaaatactatagaaattacattactttggacatccaatgatcacacatacccaatatctgtattcaagttaaggtagatgaacatgaatgtactaatataccatttcaatttaatacattctaatttttaagacatttaaaaatattgtattctgttattgatctagttatttgaaaattgggcagaagttgaagcagtttttggctcaccaagaaaatgtcctaagaatcaactagtgagattaaaatatgcaaggtgcaggtctagcttgatacatctgtttcaaaattctcacctagtatgatttaaagggatgcctatgtagaaagttttcactcccattctgaagtatcattcacaatcattattttgtgttactgttgctcttctcagacattttctttaaattatgaaaactctctggtgtgggaaatgctatgggcaggggagcagtaacagttgagttagtcttagtgacagatggcttttttttttcgtcaccagagctgagtacaaaattaactcacttcactttttaatgcacaaggccaattcttatcaatcaacctttttcttttctctcttctttctcgttctcccttctttcttattatttttatttctttgctgataagtgttcagttttattagtaggtagaggcagaagactttgtatatttgctagagatgtctacatacattctgttagactcttgtggtgaaaaagaacaagagaaattatgcatattccagaaatgaaaatactacattcctgaatgaaaatactgcattgctgaatgtagacgacacaaatgcaaatttattgcatccctaatagaaatgtgaggaatctaattttttcttatttaataccattatttataattttcattttaaacaacatagcgacctttgaaaacctgactggtattccatgtaagaaggaatgcaaacaaataattaaagaccctctaaaaattgcaacaacaaacaaatagaaaaacctgactgaaaaagctaaagataactacatgacttctgcttatcttagcatttgaagaacccgcacttatggtgctgccgtgttagcccatggtcacaattatagatgtgatggttcttttcaaggcatgtgttttaagtgtatctggatgactgttcttcagagttaggattttagtcatttaagtaaaagtggttattgttctaatttagaaaaatcgcttatttgtcaagcacttccaccgaaaggctgagtgcatacttgcacataaacaaatgagcaattggtttgggagcatattcttggcaaggaaagtggaaacatacctttctaaaacaaataacaacaataacaaaaaaaaatcttcgccaggcgcggtggctcacgcctgtaatcccagcactttgggaggccgaggcaggcggatcacaaggtcaggagatcaagaccatcctggctaagacggtgaaactccgtctctactaaaaatacaaaaaattagccaggcgtgatggcggacacctgtcgtcccagctactcgggaggctgaggcagcagaatggtgtgagcccgggaggcggagcttgcagtgagccgagatcttgctactgcacttcagcctgggcgacagagcgagactccgtctcaaaagaaaaaaaaaatgtttcctctactttcaaaattaatttctctctctctctctttttcttgaaagtaaaagtaaccacaaactttggtgtttccaaggctctctgaagctctaaagtcacctctggggtaaagcctttccagacttctccattggcagctggggtcccctgccctgagccacggcttcaacttgtgcacacttctcccacagcacctctcatgatgtagacatatcattggctatttgtgcttcctaacatactctgacctcctaaatgtaagagtacaatatttcatcttccatcattaatacaggcaggacaggtctgatacagagcacgtactcactaaatgttaaagcagtaatgacaatgaatgtggctaccctcaccatccagtttcctcagtatgtttcccatacgtgccatgtccactgctgctctcaaacaatagccaatactgttgccattgcctattgtacacctgtcaactcctttatctacataaagttgaactttgttttttcttttttgaggtggagtctccgttgtctgagctggagtgcagtggcgtgatctcggctcactgcaacccccacctcctgggttcaagtgattctcttgtctcagcctcttgagtagctgggattacaggcacctgccactatgcccagctagctttttgtattttttgtagagacggggtttcaccatgttggccaggctggtctcaaactcctgacctcgtgattcaccctcctcagcctcccgaagtgctggtattacaggtgtgagccaccacacccggccaagttgaactttatttatagctctgttctcatccctccactgctgtagtgtttctcaagtacaacctttcacactattatctttctctggcctcacgtagcaccacatagcttatccctccataaagtgttttgaatcactatcatttcattgtctcaaatattgtttccttatcttctggggcagcactgttcagtagaaatttctgtgatgatgaaatattctgtaatctgcactgtctgacactggagccactgaccatgtgtggctgttgagcacttgaaacctggctttggtgactgtagctctaaatttttggtcttaaaagatttaattagtttttcaatttaaataaccacatgtggctaggggctgctatgttggatggcacagttctaaagcacagggcttggcacacatactaagtcagcaataatacttaatattggattgcattcaagaatttgacaggaaaatgcattgctctgagagaatgcttatcaaatacttgggaaaactaaattcaaaataagaataaaaagagaagaaattaaattcaatgggagatttaacacactgatttgagacagaagagaatttaggtgcaatagaaaaagcaaattgactaggaagagctgtagctgcaaaaatttaaactaatactgacactggaaatccagggaaatagccattatatacaccagcttgattttttcttctccaaactcagaatatgaattaattaaagcagattcatgattagaatgaacaaaatgcaatagatttaatccaattacattttattaacagcatttcatgaaaatgttttcttaaggcaagttagatcttctggcaatacactattttaatttcattgtattgactatcaaactattataattgaattgtattgtattaacaattacatgaaatagctggcccacaggtatctggttaaagatgcttttacagtagtattttattcttctgtcccttagctctttacaaattatttttgcatgcattttgaaatctagttatgagctaatttcaatcacttctttgtcttttctataaaataaaaacctagggaattgaagtttttatatttatccttcatttatttataatttatattcataaattatatttacatttaatttataaaatatatgcattttatttatatgtttatattacttatatttatccttcatttatttattttcataaatatttattgaatgctgtctgtgggccagataatgtggtagatttggggagtaatctggtaaataagccaaatgtattctttgcctttatggaacttaaatccagcaggaaaaagcctgattgacgaataaaagttaggagacattaaaagtatcaggtgataatggacatgctaaactgtatgattctatgtccatcgttccaagcaaaagaggcagtaaaaagcacaagaagttcagtgtggatgacagcaaaccaaaaggcttcacaaatgaggcttggctttagttggactttgaagggctgctgagggtcagggagaagttgagaaggtaaaaggaatgttaaaggtattacagatgagagaaacaacacaaataaagtctacgctatggaaaggagtagggggaaaataagacaaatctagtttgagtggaaaacaattataaaatgacaaaactgtcttctcaacatagacagatgggtgatattagtaagtagaggtaatttagggagaggatatccaaactgatgcaatgttgggacacctaggtgaagatgattctcaaagttcatatgcataaagacctggagcacaggtcagatgttggagaaccggccatggatttgggaattgtcaaccagtcatgctacttgcacccatgacagtggctaaatttagagagggagagagggaagacaaaagcaggtaacaaagggtagagccgtgggtaggggtagggggaaacccaaaactagtaaatggtagttttgagtaataaagtagagcgagaagccacttagtagaagccagaatatctttttaaaaaatagatcatcaaaagggtcttgtgatgacaggttgaggaaaatgaaaactgaaaaagggctcctggatttagagagtgaggtctctgattattactaatgagcacatttattagaacagtaaatgcacttgccattttttataaaagcagcagggaagaggtcgcatagagtgtgaaagcaggagatcagagattgtcagctttgcaaatagaagacttcatagaggctagaagattgagtgggttagttatttgtgtatttttaaaagataacaagacttaaatatgtttgaaggtggaaaataagaagcccttggtgttcttgaaattgaacttgtcaccgctttttattgtttttggtctaaacttgaatctctcttttctattaaatcctagtgagtccatgacagaagaaaccctgaaaagggcaaaggagattgggttctcagataagcagatttcaaaatgccttgggctcactgaggcccagacaagggagctgaggttaaagaaaaacatccacccttgggttaaacaggtaaaggagtttcccttttcccccatcccccactgacaggatttctgtggtaaaacgtaggcacccattcaaaaggccattgttaataaaaagaggagtggaattaagaagtgacaatactcatccggttgatgctcataatgtcaccaattttattcagcaagtgattaatttttacttaaaagggaaagaaggaaaggacactaggatgtaaagataagagtgagtacctgattttcttggcctaactgaacaaaacaaaacaaaaatttaaactctcctctgctttttgacctgtgttcaaatatgtaagtagttaagaaatccttagtgtaattgaaggacttgaaatttcctagcatggtggctgaccctcttgaaaataatagttatctcctttggcagtaactttttacagggtaatactttatattaagtgccccatgattatggttcatttagtattcattgtgatagggctgggcataatgagctcatctagtattcatgacaatcacgcatgaacattcataggtgtgctgttgtgattttttttcctttggcctttaatggaagggatgtcttagtttaaagtaccaccagctggtttttgtcctttaaaatcattgacttttcactgtgtgctcaaggggcacgtgcatacccttaggtctcaagctttttgctaaatattttccactcagcgattattatctttcttccttctcacctgccttacaccagcttgccctgtcggccccaaattcttgctcactaagctgagttactggcccttgagagtggaattgatttccaaatatgttcaatgagatcttgttctccccccgttcatcccctatggctttatggtagttgtgtcatcccaccgctcagtgccacaggccacttaaatcctgcgcattaatttgcaagccaaagagatccttacgtataggtcattttgctcagattttagatttcatatacagctgcttttagagagctggtggggtaagtcttcctagtaaccagttgactataggaccactttgcgatgttcatgagagttactattactactagtgatccaatgccctgtttctcaggtgataactagaccacatcactattttctctctcttattttcagaattagaaagcaattccacgggtcatacattttcctgtttgcatactttacagtaataggaattaaaggaatatgtatataaagcacaaaaaatttagtcttgaaaaaattataataacattcttatttgtttattttatttgttttctcttacagattgatacactggctgcagaatacccatcagtaacaaactatctctatgttacctacaatggtcaggtaggaatgggcaaattggcctatccagaaagctctagatttcatagacagttcacattagggaatatatattttttacctctttggatatctaggtaataaaaaaaggcatcatggccgggcgcggtggctcacgcctgtaatcccagcactttgggaggccgaggcgggtggatcatgaggtcaggagatcgagaccatcctggctaacaaggtgaaaccccgtctctactaaaaatacaaaaaattagccgggcgcggtggcgggcgcctgtagtcccagctactcgggaggctgaggcaggagaatggcgtgaacccgggaagcggagcttgcagtgagccgagattgcgccactgcagtccgcagtccggcctgggcgacagagcgagactccgtctcaaaaaaaaaaaaaaaaaaaaaaaaaaggcatcatgtgtgtcaggtatgatgatatgtttctgtactcagtcttttaagaactgccttaagataatgaaatcaaacaaatgaaaaattaaggacaatgactacatgatcatacaattatgctatgttctcatgactatttaatttaaaaaattctgccatatctattttttataaataagtagggcttgtataacactttatacttatgggtttccagagactaatagagaatacatgttaacaagaggaagatgagaaatacatacttaatgataggacaactagtttaattaaatggaataataacacttaatgatttctgcatcttccttttcttatttcctcaggagcatgatgtcaattttgatgaccatggaatgatggtgctaggctgtggtccatatcacattggtaaaataataaattatgtgtatataggactttacacaatttatatagttttcttcatacatgttaattccattattccaagaactatatcaaataaatgctgtaatatatgttttgcaaattaggaagctggggttcagaaaaataaaacccaaatatatacagctatttagtggtagagtgggactcaaatgcaggtctcaactacaaattctatctcctctcatttcactgtgtaacttaattttcatcctttttaactgaattgagcctttcactggagttgggaatggattagattttgacctgttatcttctagcatagtttttcataaggatctacatttactcaaggactttatacattagccagaaattacattgcagataccacctctgacctcatcctacgtaacatatatgactttcgtttacctcaaatgcaaaaatcttgtctgtttggtgcatgggtagagcattatgtaggtgaattaaaacataatcaccagagatatgacatttctctccagtcaattaaataaccactaaagattattacagatgcaagtatgtattttaatggacagtgatattagtcaacatatggatttaatatttaatctccacaaagcattataatatggaaatgataaaaatctatgatttgaatatatttaaatcttattctattactttaagcatagtttatttagtttttacaatgaactaagagcttcaggatatgttagtttaccaatctttggacaaatcttgaagtaggacaaaaatgttatatctttaccaccttagtcattgtcttagtccatttgtgctgctgtaacaaaatacctgagattgggtaatttataaataaattctcacagttctaggggctgggaagtccaaaatcaagtgccaggaagttcagttgtctggtgagacataggtctctgcttctaagatggcgccttaaaccttgtgcctcctataaggaaggaatgctgtctttacatggcagaaggcacaacagcacaaagggaacaaattccctccatcaaaccctcacccccagttttttctgagacaaggtcttactatgtcacctaggctggaatgcagtggtatgatcatggctcactgtagccttgatgtcccaggctcaagcactcctcccacctcagcctccctagaagctgggcctataggcatgtgccatcatgcttggcttatttttatttttattttttgtagagatggaatttttctgtgttggccaggctagtctcacacttctggactcaagcgatcctcctgcctcagcctcccaaagtgctggtattacaggcaggagccactacagctagcaagcttttctataacagcattaatctattcatgagggatctgcacttatgaactaaaaccctcctaaaaggccccacctcccagcactgttgcattggtgactaagtgttctaacacatggatttcaggagacacgttcaggccatggcagttatcttatggtgaaatagcctgaccatttcaccagcatctacctgtctactctctggagtactttttcttccttttcaaattttacctattcatgcagtaattctgcattatatcaggatccaaagaagactagtcaagctaataatcaagtgtgtgcttacttgatagttgccattaatatgccagtatatttgaataacgtgttttcacaagaatttttagaagacaatatcttaatgcaaagaattagtacaagtctgtggactttcaattctatggcatcccagtagacgtgatattttgaggtgtttaggccattattacacttcagatttctttatagaaggtcactcactctgcatgggtggccttgccaagtttaaaaggatatgcttggaaaagataggactcttcaatcaatcaggatatgtcagagctgcaaggcacctcagggatcattaggttcagccctcagacagcagattaagtggaaaggctgaaaaaagagcacaggtatcctcatcactggattaactatttttgtgtattgaggtcaatatattcactttgaatttcttttcagtaagtgagggttatttttatcattaaaattacctcccattaacattgaagttctaaatacttcaaatattgagattttctattgcagaatttagcatatatgacaagcccaatatttccttgctgtttaattagtacccatttttcctactactaatacagtatgcatcatgggtttgaaatttatatcttggagtttaaaaaattgaattgaaaatcattagcttccttagcctggactgactggtgatacatttctgcttctctttgtattgtaacttcgtgcttctcttatcccttttgccaatctcattgtctctgcaggcagcagtgtggaatttgattggtgtgctgtctctagtatccgcacactgcgtcaacttggcaagaagacggtggtggtgaattgcaatcctgagactgtgagcacagactttgatgagtgtgacaaactgtactttgaagagttgtccttggagagaatcctagacatctaccatcaggaggtaagaaaagaaaaacagaaaaaaaagaaaaaagaagacagatatatgtagtatacactttatatatatgcattctggtatatagatgtatatagtaattcctcttagaagaaagggctgccagtggcatccattgtcttattttgtagtaaaactctaaaaaaaatcactccattcttatatttttgagcccctggcccagagtgattatttttcacataaagtttttatttacattttctttctaagggtttcagctagattgaaaactctacttggtaacatgtgccagatacatattaactaatacaagatgatccctcataaatatcttgcagagtgattgaattggtcatctagacatacaataaacagcctctttctagtttgtgtgatgtggtttaatgataaacagttccagttccctgaaaatagtcaattgctcacaaaagaccagttaattccttgttccatcagatgaagccattagtcttcagtttaagatcaatgagttcattgtgaataattttgcttcctttatagctttcacttacagttgttcctccattcccatcccaatattactgagtatcttcactgtgaattcatgtgattgcagattactataagactgtagaacaaaataaattatcttataattaaaataaaagctactggaaaattttagtgatgtccagtagttaggcctttgatattattacagttattattactttttaccagaaaatcatctctatgtggaaaatatggtcaattagaaggaaaaaagtactaaattggaaccaaaatacttaaattttagttttgactgacaacctcattgatttctttaagttacataaattctccgtgctttatctttattttaaatgaatcgtctgagtataaacacatgctacttgcaaatactgtgaagttaacatagagtttatggccgaagtcagattgtaaagtataaagtatagtgctagaataatgttattattttactattacaaaagaaagtagacaagtttaggaaggatgtataattatagttgtctacttgggcctggcctactaatcctttaataaaattgatccattaaatagaatatatagcattttttagacctctctctgacatggttgtttttaaatcactccttaatattcatttgagatagacaggtggggatcaaaataagtgcatcccacaaatatttctcgaacaccttgtaaatccaggttcagtatgatagacagctggaaaaacaggttcttatcttcaagacattaacaataaaactagtatctgtgatataaatgtgaaaagtcaaatactaatttaaaaatattaaaaaacattacagatgatagcagcaggcattttgcatataattaattatgtcctcatgaaatggtttaaagaaagatgaaaaacttctatgactgcttttggatacaattatacatggctattaatgagatttgtttattaaaactgaagtcagtattatagaaagaaagaagttggcccttctttgaaactaattggtatttaaaatatagtattactatatattaggaggtaatttaaaatatgttggcggacataatatgatgtacatatgtaaatgtagacaatggtacttctgtcacaaaacaagttaaatgaatgaattaatgacagacattaattagtgataggcaaaacccattagagaatgcatgactcgagacagaattgaggttcatttatatcatttggtttaattgtaattaaatgtaatcctaaaatactgcctaaactataaatcatttttactaacatgtaaattagtaaaatataaagcatcatccttctcattggcaggtgtacagatagtagaattttataaattggagataattcataaaattccaaaaaccatggccatttgtaatgaggcaaatactacttctgttagaaaaattttctcacatgacattctttccataatacatctaatttgtgcataaaaataaggactaaccaaagtgattagtggccaggataagttaagatgttctcaaataagcttgaagtatttccttttcatgtttttctattgaaaataagtttctggttcagaaatattcttgtgctatggtaagttagtgatatcaggttttaaaaaacagaaaactaagatgggtaaaaaggatgcaaacagatctaggtatgattaatggaattttgggagcttaatggaattttgggcctaaatattttagaaatctattaaacaatatttgaaatttagaatattttatttcagtagatttcttgaaactattcaggcctgatggctatgataaggatgatgatttacctgtgtgggttaccaggttctcatccctttgttcctacatgtcccgtgatatttggtgttggatcaatttgagattggattattccataaaactgtgctatattaacattttacaaacatgttctcatactgaattccttttgccctgtgggaaaacctgcacgacaccatcacactgttactctaaaagattcctgaggccgtgatttgtcttcccattgatggtctctgattctagtcgtcaatgatgagaatttggttttgtgctgaaagcttttctactactttccaaaaaaaaaaagtagttttttaaaaatagcttttctcttattctttaacattaactacacctgaaatgagccagaaaagtagagttaacttaagattctaatatttggtctattacttcagcatagctgaaagtgtattagtttcagcatagttgaaattacaatctatagagttgagttcaggccggggatggtggctcacgcctgtaatcccaggatttggggaggctaaggagggtagatcacttgaggccaggagttcaagaccagcctggaccccatctctactaaaaataaaaaaaattagctgggcgtggtggtgcatgcctgtaatcccagctactagggaagctgaggcacgagaattccttgaacctgggaggcggagattgcagtgagctgagatcatgccactgcactccagcgttcatgtacaagctctatacatgtatttgctagataagggatatgggtgagtcacttcacctttactgagcctcagtttctttagctgtaaaatggggacagtaataatcacctcagaaggatagtgtgaaagtcaaaacagatagtccaggatacatagtagaatctttattaaagagtagcagctattatcttactattgttttgaatttattgcaaaacagaatttttaattccttaaaaagcagaaatttctttaaaaacaagtcaatttaatacagctaagttgaaaaatattgatgtgtttattaaagccttttattacactttaagctcctatttagtctaattgactcaaacttttgctataagttgctacttctccctcagtttaaaaaaattattctaaaatccttcatataagagattttttgtgtccatttaatggagtaatttgtttttaagtctctaaaacattaacaacactgctgataaacccaacataataaggaaataaaaagattatagccaagagagtattttaaaggtttttgcaaaaatttatattgaacatattttaaaataaaaatagtttaagtacacttataaatatgcaaaatggtggattattattttcagtactgtttacaatgcctttaagcactcaattgcagggtgtttgtttagttacacagtaccgtaattgctctcatcagacagaaattagcctcatcccttataagagtatttcagaacaattttaaataatgacaaaatatatttggcacatatctatcattttggcagttctactaatattcattagtgggtcattaggacacacacaaattatgctaagctcaatggcctatcagatatatgatttttgatattaataatcatgtcttatttatttatacacttacggtatataggacctttaatgtttagtgtttaggcaggtattatcctaattttatacacaagaagactaaacgttgggggaaagttcagtcttgttgtctataaaattagacaagaaggggtgggtggtacacagaaggaaccaagttaggaagggacttcgactggaaatctatttcctcaccgtctcacgctggtttaccctcactgctacaacaacacctgtcttgagaaactttgagatttagtggactatttttttttttcttgaagttttgactgctaataggagatttggacttatggaagaaaatcttacacaaatgtctgaaataaggctaaagattctggcactgtttgtaaagcaagtagtgaggcagtaggaactaaaatcagttactaggtactgttgacaggtaccaaggctgcagccaaggagaggggaaggtggaaggtcatcaaagtggaaggacatcaaagtgggacctgagatctaggctggaactaaggggtagctaaaggttagataagctggaagagaagagaaaggaaacaacagccagggaagtttcagtggtgcagagaatttgttagtgggaaaatacctagttggagctaatgagtagtcttttgagctgagaggggtgataatagataagactggaaagtcttaagtgccctgggggtcaaaagtttatgctttattctctaggcagtggaaacctttggagaactctgagtgtaggagcaatttgatgaagcagacttgcttaatctgaatgtgaagtgctgagatggaggtgtacaggagaagggagtgttaaaagaagaaatctgtattcagttaggaatttccagcagtagtccaggaattaattgattatagcatagagtacatagcaaacatttattgacttgattttcctttccatttgccacacatgtgagtgtcacaaatgatattcacgtgtacttgtatggaaatcttgcacagattttagcatctaagtgccagaaagtaaaaattttgtggcatcatttaacagtattcattggtaggagagatgtaaatatcacagtcaggttaagaattatcagtaaggaaatagacacaatattagcatagttgtccattcataatgaagttattccaatggctgatattgtgagtgtattttccaggcatgtggtggctgcatcatatcagttggaggccagattccaaacaacctggcagttcctctatacaagaatggtgtcaagatcatgggcacaagccccctgcagatcgacagggctgaggatcgctccatcttctcagctgtcttggatgagctgaaggtggctcaggcaccttggaaagctgttaatactttggtaaggagagaaacaagtatctgtttctaatgttctattttgaagagctgcaacctgaatgttgactgaatgttgactattggatatgttaactacagggcagatagaatgcatacacttagtgaatttaaagttgttgtatatccatgattgcagttaatgctgattatgagttgatagcagtattctcattaagattcagacaatgaaaataatttcaaaccagttttgaacaagatttgatatttagaatcagaagctaggaattttatgtatttcagtgtccaatttacatttaatggtgcctttagagaataaagaagctgggctaccactcgagctaatgatacattctgtaattttattgcatattttaaactactcatacatttttattgttgtttctattaattagaatgaagcactggaatttgcaaagtctgtggactacccctgcttgttgaggccttcctatgttttgaggtaacactgtatattgttttccaaaacaatgattcaaaaattgggagatacagaaatgcatgctgtatgctaatagcactagggttctatatgtagtaatttataaatccattaacaatttccaaaccatcacagccagtttaaggaccaatgtgtggtcttctagtttaatgctttcccttcagggagtggccataggaagactacagttcttcatctagaagtgtagtgtaaggcatctccttaccaaacagagagggtagctttatattaaagaacaggacaatttaaaaaagacacacaaattgaggtatctctcgccagcgtgttttctgatacccagaaatgacagcttatctttgactattgtcagcaccttctgatagtgcctttgttttaaaattttcagtttttgagatccgattgtttaatagataaattataagggtgaggaacaggaacagtgaggatcttttatattaaactttaaaacaaagttttatcataaaagaagaagttgtgaattatcacttactttcttcagatgttaccacatgtaaggaacaacttcaccaaacaagggataataaaagaaacacaatttgctttgcacaatttgaaagtgtaaatggaatttgagatgggttcctttaaaatgatgaaaatgaaaaatttcaaacgaggtggaaatctttttatttaaatgtcattttgtgtaaaccatagtctaataatactacctgtttgaggagttaatgtaaactaatttaaacatgcacacatttaaggaaggatggaaaataaaacagctttgactatcacacttctttttccttttttgcaatctatatctttgttccagtttcacatactctgaatgataagcattattgctctagccttcctctcttaaacaaatgaagcaactgaaagccctttaggcagaaatttgtaataggataaactggtgaggtgatggatatataaataacttgattgactttctataatgtatacatagatcaaaacatcacacaatacctcataaatatatgcaattactatttgccaattaaaaatacattttaacattaaaagataaatttgtagtagtgtaaaagaggtaaatgctgctgtttaaaagcaaagtaatatttttcttatttttatttttgctttctgttactcctcctctcctaccctcccaacccattttgcaaatgtcaaaattcagagtaaattgatttcagatagcattttttctcaagcatttaaaaagaaaggatatagttgaaaaggttttattcacatactgcacattgtattagcaaatattactttaaaaattgattcatttgcaatctggttgagggagtagcataacctgctttgacaacagagcagtaggctaagatcagctgttgataatgaactctgaagaaacaggttagggaaatcaggttctgggctgaatcctgttaaggcttaagaattacctggaaccagcagagtgttaatgtagcaaatcagaaagggcaaactttggagaagtataatttctagagctaccaggattccctttgggaattaatacaggtttactgaccccctacactttaccttcttccatcctcagcttcgtcagttttatactttggttgattgtcctggtgattaaatggagaaaagtctcaatttagcaagaggcaccttcttattcagccccgactggaactataggttgtctggaactgttctgagaaccagtcaagtctagtattagcataaacctgacctgctttttttccccttccttttccagtgggtctgctatgaatgtggtattctctgaggatgagatgaaaaaattcctagaagaggcgactagagtttctcaggtagtgtccaatttctttgtagtgactgttatctcttaataaacatgtagtgacatttatctcttaataaaatgtagtgacatttatctcttaatgcaaccttactttgtatgttttcttttcacacaatgtgttagaatgagttttcttttttcctcttctaccctctagtctcctaaaagaatgagaaaccttgaaggcattaaattataactagacttttaaggttggtggaaaaagaggaatacctgtgcatattttatcaaaacagattttagactccaggagtctaaaaggacaatgatttttgtttttctcatgaattagatgctggtcagggtatttctggaattcccagtctcaagggctgctcaaccatgctcaccattaacaagtgaaagctttcctgatttttaattttcacatctgggaactttgcctagtcaaacatgcaactttaatagtaagtccctcactcaactattttttattttttcctgttggcacattcagtttgtgagttaatacaagcatttcttattttgtggcaactcagccaccttcctccactgccccccagcctttaccttctccttcagtgttacctcagcatgatccatttaagatttacccagtggggttattgatcttgtattgtagaggataaaagtaatgttttccttttaaaagctttcaaaagcttgttggggcttttttttttaagggggaacaattcatagagaagagtttgatgttaggcaagtggaatttggagggaggaagagtgaaatcaggagcatttcaaagaggaataaagtgcgtggactgtttctgcacacatgacgctggatcgctcttctgtgtatgatagctgctccccaaggatgtttgagtggtaagagtagataagaataaagagtgagaagaggcaaagagtgtaaaagaagaaaaccaggtagactttgaattcatgtttgtgtgcaaatcagatagcttagaagggaatctttccagtgggccagttttcactaatggagtgagacaccaactgtcttctctattttattcctggccaggggtcctgccatgcggcccttttcagaggctggctactgtactcagctggtctcatgtgagtgatgaggcaggtgtcccctcttgtctgcctcgaacactccttataggatctcagtacaatatttttaaagtatttttcctttagcgtatggatagaatccatatgggaccaaagtttaataatagagatgttgtgattgagtactttacagttcaatgttccctatcaaactacagcagcatctgggatactgaattcaatgactctagagtaaaaccagccccaatcaatcagtaatctatgtatgtattcatttatttatagcacctgttatatggtggcattgttctcagtatcaggaattgtaatcgtgaaaagaaagatatggtctctactgtcacataggacttctttttgctaggctcaacagacttcaaataattacaattaaatatgatgagcaatgaacatcgcaatagagaaaatacaggatgttgagggagagtgtgaaagtcttgggctccagtccctgaggaagggacttttaaattgatacctgatggttgattcagaattaactgggcaaatggcttacattgtgggagtaggaggaagaaaggaacagcatttatgaaggtctgaagatgagaaagagtagggagtttctcaaaactgataaagcattccttatatggctaggacatcaaacatgatgctgattattaatgatggtgcagaagtagtcagggaccagataaaggagactttattggtcattataatgagtttgaattttagtcatattttttattttaaaaagatgagtgtgctgtagtacacagagtgaattatggggcaagaccaaattcatggaaagaggtgagtgagttgttgctatagctcagggtagagatgacagtgcctcggattagagtaatgacactaaagatggagagaaatagtaagaacatgcattgaaaagaattagtgaatgaatggaggtggagggtgaaagaggataaaggataactcctgagttttctgccttggataactgggtagacagtgatgccatttattgagatagggaacactgaggaaggagaaaagtatagagggaggaattatatatttattttttaaccttttgaatgtgaactgcctgtgaggaatccaagtggatatgatttaaaggcaagggttattataataggtttggaattgaggaccaagatcatggctagagatagagaaggaaatatagattttgaaatgaatagcatatcactttaatggaagatttgagaatgaaagcaatcactgagggagagagtatagaagaaaaggaacagctaagacagacactggaggaatactggcatttaaggcagagaggagaagaaagaaccacgaatgagctgaagaaagaagcacagaaatgtagtttacagataccaaaggaagaaagtgtttttcagaaggccagccttgtataatgctgcatttcatgatagtggtcagaaggagtttgtgttcagaggcaaaagggatattcagagaaggattcagggaggagatagcatatgacctaggccttgaagggtgagttgagatttgaaagatgaagctgaggagaaaagatagaatacacgtggggaagagacacatggaagcaagtgaatgcagggcctggtaaaaagacagtggcccaggttgttttagcctatggtacagaggagaagatatctaaaccctggagatcttccctcaacctcttcatttagtatggagaaaagcaagtggggattatgttgtggagggcatcccgaccctgacatggaggaaatgagtgtgggaagcacttcaagatgagaagtgtctgaaacagccaagaaaggaaggacttttgaagattaataaataaaaatacttgattttacagttacaaatgtcatactctagaagtggcataagacaaatcaactcgaggtaaaggatttcatctttggcccaataagaccaaaagaaaatgtcactctcattctgagttctcccacaattctcaaagagaaatatgatttagggagttgtagtgcttagaaaagataagggtagaaagaaagaaatattctgaaccaataataatatgtcattataaagtagagaaatattcatgattctgacagcagagaaagaagccatattctgcttcctccttagtcccctcttttctctaattgacctggatgcctatacttgaggattcagaactcatggtcagtttgctgagcactcaaagttggagaaagaccctctgcctcactacaagcaaagaacaaccttgttcttacagcacagattaggtaatgagtttatgtagttatgttcagccttgagtattttgcaagtattgccctgatacttataatacttaaagtacatggcttattgacactatatacatagcgttagctaaatgttcggctcctctgttttccttcgtgacaggagcacccagtggtgctgacaaaatttgttgaaggggcccgagaagtagaaatggacgctgttggcaaagatggaagggtaagtgctttattctcatctccttcattcctgccttctcatcatttttttctttaacaattttgaaatattgacaggttagaattcataatatctataaaacaggtctccagtaatagtggagaagctgtaaaaaaaatcaaattctctgacaattcagttgatgtgtcatgggtatcatatttcctatgtttcatactgttagaatttctctgatgatattcaaaagtaattatcatcctgtactcatcattccttttgaatagattttctctctcattttcttttgtctgtgtctttccttttatgtttcaatggctattatgaaaacatctaatacttttctttctgaagttcccaatcgaatcctggtttttcttctttcttcatttcccatcctcctccctttttattgggttaataaaggcaaagtcaaacagagtaaagtggataaggataataatattaaattggcttaccatatcacatcttgtatttctaatacaatgaatacctccaacttcaaggagaaatgaaaatgtgaagaatattttactttagttttatagttgtattaataatgcatttgtgacttctcttaaaatgtagtaagttatgttgtagggagtctatgccattttacttgctttaaggaaaaatacaaacttagcattcatcttctgctttgcaaatacttcaaaacactactgaagatgttaaatctttttctctttttccttccagattagcatttcagagtagatcttgttaataaaaatggtaatggtatctacttacaacagaatcacataatcttgagttgaaacacctttagagataatttattccagccctccaccctccaagtcagatattttctttacagcatccctggaaggtggtcatctgttttcttttaaacactttggtgatacaaagctcaacacattgtaagattatatattgtggtcacttttttttgacatctcaggtattctttatcttgaactaaggtctgtttccttggaagtcttatccctgattttctgagtttcagagcaaaaacttaatctatttccttttcaacatcttaagtatttgaaggttgagatataaaataagaggaacgtgatacctatatatggaagtggagaatgtaagactggcctagagacatttgtactttttcaaatactgtactggtaaaataatgctggtttgttggctttatttggctctaggtttgccagcatatgtgctttccctaaggttttctcagatatcaactattgcacatcgtcctgtactccctcttttggaaatgttccaggttattcacatagtttttaaattgccatgttaagaaatggacatagaactgcaggttgctgagctcagtggggtggggtgcctgagctcagtggggtgaatgcctccccttttccagacacttcaccaaaaaatgagctcttattattttataaataagctcttgtaaaaaatgagctcttacttatatgtggtctgttttatccttacaaacattctatgagcaggtaccattgttattcttatcttatcagaaaccaagactaagtaagtaaagcactttgcccaggtcacagaacagaaggatggaaactcaaatgtcactgttttaagacgttgctaaatctgataagcaaatctcttatgtaatttatttaagtcttttatacctacccaattattctcccttactctcagctgcatcatttcccaaggacacacatattattaacatataggttatagtgattgagaccacagactttggaatctgacagataatattcaaaatcctaactcagtcacataccagtcacctgaacctgggttatttattattacattacttttatttccttacttctaaaaaaggactagaatatttttcctttcgactccttcctctttcaaacttccatttaatgatctcttgatgagatctttgagacttatttttggtccacctaagttataccatttacctagatagatattgagctctcccaccttcttttctttcccagtgcctaaaagataaagatattttaagtgcttttcaaatgctttagcttcctatcctgttcttaaaagtcaatatgaattggtttagttttactcttttcctattacttatacccatgctaatcagtggatgagggaggtaggctctcagccactcttagctgcctctacaggaaatctgttactgcacagagaggcagcattttctactgctctcatcaggaatgtagcaagggaactacttagtgctcagtgcatctgttaggaccaaaggggaggatgagggagtagcttccttgaaggaagtacctgaaaactttttctaaaatcctttttttttttttttggccaggttatctctcatgccatctctgaacatgttgaagatgcaggtgtccactcgggagatgccactctgatgctgcccacacaaaccatcagccaaggggccattgaaaaggtcatcatttataaataaaagtggaagggaaaaggcaacactcagaaaaaaacacctaaggttttttttttttttttaaagctaggtagcaatgtaagatatgctgcaggttaaatttaatgatgaggctaacttccttgctctgagtcacctgggtattctaaagataacaattttcttcactgtccttttgagcccctttggttgtatgcgagtacaggggttctcaaacttgaatgtgcatcacagacacctggagagcttgttaaacacattgctggactccatcccccagtttctgatttcatatttctggatcgggctccagaatttgcgtttttcacaagtcctaaggtgatgctattgctgctagtctggggatggcagttagagaactgctactcctggggattctaatgtttcagggccacacacaggtgagcggcatctgaagcaatgcttctcagttaggagtggtgaaacaggtgtggaccagtcacttgagaactttctggaatctatgctttcccttctcacccttgacttcacctccaaacagcactttttgatatctcttttgagctccgagagccagccgtataaagaacttaacaaaaataatgactctgccttagtactcaatatgcactgctaggtgtacatttagaacctatcatctttttttttttttttttggagacggagtctcgctctttcacccgggtgggactgcagtggcgcgatctcggctgactgcaagctccgccttccgggttcacgccattctcctgcctcagcctcccgagtagctgggactacaggcacccgccactgcgcccagctaatgttttgtatttttagtagagacggggtttcaccatgttagccaggatggtctcgatcctgacgtcgtgatccgcccgcctcggcctcccaaagtgctgggattgcaggcgtgagccaccgcgcccagccgaacctatcatcttaaataagctttgaggaggtcccattagtctttaggtatattagatcaggctcaggctcagctctttttagtgagcttttccagtgaccctgccatcagaattcaggcagacctgtctctctggttgtacattgggctggattctgaaggtctttgttctagaaggtagaggtagcaggatactttgtaatagcagaagcattaaagaaaaaagtccttggatctcaaatgtacttcagtttctcatgtcaggataaatgatcctcagaactcaggattttccaaatctctcagagctcaatgtgtcatagactctacttcgttttatacccaattacattgctgaaccactcttgtgagcataatgagtgaggagctcttgctctttgtaatcaatgccccctcttggtatagggacattctggctctggttgaatacagggattcctgtatgtgacatgcagggcttccctgcagggaaacactgtttccttctgaacataatatctaaccttgtagagtccagggcaacagaaaagcaacacaaaagaaatctctctggtttctttgcagtaccatgtaatttcagggcctgtacctcccagcaggtaggtcattacattgatatagaggttggactgcagtttctggtgctaaggcaactagactgaaaggatttcatttaaccctcaatgtaaaaccaggttatataattgtaggtagataggggaatttggcagagagataatcgtgtacaattatttgttcttttcctattattttgtgtgtatttattgcatattattttgttaatagaaacctaatagtgccctccattataattattaatgtagatatatagctgtctgtgaagagaaattaaagacatccaaatttaaggtactgtgccttttagaaagttttcaaaaactaagatatgctctttagcacactatacgattatgctttttaattcaggtgaaggatgctacccggaagattgcaaaggcttttgccatctctggtccattcaacgtccaatttcttgtcaaaggaaatgatgtcttggtaagaaatgccaaggtgcctgagaggacaccaccactgtgttacgtcatgttggtttgcatctctctggtaatcttctctgtgaacaccagacaaagagcaactgagacccctggatctgtttgtgtctgagtgtggaatgatgcatagcatataatgtctaccttatttgaaggcccaggctattggtggcactgataagtcagttacagctttgtaaagcacactgatccactgggaaggtcactgtatgccacctacagtatagtatagatggatacggtgagacagactatcataaataaatggaatgtgtagagtagtcataaattctgtgtactgaaattctgctttactccttacccagagacgataccatttgcaaaaatgataaatgaactagattagtcctaattaatttagtctacttagtttaactaatcggtaactgccttagtctgttttgtgttgctataacagaatacttgagtctgggtaacttgtagagaaaaggggtttacttggcttatgattctggtggctagatagtctaagattggaaagctgaatctggtaagggtctcaggctgcttccattcatggtggagagtggcaagggagtgggcaggtgcagaggaatcagatggtgagagagaaagtaggggagagaaactgaagaaaccagactttttaacagcccactgttgtgggaattaatttactcctaccagactctgattatcctttttaatttaggtgaaggatgctaccccaacaggatagcattaatttattcatgaaaaatccacccctcggacccaaacacctcccactagtctccagcttccatcatggccacactggggaccaaatttcaacatgagttttgatggggacaaaccacatccagaccatagtagtaaccagcattgatttacctcctactcgcagtcatttggtggctgcaaaaatgtattaagcaagcctctgctctcaaaaaatactgtaatttagtgaaggttgggaagaaggtaaatttgtagaaaactataaagtagagtatcacagttgctagaggggatgtacaaataaaatggtattggaattatagagcagagagaacgtatttgccagtgtgtgtgcatgagcatgtatttgagcatcctatgcttggttaggggtagatcataaaagacttcaaggtagattttgtattgtgaactggatctcgcaaaacggttggaattttgacaagttaacgatggtagagagattattacacatagatagaacatcatctgtaaaggtgagaaaagagcatatttggagagagtaaatagttcagttgagtgagatgattttactgagtaaaatgggtgaactgggaaagtaagattgaggccaggagggtagtataagataaagacagtgaggtctccaatgaagcaagaggacagaaggccttcagggactagactttaatctgaagccagtggacatccagtgaaggttttcaggaggggtatggcattatttgagctctgcattaaactaaacctgtcagcagtgcatgggaatgcaatttggaaaaaggcatgaaagaaagttagagttcaaagatactgactgaaagtatcaggaaaaatccaagcagtaaggagaaaagagacaagattagcaaaacaagagctggtccccagttaataacagctggaaaccagtggtagagagaatattaatattgttgttactggctctcaatgtcctctttctcattttgaattttatctcttcaggtgattgagtgtaacttgagagcttctcgatccttcccctttgtttccaagactcttggggttgacttcattgatgtggccaccaaggtgatgattggagagaatgttgatgagaaacatcttccaacattggaccatcccataattcctgctgactatgttgcaattaaggtaacattttcaaaaatttattagtcattttatgagttctagtgaaattaaaagaacaatttgtcatcaaaaatcttgttacttttaaaaccttctaactaaagggttggactagggatttacatttcctttcaataatgtactgcagttgtactataggcaactttatgtgaactgttgtacatttcaaaaaaatttttaaaaccatctagaattgtataacttcaaaatcaattagctgagtgaattataagctttttgtgcagctgacacatgatggtgctagtttagctggtaaatagaaatccaggacacaccttgttaggataaagcttgaattgtgccaactcttacatgacttttgtaaaaagggttagcctgtggggttgattaaattcctaccacattgaccacctttgcttagtatatattttcttcagtggcatgatttttccatttgaaaaattgagacagctgttgctgtatatggtgctgtgcggttgttgaaattgatgacacctttataaagagtgaccaggaaaatttaaagtttgttcactaatttccaatacatatgtatattttaaataataccttaataataaagccattgtgatctcctagctgcatcagtatgatggtgcacagaattatgacctttaactacttggctggacaggcatgaggattagtgatatataaacgtatttgaattacgtagatgaagagcacaatgaaattaatatatttatgtaacattaatattgatatatttatgtaaaattgacaaatttctgatgttttcaaaaggtttccgttcctatatgtactagtgacttcaaccataattgtgttacagctcagacttggacttttgacttttatgatgggaactttaagttgaagttgtgaattaaaaatcttgtttaagctgataatgtaggatgccttgaattttatagtgcattgagatggaatgtgactttttatgttgggaggagaggtggcattttattcatggagactgtgacaaacatatattgttaaatcttttagtagaaaaatagagaaattttttttgagaccaacgattagtagccactgaaaaatatttttttccactggagattctatatatggattttaagttcatgtttctttattcatagttataggagtatgcttatttcttttagtaaattgatatatgaatttttaactaaaaataatattgatggatagatatgcttttttttttttttttttttgagacggagtcttgctctgtcaccctggctggagtgcagtgccatgatctcagctcactgcaacctctgccttccgggttcaagcaattctccccctcagccccccaagtagcccccaggtagctgggattataagcacatgccaccacgcccagctaatttttgcatttttagtagagatggggttttgccatgttggcaaagttggtcttaaactcctgacctcaggtgatccacctgcctcggcctcccaaagtgctgggattacaggtagatatgcattttttaaatgcactgtatcttctagcttactcattccctagttagctttgtatataaatcttagtttttttcaaattacttagtaattgtcaatcttaatagccctagtgaggctaattggtatcaacagatggggaaatagggaagctgaaatgcagaaatatgtaacttgaccaagatgatccagtgaaatgactcccaagctagaattcccatcataatttagaatgggtgccagaatcaatggagcaattgataaaattcctccatgtaccagataagtggacacatagcgagaaacaagaacttagtttttcatgaattgcatcagtaaaataaatgaaaaggaggcactcctatactctagttcatatgaaagttctgcacaaaggtgtttccaagcagaatgtttttcaaagcttttaagaggtgtcaacaacagtttaatgcctcagaaactggcttacagacagccatttctggcaaggtggcttgttgcaagttcaaatgatcagaacaagaagaggaatgtttccaaagcctatcaaagagaaaaaaatgtgtttgaactctgtctggagagaccaatgcccagtggactttgaaatcattccaataggaatatgcatgggccagattagaaacactggtccagactggtctcaggcgccctatttacagaattaatttgtgattatttaacctaaagttttggccaagagctcaagaaattcttggaatggagttttaaagccatctttcaagtcggatgcttggacccaagagattttttacatgtctactgtagcctaagtgaactctgtgagagatgatttgctaatatatttatcctctcttattcattttctacttttccctcacataatttttctccctgttttttttttttccaacaggctcccatgttttcctggccccggttgagggatgctgaccccattctgagatgtgagatggcttccactggagaggtaactagttaataatccatggaagctttcattaaatctactttgaaatctatggttttatgatttgaatacagtaaaataaagggaataaaaacatctgctatcagagtaagactcaaagagcttatgaattttgaatttaaaaaatattttacttctattttgaatagggtctaaattcttatttatattttaacatgggaatataatacatgtgttactaattcattttcacatgagaacatcttccaggtatttatctagacatccaagtaaatatcttctgtgtcttactttttatttaaaggttctcgggtctctctgtaacaacacctcattccctgccttgctgccatgaaattagatcatttgatttttactagtaatatggagaatgacagcattataaagatcatagacctaaacattgtggaatctgcagatacatgcaaaattttaggactacttttaacctcctggggattatctaaaaactataatggaatcggccactggatgtccctcttcacttgtgttggggctgtgtcagctgaaggtttctttaggattgtgaaatgtgtttcttgtaaagagctgtcagattctagaaagttctctccatgtcagtgtcaggacattttatgaatcacctagcccttgacagacttactagatacaaacttcagattctcatcagtgcatatccgagtggcaatatcagactgtgagccatcattgtttcctcttggtattaaggaaaacctaaaaggataaaatacttaattgcaacaaagtacgtgatgttttatatggttgcctggttacaagcaagatctgtgatgagaagccaagtgagacaagaaggcaggcagtcaggaataaatggctgtcctgtttgtatttggactcttagaaaggggactctttgcctctttgttgcttcttttaatttaagggcaaaaaaaaccttacttttaaatgaaggcactatgtacgtttcatctccagtcggtttaaggagacagtcttcaggttcttcttgatcccatggtcgctactactagtaatgctgattttagatggcccagggttcagatcagagagagatctattttccttcatactgttttatttttctttcttccttttttttttgaaacggagttttgctcgctcttgttgcccaggctggagtgcaacggcatgatctcagctcattgcagcctccacttcctgggttcaagcgattctcctgcctcaacctcctgagtagctgggattacaagcatgcaccaccacgcccggctaattttgtatttttagtagagatggcgtttctccatgtgggtcaggctggtctcgaactcctgacctcaggtgatccgcccgctacagacatgagccaccgcagccggcccatgctgttttctttagcatggcaaatttgttttcagtggttatgttcattctgcatccatacatatgttatgggagttattgaaatataaaaataagaaagaatgagaaattcagctcccctttgttatatctgtttctcaagtataaagagaatttttcttccattatttgaaagagtcgttaattccaagtgtcatacagtataatattacgaggtctgttttattactgacatcagaattctagcttagtaaaatcttaattatgcttcaaagagacattttcagtgtccaaatggcttgttgtaggattaaataaacattcagctactgatataagtaaggggcattttatgttcctagtggtaaagtggggatattagtcctaatctttaatggcacatttaactactttctatggttctgtagaaaatttttaaaacctcgtctgtgttgttgcatctgcactatgatgggattacccaattcttttcaatagaatttgagactcattaacttaggttgaccttatttaagttagttgcccagtacttgactgagtaaaatgttcactgtggagagaaaagcagcaaccacatgtactggtgaccagctgaaggttatagtcataagaacttttcttgcacagaaattgtaatttgcttaagaaatgaatttagccatcagtggttttttttttcttttttttcttttttattattattatactttaagttttagggtacatgtgcacaatgtgcaggttagttacatatgtatacatgtgccatgctggtgtgctgcagccattaactcatcatttagcattaggtatatctcctaatgctatccctcccccctccccccactccacaacagtccccagagtgtgatattccccttcctgtgtccatgtgttcccattgttcaattcccacctatgagtgagaacatgcggtgtttggttttttgtccttgcaatagtttactgagaatgacgatttccaatatcatccatgtccctacaaaggacatgaactcatcattttttatggctgcatagtattccatggtatatatgtgccacattttcttaatccagtctatcattgttggacatttgggttggttccaagtctttgctattgtgaatagtgccgtaataaacatacgtgtgcatgtgtctttatagcagcatgatttatagtcctttgggtatatacccagtaatgggatggctgggtcaaatggtatttctagttctagatccctgaggaatggccacactgacttccacaatggttgaactagtttacagtcccaccaacagtgtcaaagtgttcctatttctccacatcctctccagcacctgttgtttcctgactttttaatgattgccattctaactggtgtgagatggtatctcattgtggtttagatttgcatttctctgatggccagtgatgatgagcattttttcatgtgtcttttggctgcataaatgtcttcttttgagaagtgtctgttcatatcctttgctcactttttgatggggttgtttgtttttttcttgtaaatttgtttgagttcattgtagattctggatattagccctttgtcagatgagtaggttgtgaaaattttctcccattttgtaggttgcctgttcactctgatggtagtttcttttgctgtgcagaagctctttagtttaattagatcccatttgtcaattttggcttttgttgccattgcttttggtgttttggacatgaagtccttgcccatgcctatgtcctgaatggtaatgcctaggttttcttctagggtttttatggttttaggtctaacgtttaagtctttaatccatcttgaattaatttttgtataaggtgtaaggaagggatccagttgcagctttctacgtatggttagccagttttcccagcaccatttattaaatagggaatcctttccccattgcttgtttttctcaggtttgtcaaagatcagatagttgtagatatgcggcgttatttctgagggctctgttccgttctattgatctatatctctgttttggtaccagtaccacgctgttttggttactgtagtcttatagtgtagtttgaagtcaggtagggtgatgcctccagctttgttcttttgacttaggattgacttggcaatgcgggctcttttttggttccatatgaactttaaagtagttttttccaattctgtgaagaaaatcactggtagcttgatggggatggcattgaatctataaattaccttgggcagtatggccattttcacaatattgattcttcctacccatgagcatggaatgttcttccatttgcttgtatcctcttttatttcattgagctgtggtttgtagttctccttgaagaggtccttcatgtcccttgtaagttggattcctaagtattttattctctttgaagcaattgtgaatgggagttccctcatgatttggctctctgtttgtctgttattgctgtataagaatgcttgtgatttttgtacattgattttgtatcctgagactttgctgaagttgcttatcagcttaaggagattttgggctgagacagtggggttttctagatatacaatcatgtcgtctgcaaacagggacaatttgacttcctcttttcctaactgaatactctttatttccttctcctgcctaattgccctgtatttactctaatggtggttctgtacctgtgccaaatgatgatatacatggcagaattgactcctatcaggttcaaatataccacttgttctataattatgttggctatttgacttgtagttatattgtagcacaattaccgtaaacctaaatggaacttctgtatactctaacattactatatatgttagtttgtttggaattgttttttccccatatggctgtggtattcaggactagtagcaggatattttgtttcactttatgaaaatgatgtttttaaaaaacaggttcctttgaggttttcatggagttattaaatttctcagaaggctgtctcataagctctatgaaatggctccaaaccaattcagcagttacgcatttctgctactgaccggtaaattcatgcacggctgcatagtatatatgacacatactgttatttaaacagtaagtcatattaacattcggaaacttaccacattatggaccagaagctgtgatttgtatccaaataactctcagtagaatccagttatgttgctccattgagtgttgttggatagaaaaagaattgcttattcattcattatgcttaattaaaaacataagatacatctgccctggccagccttttaatccctggattcagattgcacaggctttgggcaacattaataaaatctacagaaggagtctatgagtaaagtactttccatttgtgcgtgcatgtgtgtgtgtgtgtgtgtgtgtgtgtgtattttaattttaatttttggtaggagtggttgactattctttgcatcctctattttaattttttatttatttctaaacaggtggcttgctttggtgaaggtattcatacagccttcctaaaggcaatgctttccacaggatttaagataccccagaaaggcatcctgataggcatccaggtaagtggtttgtggctgtgtgcttgcccatggtcatacatggtgagtggggaggggcaggatagaatgttaattgtggtatagaggaagggagatttgttttacgtttccgtttatggcaacttccaggaagaagggacatttgttctctatttgcttcctgattttgccttctgttgtatcagcccgtgcaaaaataaaatacagacagaaagaaaatgtttctagtgaagggatatttgttctaaatgggatgcagggtactttaaaaaatgaatctcttattctttggttttgtcttttctatatgttttactcttagctctccatccttagttcctgaacataggcattatatgaggttggatctcacttcctctgtttctcttgatatttctctgtctcttgattttcccccttgccaattcatccatgtctatagtacctactcttctatctatagctaccacctgtaaatttacatcctcagccatcccatatttccaacaatctgctggatacctccacttgaatatctcaaatccaacgtttctcaaactgaagtcatatctgttctctcctgaccatctccccttccttcctttcattcattcagtccttcacatttcaatcacttctaaatgccaaggattcaaagttgaatacattgatgttatttgattaaatttctcaacttaacactccagattgaaagtttttgaagggtagtgacttaatgggcctaatacagtcagtttatttcatagtatactgtagaagttcttgaaatattattcattggtaagccttctaggtcaaagtagggtgaaatgaatatctttatgcaataaaaaatgcactgtcaatttattgatgtaagttaaatataaatcttagggcaaaatgataggaaacttctattactatttggaatgctttttattactattcagaactacttttattactattactaattgcaagagtgtacaaactgtcctgtttataaatttcctgaaaaaatactagaggcttcccaactggtcattcatttttatttgagattagtaattcttgggtcctatgaaaaacaacaaatggtcttatataatatccctgctgtgcttttaataagctcaaactctgcatggctacataaaaatcaataaaaatataattagaacagtaccaggtattctcaagccagtgggtgattattttagattccatctcattagggtgtcttaatattagcaaattagactctggagactttacaggtagtggctttggagaagtttctgcaaagagtaacttgggattttgctttataaaggtaccagaaggacgacggtgaatagttagagcagaggctaacaagatgacttgcaattgtgaagcttaatggcagtttagagacaaatcacaccatatgatagactcatcatgttataaatgggtattaagtattattaagtcccaagtaggagaatatttgcccaacttccagttatggcttaaagtttaatgtgagacttgggggcattcagaggagaccatgcccttagtccacatcttcacatctaatcataatagtgctaacattttaaaatgccactttaagaaggcagtgatgtataaaattgtgccttgtttggttctagtgctgcagggaaatgtgaagcaaaaattaatttgatccctatgaagtatttgcgtaattttggcattagtggacagaattttgctttgtaggggaaaaaagggtttgttagaaaaaataatgttttcttaaagtagtgagagctggctattgaaaatctacctttcaatactttccttttaaaagaaataaatgttctagcagctacatgagttgttgcgaagaactttctgcacatgagagcatacggacacagatttaaaaatatattaaaaagtacttaaaggaacttaataaaattatacttaagaaaatatttacagccatggcaaaattgatcagctaatgcatagtttcttcattactatatgtaggattttcattcatggtgtttttaaaaatgcttagtctgataaactgaaaaagcgtgacagaatatactaaatggagagttaatagctataaaacttacttgactacttcttagttagtatggggccaaatctaatctcaactttttaccacagcttcatagcaattgcagataaagtaattagggttccatattttaggatacattgtacttttaaaaaacattttatttaacgtgatcctacttggtcagaagaactcatataaacacttttggatatattaagttagaactgaaaaatagcacaaaaaagactgctaatatataaatgggggttagggatagtaaatccaatggaaggcatctagttgaaggtgagttattatgaagttccaagagaacttgttatatggcagtctttctaacttttaaatttcttctctctttcccaccctactcctttacacatacagactctctgtttctggtcttccaaagttaaatccaataggtcaaagtatctgggaagtttgaaatattcataacatcaatcttataactaggacttaggataaaagaatcaagatgtagattttgtcaaaggattcttctcaatctattacattccctgtgtctctaccaaggcatttctaacataagaaaggcataacacaggtttatatggcaacaaaaatcatctttgattttcctgtaatatttctagccacctttcatcgcattaggatttatttttagttgctgtgagtaggcaatctgccttgttttgaagttttctggaagaccctttaacattaaatgatttactctagagtagatcaagagcactcactgtgttttcctctctgattgggctattcagtgatgcttgtggagtggcaagtaccaatctgacatctgcgcttcagcatcgctcagaaacacaaagcaagcattttatttgaaaagacaactccaagtgacatgaataaccttttatctttaatatggaatcattaggaacaaccatagagttgtcaatccagaggtccccgtagaatccacaggcatcacatagtattaacttggctttcttttctgtagccaggagttggataaatgtgaaaatgatcattggaggaaatatatatatttttcacttttaaaggactgtcttctttataaacatttccaagaaaataaatcagcttgtacttttcacctttcgtaacaaatggtttcttacacaggtattttcaatcagcttttaaatctgaggctactcagatgcaagctgacagctgtaatttctttttgtagagaggctgttttatgtgtcacaagtgttcaatacatgtttgatagaagtttataatgtgcctatggaagccaacacccagaccagaaggtagagtggtttcctggctgggaactgtcgatactgtcatgttggatatttatcttttccacctgggggacaacactgaaacagctccataatgaggttctgcctggtgtctgcaggtcttagaggacttgctgacttattttactttaaaatggcaaagaaaaaaattacattctagtactcctcccttaatgtttttcgtggtgattttagccaaggttaatgcaatcttgacttcatattacacaatgagtgaacgatagtcttcctatcccctattcccccctttctcaagcttaagtatgcatcaaaatcacctggagggtttgtaaaacaacaaattgctaggatccactcccagagttcctgattcaatagatctggggtggggttcaaattttcatatttttaataaattcccaggtaatgctgatgctgctctgccagggaccacagtttgagaaccactctacttgagcgatggtactttagaaacctggttaaaagttatgttagcacttattattgtcaaacatattatcagggaatttttgctaggggaaagtataaaagattgaggaaagttgagtgcatgattaatgtatcaattagcaagtgttggagatcattatgctgagccttctaatgtgatttggtacttactgaagtctattctgtgtttagcagagggtcacaatgtaatgttccatattaggggtatttaacaacatttggaagttcattttggacatttcatatatatttgttatataccaaggaatcttaaaacatgaaaaaaaatttatatgccatcaaatttagccctttgccttttctgaggagaatgaaacttgaattgtcttattcttctgtctaaccaattgtcctgatgtcactaagagttattctctaattttttacttgtttttttcttttacgtctaaccatgagcttcttgcatctaagctcatttctttctgtttggtcctaagtggaaatgaaaagctactttcctgggcatggttaaaattcatgttctataaggcagtcatgaataaccactgagcctgcctcagctgaaattcatccagttacatttatctattctatttaccaatagtttcctcttataaaactgcagttctgggattgagggggccagaatctgaaagaattttatatttgaacatagtctttggggtcttttcttaggatttagatctgtgctcagaaatactctgcaagtaaatattagggggtgttatgggctaaacattatcaaaattgtgcaaggatcacatgtgttttattgtcacagttcctagtttctgactctgaaataagatcatttgattttttccagccatcactaatatggtttataaacaggttacaagacatttgctgaagtaactagctcatgtcatctgtttaaaacctttttacaagggaaaccaacaagaatgttcctatttaaagaagaatggatatgtttttaacagtgtgtgattttaaatacgccagctcagttactcagacactcatgttaatgaagtcaaggtcagggtttgatctttgggtaggtcacctagtgttgttttctttcattctgaccactatcttgcaaacactagctcttgatcacaggaagtatgttcagaaatagggaactcctgatggcaatggtcaggaatccagggaaggtaggggctggacactagacaggtccacctggggtcctaggaaagacacagcaatggactacaggaaaatatctgaacagtgagatggagcattagggaagcctgtgtggaaatgaaatgcgtataaatgagggggcagtcagtttgggttgtaagtgtaatcgtgggtagaggaacccatgcttggaaactaggatgtaagggcaggaatctagtttttaggggggctgaaaaaacaattattgtaattataataatatttattaagaactattaataggcaagtaactgtgctaaattatagtagtaacacttaagtagtgcttacttctaaattagtttattgaacactcatactaatgtaagaactgttactattcctgttcaacagatgaggaaactgcatcttagagttgttaagtaagatattcaaggtaacacagtttaataaggtgtggagcctcaaaaaaaaaagttgaaatactactattgtcatcactgtttttgagtgaagaaatgaaggcaaagacattaactttttgaagctcataccactagtgaatggtgaaagccaggatttgaaatgcagctaactgactttagagctcattctttagctacaactttttattgcctcagagtaaatgaaaaaagagttccaaagattgagttattgcagggactagtgcataagctactaggaaaatggcctagttattgaagagcagtacaaaattagaacttagaaataagagcaagttgagcctgggtgcagtggctcatgcctgtaatcccagcactttgggaggccgaggtgggtggatcacctgaggtcgggagtttgagaccagcctgaccaacatggagaaaccctgtctctactaaaaatacaaaattagctgggcatggtggtggatgcctgtaatcccagctactcgggaggctgaggcaggagaatcgcttgaacccagaaggcattgcagtgagccaagatcgtgccattgcactccagcctgggcaacaagagcaaaaaaccccatctcaaaaaaaaaaaccaaaaaaaaaaaaaagaaataagagcaggttgaataggcaaaacagctagcctgactcggtactggctcctaacccgcatatcttttaagtcctccctgaccaggaaaaggatccttgtagaaccgaagtggatctgaacttacaaagaccaagtagattaaatagagaataaaaggagataagaacaaggtgaaaagcagggatcaagattatgtggatggaatttcattgacattgggatatagctaaaactcacactcaccatagaaggataaaaggataaaacttgtcattttttaatataaagcatccggcaacatgtaacattgtcttttaagatgttgtaaggaaataccatattgcataaatgaagagcatgtatatctagaaagtgaattttgtgaaattccttttcagcaatcattccggccaagattccttggtgtggctgaacaattacacaatgaaggtttcaaggtatgttcattagttttaagttgttttctgtcagcatggaatctgtccacaaatcaaaatattgcagaatattggaaaagaaatagcccaaaatatgtccttttgatatgaaaggtttaactaacttggtagtttcaaaacttagagtcaaatcattaaaaagactggtattaacttttaacaaaattaccacaaattcaatagaagttgccagctaaaaactgagaaagtttagcttaagcacaattgagacaaagtcccaacacatttccatatgtttttcctttttttgttttcatatgaggttatagattctagctgtgacagttacaggcaaaacttctttgcagtgaatacctccacacaaagcctggttgagtaaaacaaaattattcccaaggcttatgatgggcctgtggccatggggattttttgacctgctaacaaggaattagccatgaataattgagaaattattaaatttatgagaaattgtcattgaattattaaattcaaattaaacatataattattaaaatggaaatgcaaataaaattgaggttcttaagttttttaaatcactgcaaatatataaaaaatgtttaaagtgcccatgcctctggactgtgagtccaagtctctatccatggcactatactacttctcatgttcagcaatttcttcttctttatgttttaaattacatgttccataaaaataagaaatcactgtgatacggtaattgattttttcattttaaatgcagctgtttgccacggaagccacatcagactggctcaacgccaacaatgtccctgccaccccagtggcatggccgtctcaagaaggacagaatcccagcctctcttccatcagaaagtaagaactaggcatactgttttctgaaataatttagaggattaactttgagaaccagtatatgaatatttcaccttacttgattgcaagtcttttaaaacaaatttaaaaatgaatacatttgtggatgattgtcaagtttcactctccatcactatggaatacataacgtcatgtgtacatggtgatatgaaacgtgtttcaaaatacttcttagtaaggatactttccttgacggaaacaagtgagagcatgaagaatgtaatgcagcactttatatttcatgtcaaacttatattgtgtatagataagtacatcgagtataagatgaccagctatatttcactaaggttgtgcataataaatcaatttgttgagcacttactacatacaggaacctatgttgagtactatgatgatgtcatccattggattacctaattggtcattccttgaccaggttttcatgccttagaccatgtcatcattagattttgtacgacattttatttcagcagattgtgtgaatcttcaggaataccattgcatcaacccttaaagatctatgtggcataagtacataggagataattctctgctgttttaagatagtgcagcctacagaatggctgtgccattctatgcaatatgttatttgttagcgttcttgagaaaccaacacataaattattatcactttaataaaataatggcattgtgttcaaaccttagcaggcctccaaggatgtaatagctccgtgtttggggcattgtaaaacaataattagcactactaaggaggcaatagagttaatgtgggagtgggaacatgggggtgaaagggcattcaatggtggagggatcacctctttttaaaaaataagtatctatcaaattaccaattcttaatgagtgaacagatagcattttaaagagaaaacaaacatctgcattccattagacttgcactagaattccttcaagaacacaatataatccctatataagtgtaatttaaacatctacttagcaatagaggagggcagatggcagtcaactcagcatggcattgacttgaatggctaagagagcaatttatgttagtattttataaactaactataaaatatgccttgttgtctataagtttttgtttatttttccagattgattagagatggcagcattgacctagtgattaaccttcccaacaacaacactaaatttgtccatgataattatgtgattcggaggacagctgttgatagtggaatccctctcctcactaattttcaggtatagtcttttccttggatatagactggatgggagttttatttctgtgcctcccttaagagtgtaatcagtagatgcacatctctcttttcccctctttgtaactttcagaatagagaggaatttttaataatctaaaataatgatgctaacatggtaggtcatggcttaaatgggacagttggtgatcaagcaattgagataatcaaaggccatgaatggccatggctctctccttacaattatcctttgaataaaaagtgacagcatgacatggaataaagatacaaacttttatttcattgtttctaaatgaaagccaccatataaaagcaacaggttaatgatggtccagatgtagcacaagtgcttgttcaattcacagaaaatgattgcatgaggcatgttcagtttcacttggacatgacccatcgaatttatcacagggagaaacagagtggagactcattaactttctgcctatcatatttattttttatgcagaatcagttttaatccctatgggaggagaaataagcgtattcacagtgacatctgagatataaaagaaagtccccatggtgaggtctgagacatgggagaaagtctccattacataaaaaacttttatgccttttatcccatacccctttgaaaactggggacagacacttgtgacttttgtcttcattcattaaaaattcacttttatctcatggagggtgctgattcctaccattatattttcaggtgaccaaactttttgctgaagctgtgcagaaatctcgcaaggtggactccaagagtcttttccactacaggcagtacagtgctggaaaagcagcatagagatgcagacaccccagccccattattaaatcaacctgagccacatgttatctaaaggaactgattcacaactttctcagagatgaatattgataactaaacttcatttcagtttactttgttatgccttaatattctgtgtcttttgcaattaaattgtcagtcacttcttcaaaaccttacagtccttcctaagttactcttcatgagatttcatccatttactaatactgtatttttggtggactaggcttgcctatgtgcttatgtgtagctttttactttttatggtgctgattaatggtgatcaaggtaggaaaagttgctgttctattttctgaactctttctatactttaagatactctatttttaaaacactatctgcaaactcaggacactttaacagggcagaatactctaaaaacttgataaaattaaatatagatttaatttatgaaccttccatcatgatgtttgtgtattgcttctttttggatcctcattctcacccatttggctaatccaggaatattgttatcccttcccattatattgaagttgagaaatgtgacagaggcatttagagtatggacttttcttttctttttctttttctttttttctttttgagatggagtcacactctccaggctggagtgcagtggcacaatctcggctcactgcaatttccgtctcccaagttcaagcgattctcctgctttagactatggatttctttaaggaatactggtttgcagttttgttttctggactatatcagcagatggtagacagtgtttatgtagatgtgttgttgtttttatcattggattttaacttggcccgagtgaaataatcagatttttgtcattcacactctcccccagttttggaataacttggaagtaaggttcattcccttaagacgatggattctgttgaactatggggtcccacactgcactattaattccacccactgtaagggcaaggacaccattccttctacatataagaaaaaagtctctccccaagggcagcctttgttacttttaaatattttctgttattacaagtgctctaattgtgaacttttaaataaaatactattaagaggtaa

SEQ ID NO: 575 - DNA, 102983 bp, Homo sapiens
gaagtggaggtgggagggagcgacaatggaaaaatcacctgaaaactgggacagaggaaggaagctacagttacgaaggagagctgcaaaagttgcagcagaaaggttgggagtcccgacaggttccgtagcccacagaaaagaagcaagggacggcaggactgtttcacacttttctgcttctggaaggtgctggacaaaaacatggaactaatttccccaacagtgattataatcctgggttgccttgctctgttcttactccttcagcggaagaatttgcgtagacccccgtgcatcaagggctggattccttggattggagttggatttgagtttgggaaagcccctctagaatttatagagaaagcaagaatcaaggtatgtggtcgtggcagacggggtctccagaggagacaatgctttcttttttaaactttctttcattgactcttaagtgcagggctagaacacggggaacatacctgcttgcctcaactaaaggatctagtcatttctgaattcctctactaacaattaacaacaatatcctgtgcaaaattttgcgaaagaaatgaaatacaattgcagcgtgcatcgacatttttggaagtagagattaacttttcgtatttttacttcatcgaagttaagttccaaatgtgtatgtgttaagtaaatgttttcagtaattgggaaagataaagtgtaatccaatttaagtttgtgaaaatgagtaattcgtatccaaattggagttaacaccaaagtattgtacaaattgcttgcacagttggtccgtacacaataaacaggctctgtatttttagctgacgttgttatttgatgatgatgtactccattttcactacggcctgaagagactagtaatcctccttgtagtagatgtttttgtcttgaaagtatcttttaaatgtctgagcactttaaggaacagacctttattaatgtcttttaagttttattcaatttccagtcacaaatattttatggtatttgattgtctaataaatttgtatgatattataattattcttatgaattataatactttctgtggtgacccattttccatctggttagcccaatttgtagaatgaatttatacgtagtagcattattttaccactgatcatttgccttcaaaatctctgagattccaatttagtaaaaaacatatagaaaattaaagagaactaagatgaaaataaaaataacccagaatatcacaccagctgtactgtaaaaatttagtgtatttatattattttggtcattttcctatgtatttacaactatttaatgaacaacaatggaataatagtataatactcttttatgtgcttttgattttaacatataatgtgaatgactttcctgtaccatgaaatactttgaatcttccttttatggctatattttgtcataggaggatacaatagtttacttaaatctcaatagttgggtttataggttgctgccaaacttttttctttcagccagtgcttcagtgaacattcttgcgtgtttgtgtgcatgtattgattgtgtggttgtacattttgcaattatctgattgtttactcagaataaattcctaggagtagaattgctgagtcaaaggacatgcacacttaaattgtttatatgaatgtgttacttttggaaaaagaagtatgaatatgcaatttttattttccattgactgtatgcaattgcctaacttctcaaatcctgggccatactgaataccataattctttgcaatttttgctagtctgatagatgaaacattatatctcctaaagaaatactcctttgtctcccacagccttccttatgcatatgatcttgataatttttaaggaactgtttttttacaagcttgtgtcagaaggctaaatatttgtgaggtctctattgctttcctgactaaacaaaacaagttattgctggactctgtgtctcacacctgtaatcccaacactttgggaggcaggggtgggaggattgcttgaggccaggaatttaagaccagcccgggagatatagcaagacctcatttctacaaaaactaaatagaaaaataaaaaatttaatctggtccagtggcacatgcctgtagtcccagctcctcgagaggctgaggcgggaggattgcttgagctcaggagttccagattccggtaagctatgattgagccactgcactcgagcctgggcaacagagcgagaccttgtctcttaaaaaaaaaaaaaaaaaaaaaaaaaaaaaaaaaaagaatatgactgcattatttgatgttttactactaaaagcttttaaggttcactcttgtcttttcttgtacccttaatctgggcagtatgataaaaaaaaaagccagagtgctcccacctttggtgccaggggagattcaaatcacacaaacctcaaccttcatgcaggaaggctcacaccagcctaccccctaaccacaatgaaaccctaagacctgtctcttttcactgttttctcaagtcattttcagatcagcttgagaggactgcccttctttccccagagaagtctcattgtgtatgaaataaacctcttcataccctctcaaggtgtgtatgtgtgtatgtgtgtgtgtgtgtgtgtgtgtgtgtgtaaatgtagtaattgtcttaacatccaaaccagatcttgggtgggggtccattctgagttttcgcagtggctgcaacaggtactcagtagacttgatgcgaaattgcatctaaatggcacctgcataagacactacttatggcgtattgaaccttcaagaaaaaacttctaaaactccatcattagctaacactctcagcttctcatgctcctctagaagactgagaagagacaactttggtgaccacaaaaacatcttcccattatttttatttaatctttgaatagatcatgcatttatacggttcaaaaaattgtaaatataaaaactacggggaaagtcccttcaacctctttttcccttccacccagttctcactcctcactcccaaccttggcaactgtaattcatttcttatatattgtttcatagtttctttaactgtatacaagcaaatagaattatagatttttattttccgccttataagcaaaatgtgtcatattattcacactgttcctatgtcagtagggatttactctttacatattagtaccatatagaactcctaattctttgaagatgcatggatatggctacatttatttaataagtttcctcatcgatagacatatggtagtcagatttctaagataacctgcaatgatcttgcaacgattcccttgtgtaatcacttccttttgagtgtcaacaaaacctagtgactcacctctaatgaacacaatatggcacaagtgatctgatgttacttctgtgattaggctttcatcttgatagcagactcaattgccttcctagtttgcactctttgatgatgaaagctgtcattatagagaggcctacaaggcaaaaaatagagggaggccctggccaaccccagtaaaaatcaaaagtcttcaatccagtagcctgtgaaaaactaaattctgccaccaaccgtgtcagctgggtagtgaatacgactacctgagttgagccttgagatggctagaacccaatctttagttacgaaattctgttacaacagaaaaacccatattgcaaacctgatactttgtactttataattgagacagaagattttgtttatgcttcaaactgcctggttatatcagtcttttgtttattagaatttaccattttttaagcatgagacattgataacatttctggcactctgagagagttattttaaacatgtaatagtatagacaatctgcagctatctacaagtatctatttgttgacacaatggaaacattatttgtttttttttttaacttttaccaactgttttaatatacatcaaacaatctgcattaatccttttagtctttttgacctaccctctctgcatcttaatcattttcttgttgtgccaatactgtttgcataagagtaggtttataatttttttttattattatactttaagttctagggtacatgtgcacaacatgctggtttgttacatatgtatacatgtgccatgttggtgtgctgaacccagtaactcatcatttatattaggtatatctcctaatgctatccctcccccctcccccctccccccacccaacaacaggccccggtgtgtgatgttccccttcctgtgtccaagtgttctcattgttcaattcccgcctatgagtgagaacatgtggtgtttgattttttgtccttgtgatagtttgctgagaatgatggtttccagcttcatccacgtccttacaaaggacatgaactcatccttttttatggctgcatagtattccatggtgtatatgtaccacattttcttaatccagtctatcattgatggacatttgggttagttccaagtctttgctattgtgaacagtgccacagtaaacatacgtgtgcatgtgtctttatagcagcatgatttataatcctttgggtatatacccagtaatgggatggctgggtcaaatggtatttctagttctagatccttgaggaatcaccacactgtcttccacaatggttgaactagtttacagtcccaccaacagtgtaaaagtgttcctatttctccacatgctctccagcacctgttgtttcctgactttataatgatcgccattctaactggtgtgagatggtatctcattgtggttttgatttgcatttatttgatggccagtgatacagaatgggaaaaaatttttgcaatctattcatctgacaatgggctaatatccagaatctacaaagaactcaaacaaatttacaagaaaaaaacaaccccatcaaaaagtgggcaaagtatatgaacagatacttctcaaaagaagacatttattcaaccaacagacagatgaaaaaatgctcatcatcactggaaacattacttgaaaacacagtgtcccaaagtgtactaggctgaagttcgatattttgcaaaaatattcaataaatagtttaagtagattgttggaaaaatatttgctcaataaagcatcattatttttcaggttctaatgagggaaatggtgtctacctcccaccaacaggtgtagaatgtgaaattctgaaaatgtgggcataggatctaaatgtcaagcagcccccaaaaagacaaagttccctacattaaaataggtaaattagacaacttctgcagtttgtctacttaaacagctcttgggaagggcacctcctttaagccactctaagcgatatttgaagtcttacctgtagtcatctatgttgagttaaaatctactttctcttatattattaaagctgcaccaactttgttttggttagtgtttggatgatacatatttttctatccctttcaatttttctgagtctttgtattttaacccagtctcttgaaaaataaaagatagattgaaccaaatgaaaataaaaatacaacatgtcataatttctatcactatgtgcttatattagaaaagaaaaacctgaaatcgataaactttcaagaatcatctccttttataaacagagtaaaataagcccaaataaagcagaaggaaggaaatagtaaggaacagaaatcaatgaagttgaaaattaaaaaaaaaaataaggaaaatcaatgaaagaaagaactggttttttgagaagaccaataacattgccagacttcatgcaagactgatagagaaaacaccaatgaccgatgtttgaatgaaacagggaatatcactgcagacatcaaaagggatgataagaaaatactatgaataactctacaaacataaatttaacaagttatataaaatggatcaattcttagaaaaacgtattctaacaaaactatccaatatacaatacataattttaatagccctacactattaaggaaattgaatttgtattttgataacctcccaaaaagaattctctatgcccagattgtatcattggaaaactataccaaatgtttaaaaaagaattaactatgagttccatttcttccagaaagtagaagacaaaggaacatttcccagtctattttatgaagctggtattaccttgatctcaaaccacagatagtacggaaaaaaactacagacaagtattacttatgaatatattaatagatgcagaaataacaaaatatcagcaaataaaatttatcagtatatgaaaagaattaccgagtgaagtctgtcaatccacataggctgctgtattaacaagctaaagaagaaaaagcacataattgatacagaaaaagcatttgacaaaattcaatatccattcctgatatccattcatgatatcaggattcatgatagagggaaatttcctaactcaataaaggacatctacaaaaatcctgcagttaacaggacacttaaatgatgaaagactaaatacttcccccatgtgattgggaacaaagcaaagatctctgttgtcacaactcttattcagcatagtgctggaaattttagcctgtgcaataaagtaagaaaagaaaagaaaatatatatggattcgaaaataagaaataaaactgtcttaatttgcagattacatgattgtctatgtagaaaatcccaaggagtctacaaaaacctctggaataaatgcaaggtatacataaagatatcaattgtttggttacatactaacaatgaacatgtggaaaccataattaaaaatacattaccatttaaaataactcaagaaatatttaggtataaatgtaacaaaatgtttagaacttgtatgctaaaatccacaaaacattgatgaaaaaaatcaaaggtcttaagggagaaacatactgtgttcctgattggaaaagtcaacatattaaagatgtcagtttcctccaaactgatatccaggtttgatgcaaatgctattcccagcaagatttgttgtagatatagacaaggttattctaaaatttatatggaaagacaaagaaactaaaatacataaaacaattttgaaaaagtagaatagaatgagaggaatcattccactcaatttcaaggcctattattaatcaagatgatttagtactggcagaaggatagacacaaagattagtggaacaaaatagagtatctagagatagagccacacaaacatgccaagtgatttttggcaaaggtgcaaaaacaactcaatgaaataaagatggcctttttaaacaaatggtgatggagcaatttgatagcgtaagccaaaacaaacaaaacaacaacaaagaaccacccccaacacacacaaaacatgaatttctacctaagtcctatatctgatataaaattaactcaaaatagataacagacttaaatgtaaaacataaagatataaaacctgtagaaagaaatatagaagaatatcttcctaatttgggatagaaaatagctcttagacttgacaccaaaaggacagttcataaaaggaaaaactgataaattgaacctcatcaaaattaaaagcatttgctctgtaaaagagctcattaaaaagatttaaagaaaagctacacactgggataaaatatttgcaaaccacatatccaacaaaggactagtatctagaatatataaagaactgtcaacactcaacaatataatacaaaatccagttagaaaatgggcagaggacatacacaagatgtatcaatgaagagaatattcagatgtcaaattggtacacgaaaagatgttcaacatcaatagtcattagagatatgcaaattaaaatcatgagatactactacacatctatcagaacggcaaagataaaaattgcaacaacaccaaatattggtgaggatacagagaaactggattacttatacatatggtggaaatataaaatggtacagccactccagaaaacactttctcagtttcttaaacatccaaacacgcagccaaccatatgacctggcaattgcacttctaggaatttatcacagagaaacttaatgtttacataaaaacccagatatggatgtttatggaagcactatttgcgatagccctaaactgaaaagaatctcactgtctttcaaccttattcatttttattgttttgatttttagagacagtcttgctgtgttgccctgcccagagtgcagtggtgcaaatcatagctcactgcaacctcaaaaactcctgggctcaagtgatactcctgcctcagacccccaaagcagtaggattataggcatgtctagcccagccttcataatgtttaaataaactgtcgtacattcatacagtggaatactactcagaaatataaaggaatgaatgattgatacacacaatttggatgaacattcagagaattacactgaatgaaaagccagtccccaaaaattgtatactaaatgcttctgtttatatgacatagtgaaattcaaagttatagaagtggagaacagattagtggttgccaaggattaatgagaaggtaggagtgagagaaacagtgggggctggctataaaagggcatcatttaagatctttgtggtgatggaaacattctgtatcttgactgtatcaatgtcaataacttggttgtgatactgtactatagttttgcaagatgttaatactgggaaaacagtaatggatacgtaggctctttctgtaacatttcttacaaccgcatgataatctacaattatctctaaataaaaagtttagttaaaaaatatacaagcaccacttctacaacataccgtgtgtgcctgcctgtacttcgtaacaccgaggctgctgacattgcatacaaaaaaagaacaaaaggaaagcaagtaaaacaaacacaacaacaaaaccctgttgcataatttctaacactgtgcatgaccatcttttactccgcagttatattgcagttactttaaatgcctcacatcaacaattatctcaactgctgattcaatgtatttgaatgtggttagtctacacttgtggccaggtgcttatagatgttacaaaaagctacctactaatgggaagttaagaattctcatttgaacaaaactttaacaatgaaaatgagtcatcttctaactactggttaacaaacaattacagataggaatgttagaaagcagtgtagatgtctggatcactaatgcacaaaaatgggacttcattttctggtggcttaatgatttttgggcctgcaagttgcctagtagcacccaacactgtgttgcaggagtaatcatgtgtcatctcttgggaggtatagaaatgactaatactgaagtagtgatgagcataaattatgccttgagatatgtataatgctgtaatggaatatgaaagtatggtgatttcttttgatgatagagtcatggagaagactgaggtttgttgcccacattcataattgaagaaactgctaaattatacttagacgccaataaaaatgatgacttttttttcccaacaaggtcatagacccctgctatcaaaccctgtgctacagtatgttcaaaggttgctaagagtgatctgataaagaggggaaaattaatgatgtaggagagagagagtcataaatgtagaagagagaaggcaagagtgtaggatccataacacaaatggagaagtgttgacatttcacaagggcaggaacctccatccgtgttaagaggagggaacgcatggagaatgggtgcaaatgtatataccttgcaggatttagtagcgagaaactgagaccgctacttgattgctccatttttctagtgagttacaaggcagggacactatgtcagaatggagaggttgggcaggttgtacaggtgaaataatcattttgaaaactaggaaagtgaacagattagaaaagtgtataggattgcaagacattgttgaataaccatggatttcccataaaccagttggcaattttgaacctttttgttgaacaatattcagctataggttgcttataagtctaccaatatcttgaaaacaatgtttaaatgtcacaatgttgatataatttctaattatttataattattattttctacttatttcatagtacaagaaaagaagctataaataggcaataaaatgatcaaagggaatattacatattaggacagaacaaattaaaatgtatataattcagatctggctgaaacaatcaaaatttataactaattgccaaatataatcataataatttttcttttgactataacttcagcattaggattcttgaggagaatggtcttaaacatggcttaggaatgcttactaatataatctatgtttgttttatttcagtatggaccaatatttacagtctttgctatgggaaaccgaatgacctttgttactgaagaagaaggaattaatgtgtttctaaaatccaaaaaagtagattttgaactagcagtgcaaaatatcgtttatcgtacaggtaaagaatattttcagatagtccattcgaaatccaacattggaatccaggagtagttttaggtaaaaattacatcctcattcctctatcaagaatgatgagggtccattattttattcttgaggtatgggtagaagaggaaagagttatgggtagaatagtttggccattgaaatgcaaatgaatggcagcctaatacatttagatttgaattagacacgtgaaagtgataaggttacctcattgatgttttctttagagaatatttggaatctgtatcatgttacagcttccaagatgtcactaactctgttccactgctgtgtatacagtgttctacagggtacagctcttggactggttacatgttactcagtccctgaaactagaattccatggcttagtaaatcctttacagtggcatttcctgacaaattttatagggctgttatggtcaatgggagcttgacttgccctttcacaaatcctccatcttcagagactaccagattgtacagtcagcatgcttccagtatggctgtctgccttcatttcttcctaggctgcaattgtgtgtactggggccatgtgtcctccctggaacgcagagctggttcaatttgtgtctggttcttttttgtgctttcacaatgtttttgcttgcttctattctctgtggcttctttctctctgtttcccttttttcttctttggttccttttcatgtaaccttttgtgcatttcttgccattaagacaagaaagtttgttttaaaagctaccagtaatcaatagaattatatatattttttcttcttgtatgcatgatcatcacaacctgttggtgaaattatttgattatttagtgcttcttgatacttggactatggaattttagatcaaataatataaatattttgaaggcctttgatctgtagagtcgcgtatcccttcagaaaaatttactaagttacctatcagaggtgtatggaaatgattgagtttttttcacctgagcctcctctggggactttcatgtttaaatatttcattgaacagatgaaatatattaatatttattcttgagtcagcttcccatccctcccatatagtagatgtatgctactatacatacagaagatgtatagtagcatactatacataccagcatagtatatgtatagtagcatagtatacatactatactggtatggtaacatagagaagatgtatgctcaggaaatctaaaaactgtttttcattaacttacacaaaatgtatcttacacgtaataggatgacgaaatacaaaattaaaacttattctttgaaaaagttacttcaataaaatgacaacaatggacacaggggactactagagggaggggggtgggcggcagggggcaaaggttgaaaaactaactattgagtactgtgctcattacctgagtgatgggattaatcatgccccaaacctcagcataacacaatatacttgtataacaaacctgcacatgtaccctttgaatctaaaataaaattcaaaatttttttaaaacagaaaaagttacttcaaggtcaataaaacaagataaaataaaaatataaagaaatgagtaaacaataaaccacaatttctaattaggaatgtgtgttatagaaggagcacgaatactaacataaagaaaatagtgggctcaaagctattcatggggttaggaaaggcctcctggtggaagtagtgttcaagaagacacttgaaggacaaatagaaatttgcaggagaagtttgaggctcataggtataagtgtgtgggattgggtgggagtagatatgggtataataaaggagagaacattctgagcagacagaacagcctctgaaatgctgggatatgtaaaatatgtttttaatgtatctggactgtagattttgagggagaagggctgaaaataccagctctcttaatcacccatttatagattatcccttaaagtgaatagatttccatcatctcacagaatacgttgaatcttttttatttgtttgttttgagataaagtctctctctgtcacccaggctggagtgcagtggtgtgatgttggctcactgcgactccaactcctgggttcaagcgattcttctgcctcagcctccccagtagctgggattacaggtgcccgccacagccggctaattttcctatttttagtagagacagggtttcaccatgttggtcaggctggtctggaacttctgacctcaagtgatccacctgccttgttctcccaaagttctgggattacagttgtgagccaccacactcagtcgagaataggttgaatctttatctacttttatttatgggaggtgaccttatgtactgagaggactttggctgtagtccctgctgaccaaataatagtagatatatattgactgtgtgtttcaaggagttgttgcttattttgaaaatagttttctttgttcatagcatcaattccaaagaatgtctttttagcactgcatgaaaaactctatattatgttgaaagggaaaatggggactgtcaatctccatcagtttactgggcaactgactgaagaattacatgaacaactggagaatttaggcactcatgggacaatggacctgaacaacttagtaaggtaaatagacgcattagtatgatttagtcttgctttttgttttaaataaaaaaattgaaacctatagattggacttcaaacattgtcaggttgattaatgaaatctacctaactaggctattaagagattattttaatcttttaaattatttttttttgagatagagtctcgctctgtcaccaatcttttaaattctaattcagtttagcatttctattttatggtgagcaaacaagccaatacagtcattgtaatacatttgcagtaatttatccttagtcattccatacatttgtgtataaactacacggattttcttcttataattttcatacttcctgtagaattttgataaaacattcagtgcaatttgctattattagaatgagaggacgttgagaggataggggagagaatggaatcataaagtggtgaaaaaagtccaggagatgtttgtgttacttaacaagtggctcaggcaaagtcagtgtgggcctcaggactgagccccagggtcctctattaagggagatcccaagagacagggaagagcagcagacggagtcagccccattctgaagctttctggaaaagttaaagtctgggcatgggagacatgagaaaatttcccacatgcataaagagatttcgtaagttgaagttacctgagtcactttgccatctcagcaggaatcctggaatgcccaaggcaagattgagcagttcagactcagaatgacagtgaacattttgttagaggtccagtagtagggggtggaggggggacacaaaaacaaccaaatttaaaaatgtgctgaagcatacccaatatctataacaaaatgaagatattgaaatgaacaaaatattcttggatatttttaaaactttgggtggaggaaattatgaagggatggtaaataaaaattaaataaacagtattaagtgttttaaggcatgttaacaatattttatattctttatcttaagtatgctacagtaatcactttattctcttaatggtaaaacttattgatgatatgtactatatttcaatgggcaatagtttgaatttatgggatcctgtgagaaattagggaatttggtgactaatattgccctgaatctttgttgttgttgttgttgttattgttgttgttgctgtctaaaggcatggactatatcttagctactattatttgctaaataaattattgttgaattgtattagatcagtttatttattatctcatatttgtcagagtctaataagcttgtttagaaagcatttaaatatcttcagataaatcaaaccacagtttcagttccccctgtattatcttgaccacagtaagcaaatatcaaaacttcttaagagtgactttttcccaagagaatctgtcacctattatctgctccccatatattgctatgaaataatgccttgctttgtatcctttgcctttcttctttggtcttcgggtctgactttttgtgtgtttctgtctttgtagacatctcctttatccagtcacagtgaatatgctctttaataaaagtttgttttccacaaacaagaaaaaaatcaaggagttccatcagtattttcaagtttatgatgaagattttgagtatgggtcccagttgccagagtgtcttctaaggtaacagttgtttcctataattaattcattgaccaagcttatctcagcaattcaacacctctcatttttctgttctaagtagatgtaacagcagtttaagtgggagagaagccgtttcttatgacctgtttgtttttggtgtctgtatgtgaattgaaggaggaccaaggaagagagatgcttttcttattgtgatgaacaaaaacaaaagagagaaagagatcgatgggattaagaatttattttgaggtcttttatcccatgtacagctttttattattgcactcattgctacagttaagattcctgctaaatcgtcaacctgagcagtctcagaatcagacactgtgctcctcattctctctgaggcaaacatgggcgtggttaaatgcatttctcacagttggttcagacaaatgtttgtaaaatgaggcacatgcaaagtaactgcatgattttgaaatttcttggcagtggctctatgtctttctccatatgggttgctataacaaagtatcatagactgggaggcttataaacaacagaaatttatttctcatcgccctggaggctggaggcctgagatgagggtgccagcatggtcacgttctggtgagggctatttctcattgccctggaggctgggggtctgaaatgagcgggccagcatggtcatgttctggtgagggctccttccgggttgcagactcccaatttttcactgcattctcatgtggtaaaaggggcagacagactccctcagaccctgttcataaggttagtactccttttcatgagggctgtagcctcagaacatagctaccatccaaagacccccacctcctaatgacatcaccttgggggttaggatttcaacatataaagatttgggagagacacagacattcagaccatagcctacgtagaccattcatctacaatggtgactgttcagacaagatttagaagatgagagccagtttgtttttcccggcttaagtcagcgattggttctgtgcattgggttttcatcctcctgcaacttacagcagccacagtaaaggcagaccaagcaagtgtgggttctgccttcttattcagtgccaatccagtaggactccaaagttttatttacaaaagacactaaaatgtagttgctctgcctccccagctgtctttgtggactaatcattccgaaggtagaccttccatgaaattatacctgaaaatgaagaataaatttggagaactaattttaattccacagacatcccttttttatgctgtgacctgttattcctaaagtgctttccaattaatttctatatatattttttctcatgtagaaactggtcaaaatccaaaaagtggttcctggaactgtttgagaaaaacattccagatataaaagcatgtaaatctgcaaaagataattccatggtaagtatttcttacctttcttttgctaatgtaaagatagtaataaattattgttgttaaaatatattttgctaaaacacatgagattgattagataccatttttgtgtcaaccactgtactggacatgttgagatacattatttcactgttacatcatcacaacaacctatgtagaagaggtatcctattccacataagaaaaaaccagagacaacgagcaaaaaaatacaattccgatgttccgtattgatttctgtgttatcatacagttggctgtgtcaatagcgacaggtgaaactaatggcaaattaggaaaaacaaagctctacaaaataggctttgttgttgatgccactaccgttagttgtttcttcagatgcaaggaagcagaatagtataatttaaaaagccaggcactaggaacctgtgccctaagcgttattccagatctgtggttcttcaaatgtggcccataaaccgacagcaccagcatcacctgggactcagtcagaaactctgcagtaggccaggcatggtggctcacgcctgtaatcccagcactttggggggccgacgcaggagaattgcttaagcccaggagttcgagaccaacctgggcaacatagcaagacctggtctctacaaataattatatatataaaaaattagccaggcatggttgcacacacctgtggtaccggctactcaggaggctgaggtgggaggatcacacttgagcctggggaagtgaaagctgcagcaaaccctgattgtgcccctgcactccagcctggatgacagagcgaaatcctgtctcaaaaacaaacaaacaaacaaacaaacacctctgaggtagacaatctgctttaacaagccttacctttggttcagatgcttgctaatgaatggttctcacctctgcctctcattagaatcactctgggagcttttgaaaactgtctgaggccagggtctgcccacagagactgggtttcatttggtctggactgtctaggctcaaatccagtcactggttatgtaaccttgggcacagtacctagtctcttggcctcagtttcctcaccgcataaagttgtgggaattaaatgatttaatttttgtaaagcactgagaacagaggactggataggagcttatcattgttatcatcatttaaaaaaactcttcaaacatttttatatttaaagatggcatcaaaagtttttgtttgtttttagttaaatagcaaatattatcacaaacagctttgcttaaaactagaaaggaagatggccttaggaaaaaggactatgtgaatgtttaggtatctccttcctgaataaagggaataggaagccatactggaaggcccttcattgacaaactgtgtttcagctaatatttttgttgtgtaaacaacccagacaaacacacatgttctttgcattattttccaggacttaggggcaaaagcacatgtatataaaagatgtatcgagatagatctgtaatctatgggcctagcaaacagagtttttaaattcccagttaaaattccctgctaaggctgggtgctgtggctcacgcctgtaatcccagcactttgggaggccaaggtgggtggatcacctaaggtcagaagttcgagatcagcctggcgaacatggtgaaacctcatctctactaaaaatacaaaaattagcctggcatggtggtgcgcgcctgtaatcccagctactcaggaggctgaggcaggagaattgcttgaacctgggaggcggaggttatggtgcgccgagattgcgccactgcactccaacctgggtgacagagtgaaactccatctcaaaaaaaaaaaaaaagcaaaaagaaaaaaaaagtaaaattccctaccaacaatacctctagaatagcatttatttttcttactctgaagaaatgaggtatttttaatcataggtactcttaactccctatttgtattagtccgttttcatgttggtgaaaaagacatacccgagactgggcaatttacaaaagaaagaggtttaatggttccacatggctggggaggcctcacaatcatggtggaaggcaaggaggatcaagtaacatcttacatggatggtggcaggcaaaaggagagagagcttgtgtggggaaacttccctttgtaaaaccatcagatctcatgggacttattcaccatcacgagaacagcactagaaagacctgctcccatgattcggttacctcccactggatccctaccacaacatgtgggaattcaagatgagattttggtggcttcgtagccaaaccatatcattatttgaataaaaacaaagtttgaattctgctgaagctaatccagtgtttaaaactttaggagagaattcaacttgaacatccatgagcagtttaactttatttttttatgtattgcgtctctgttttcctctagcagtgttcacactgagcttgtgtgtttgtgtgttttgtgtggcagtggcatttttttttcttttttgagatggagtcttgctctgtcacccaggctggagtgcagtggtgtgatctcggctcactgcaacctctgcctcccaggttcaagcaattctcctgcttcagcctcccgagtagctgggactacaggcacatgccaccacacccggctattttttatatttttagtagagatgaggtttcaccatattggtcaggctggtatcaaacttctgacctcgtgacccacctgcctcggcctcccgaactgctgggattacaggcgtgagccaccgtgcctggccgagctaatgtttttatattaatattaaaaaaaagtgtgagctaagaagaaatttaaaagattttgttgtcttcaactgcataaatagatttcagtggcctagtgaagcagaagactgggtagaagttgagtttcatttttaaaaaatatatacacgctttattgcatcattaatgtaaaatgtgatttcttccatgttattttagatatatcttaaactagtgtttttcatttaaaattattattgtatcatagaatatcaaaataatgaaatatatctataggattttcatgaggtataaactttgtcctgtgacaacttacattataagtataatagagacaagcagtaaatgaaattcatatctaaactattttcaattctgctaatccattatcacaaaaacagtaataacacattagctaacatttttggggtgcttaccttgtggcaagcatagtgttacatatttcacaagtaatttcttatttattttcacaactttaatacaaggaaaactgaggatgttaaatccagaaagctagggattagagtagttaatcccttgacaaattacatgctttagtaaataatagcatcagtctctattttataatgtattttataggctagtgattgaatagttttttttttctgtgtcatagtatctgaatcaaagctactatgctgtggtacaatgcagttctccaaatccctaatacaagagagttgtgatttgtgtctctaagggggccagtatagcatagtggcttagagtatgggctctggagtcagggctagactcacagggttgggatcctaactcaaccaccttcaagctatatgtccctggcaaaattccctaactttattgtgtttcagtttcctcatatgcataatggtgaagataatagtatctgcggggaaccacagacactggaccctatttgagggtagagattgggaggggggagaggaacagataaaaacaattattgtgtattaggcttagtacctgggtgatgaaataatctataacaagctcctgtgacacgattttacctatagaacaaacctgaactgtacccctgaacctaagaaaaaaaaaaaacctgacaaatagagccagggaaggtcatgaagagagggttctcatgcttgaatgtgtgatttagaaaagaaagaaaagaaaactctacaaaaaccacaaacctgcacaaagaccatcacagcctacacaataatacttctacaggaacacctatctagcacctggcctgtccaatattgttattgatctttgtagacaagaataatgattgcacaacaattatgtaatccttctcattttttcctttaaaaattgttgtcttcctttaactctctgaatacgcacatagtttactattgcatgcattttcccattgccatgctctattctcaagtaaacatcttttcttaaaaataaaaaaaaaagatagtagtatctgcatcttggagttatagtgaggagtgaaatgggttaaatacttgcaatacacttaaaacagtacttgcccttagcaagcagtgagttgatattagctcccattatttctatcacctagacataagttatttaagattaaaagtagatgagtaacttaatgaaaatgttacagtgtctgaattttttcccatgatggagagccgtcactggcaaagacaaatctggggaaaccgcccgatgaagaaaatactttagtgggatttgtttggtgacttgagaacaacatgtcttgagatgggtagccttggatggggccctgccctgagctgtcactgttcaagtcaaatgtccgttctctgtatggttttagagtattgtggtatttgtaatattctggcttggcagttctgtctcccatggtgaatgggctgagaatctgtatggtggatgggggtgtagttttctcctgaatgcaccagagatgtgtgtttctctattgcttgcattttgctaagagcagaggtttataagacagggattccagagcagtgtggagggcagagataataacacacaatttgccaattcagtttggtaaagtagagatccaaagtgcattttaccctctgaaaggttttattttaagcactttttaggtactaactcatttaattctcacaacaatcctacgaggtaggtaccatattatgaacattttatggatgaggacacagaggcacagagagattaaagtagcttgttcaaggtcatccagctcttaaatagctgagccaggatttgaacaaatgcagtgaggcggtcaagctccagaatccctactcctaattactatactacagtaaggacataaatcccttcacatgcctcaaactgcaaaacctgggaatggcagaaatgatatctttcatattaaagaaaaaggcatgatctcttgtttattaacatcgatatttgtcacatagccatggtttggcaatgtttatttcttttaaacagacattattgcaagctacgctggatattgtagagacggaaacaagtaaggaaaactcacccaattatgggctcttactgctttgggcttctctgtctaatgctgttcctgtaagtatattagtaaagtatgagttacgttgctctccactgtcctttcatctttttttccttcatttctgtcttccattcttttttccactcatcactcattatggaaaagaaaaaaactacagtggatttggttgtgagataaaaaccaaaactgaatgcctaatgaaatctgattaggttacaaaggagacgaaacagatctcaagcaaattctgtcctctgaaaggcagtgtgtaacaggatgagggaaaagcttgccctttggggccagttgtagacaacatctgtttatggaacactttttgtatgtctaccaatgtgctcagtattggtattgaaaagatgaatagggattggccacatgcttttattggaaagagtaagtaaatggatagtttcaggtaacttgggcttggatccagacatcccaatttgtagttgtagactgtcatggtggtaatttaaattttctgtgcctccatttcctaataagagataatgtactattttacctaataagggtaaaaaaagggataatgtatgtgaacctcccactgtggtcttagaacttgggtgctcaataaatggtaattctcatttctctacaaagttgttatgaggatttaataagataagcctagctggtatcaatgaatattagctctttctctccatttgtacccattctccttctgtgtgccattcctgtttgcattgcttagcattatggtcctacaagcttccgcatgaatggtgctggtgaaattggaactttcaacacttctaaagagaggcaagacttaaaaaactgttttttgtgggtttttttgttgttgttgttgttttgttttgttttgtttttttgagatggtgtctcattctatcacccaggctggagtgcaatggcgtgatctcggctcactgcaacctctgcttcccgggttcaagcgattcccctgcctcagcctcctgagcagctgggattacatgcgtgagctactgggcccggctaaaaaactgtttcttttaaaatctgtcttgcattagattagagccatgagatttgtctgtcacgtcatgttcagtgccaacagtttcctgggccaggaggttctcacattagcctaagatgctacttatattatctgaaattaaagggtaactttttaaatatacttgttttctactaaacaggaggatttaacctatccatgatgatatgtgtgggcatttttcttcctttttcttctaacagatagaaattaggaagatgttttaagtattatttatttagccttacttttataaaggcctaggttgttaaaggctttctcagtcatgatattctagtttcccttaacttgttgaaaaatttactgcataaagagaagggatagaaattctggcctcttttctcaaaggtatgttagccagtggaatatacatttcatctgatatggtcaagtaaaagtagtctaaacccttccccttctttatgtacctataatattcttctctggtttttccttaaataatattcttggaaactgattaagctatagcaaaattgagaaacaaacatcaaaacaactctcaaagtagcaacaaaacaggcactcctgtcaaagaattatttttcaatatcttgttagaaacatcccccggaagaaagacacacaaagccccattgatctgacacaggggaagtcggttctttggaatttgttcttggcgctggtctgaaaggatttaaatcattcatttcagaaagaaagtgtctgatgattagagaatattccatctcactggctcttgttggcacctccaagaggcagcctggtgagcaggcagagatcctggagaggctttagagtcagatccaaagccaattgccagcactgggtaacagtgggccaattgtttaacctgcccaagcctcagtgcccttatctgtaaaatgggattaatgctatacctaccttaaagggttgttgtaaggattattttggtaagaaatagattgtggctaatagcacctggttcagcataggtcttcaataaatgctagttttcttcccttacaaaaattatctccctagtttcagtcaatcattattttcaatggcccgttaatactgaacataggcttccaaatatttgatggctcaaaggccccagagtgggaatatccactgctattctgctttagtgacctttattgctgctgagaataccagaagccctaccagaggtgtaggtggtggggcctgtcttttcctggagcccagagtatatctatatctcctctctcctactttgtactctgcctcaaggcccataggactcagagctcaggcttcagatgggttaggcactgggtcactaggaggctccattgtggcccaagatattaactataatttatgaaattatttttatgggaaaaccatttctaagttccaagaaatttctgactgccaaatgatttttttagaagatttctccaaaccaatcacaaagctgacattttaccttttttatctgctgcatctcttacattctttctaaatactttcagtagcaattgctaccccatcccactctcaactcccacagtatttattttttgtaacatgtgtttgctctctcactgtcttgtacatttcgttcatttttctccaatatgtattcatatgcccaactaaatgtgaaaatactttggacaggaattatctcccaacatatttgtgtttaccatgatcggtagaagactctctggcatggtatgaagactccatcaaaatctctttttgaatagataaatcagtaccaaagaacacactcaattcatcttctctttgacacagcaaagatacagagttttcctccttgccctttctctcatttgttcttacctctccaaaacaatggaatgacattatggtggctgcttctgcagttcagtgagctgagtggcccttcttcttcttgcccatctctgaccttggacttgaactgttttacaaaatactaattggtactgttgggagcagttttcaacccctttcccaaatgtgggtgcacaaagacctcaaagtcacttattcttgcttattgatgtagtaatacatataaacttttattaactattttatatgcctttttatcttttaaaaatactttggcttttttaaaaatagaaaaaattttaaaaactgtaatctgttaaggaaaaaggagacattaaaaaaaagtggctcacgcctgtaataccagcacttcgggaggctgaggcgggcggatcacaaggtcaggagatcgagatcatcctagctaacacggtgaaaccctgtctctactaaaaatacaaaaaattagccatgcgtggtggcaggtgtttgtagtcccagctactcggaaggctgaggcagaagaatggtgtgaacccaggaggcggagcttgcagtgagccgagattgcgccactgcactccagcctaggcaacagagcgagactctgtctcaaaaaaaaaaaaaataaataaataaaagtaacagccatttgtagtttagctaaattgcttatgtttgtcatttaaaaagtagtatccaattttattgaatctctaaagctatatttaggcacatacaactatgaacatccgttttgcgtaactgaaaatctaagtaatatggcttggctctgtgtacccacccgcatctcatcttgaattgtaatccccacatgtaaagggagggacctggtgggaggtgattggataatggggacagttttccccaggctgtccttgtgatagtgagtgagttctcataatatctgatgctttaaaagtgtttggccattttccccacccccttcttctgccaccgtgtaagatgtgccttgcttcccatttgccttctgccatgattgtaagtttcctgaggcctccccacccatgcagaactgtgagtcagttgaacctcttttgtttataaattacccagtctcagggaattctttataaagaagtgtgaaaacagactaatacattatgtcttatcactatttttttccccaacatgaactctgactcttcaagtaagatgaagtgagtatggagtagttattaattgaattcagtaatttagcacttttatctgtagttaatagtagaaagggggcctgagtagagacaggacaagatagttctctgagcatctgtttcatcatctgtaaaaatgaactagaaaatctctaggataaatctttcttaatctggataacactcctgaaagaaagcctctaaattgaggacccttggttcccctattcacatcgtttatgtaaacagtaccatatttatccttgcactatcaatttaaagttagaaagggaaaaataatgaacagtattgaatttggcttatttgagcacttcttttcggacaattgctcttcctcttttgaccacagaggggagtattggtattatttaaaggtacataatgttacctcacaaaagagacagactaaatttagtcaaaatattgcatgaatcatttcaggaccaattctcctagatgaaatctctttcataataaatgtatttagaaaaaaatgaaagtgaaacccacacttctttggatgattttatacaggttttctttattacgtaacctaagaatagaagcaaaactatttacctgaggaggaagttaatttttaagatgtaaagcagtatgattttatcttgtaataccacaacgaggaaagatatgaaataagtttgagtggccaagagagaaaatgtgcaaatatactatattcaatagcattcaagtgtgaaaggactcaaaaattttttttcttttatttactaattcagagccaaaaaaagccaaaaaaaaggactttgtttttgacattgagtactctcataatttagtttacgggatggtttcctgctgcattttcctgggcttatttaaaactactgtgtttcagttgcagaatataaaatgtgctaattcacttgtattctaaggaaattaaatcttaagaaatgtttttgttttggattaatattcttaagtgtcataactagttgcttctgaaaatttaatatatgcctatataatattttgtgttactcattagtaaaaataacaacttttctcatttttagtgaagatagatgtttaatctatttaaattatatagttaaattatagtgacaaaataaaaatttaaatctggcttcttggagatatattacatatctcttattaataatatctagttgttttcaaaatatgctttctactaatgtgctcttaaggttaatttaaacatcatcctttttaaaaaatatatgtatggctaatactaaatatgcttttgttcaccttcaaagaagttcatatttttgatatatgtttttctttttaaggttgcattttggacacttgcatacgtcctttctcatcctgatatccacaaggccattatggaaggcatatcttctgtgtttggcaaagcaggtactaaaccttattatataggaagacacagctaataatgcatgtttgtcacacattattggcaaagctaaatacctataattttataaaaattcaacataatccaaaattcaacataatttgttatatatcaggatataaattgatcaggtagaatcctagagtttaattactgtcaagcatatttttgtgcaactccttcattttccaaatgatgaaatcagtgctatagagattgtgatttgcctaatttccttacttaaatatatatacacctgtttgttcttctaatgtcttggatcctcacctcaattgaatgaatgtccacagttttcaagttcaggatttttcagattttataaaagtaataagggtatattccatatattacataagagccctaataggactgtagaggtcaggtaaggcttgctaccaaaggattattaaaagacaacaaacaaaaaacaagtaaacaaaaagaaataaaaaaacccttatggttgttagaaatttgaggatttaggagctgcaaatagggattgttgccttgaactctttagttcagatgtcagctgtttatttatcatctcttttaaaaagcaaatacaagcttgaatagagagtactcaactacttgtttattcagcataatttgaccaatctggggagttgacttttttaaacttcttaatatgtcgtattatgtatcctgatataaaaagaataagaaatgatagggttttcttggaagaaaacaatataatattagggcaaaaggtatgatgccagttaatggttttccctctcccttccatgattactgaaaatattttatttaaagtttttttttttggattgcttcttatggagttaaaccaaaaagtaaactggcttggcaaccatgaatatctaagtaatattgtctgagccttgagtatgcgtcagcagatgctggaccttatagaaatggtgagcatcattatcattgaatgccaacaatgctaacaggttagattctggaaagacactggtgaatataagagaagacaactggcctttgtgcagcttgcatctacaaaacaaatagaaaggcacatgcccacatgtctacaaatggaaaaaggcaatgcactcttgattgtcacatattctcctttatcatttccttactagagtcttttcctgacttagggtactccaaatttgtggctttaggaaataaaagagtagagaggggatgatggggataacgtggggggtcctctctgacccaaaggccacaacagaagtgtaacattaatctaaatttctacaaggcttgattctagaactcttgaacccagttctagtggagaaagattaaaacctttttgctttttctatgttattgtttatttttaaaacccattgttctcttctgacacaaaaaatgctccttcgaatagtactaccactgcaacagctacattatatggatgctttcagtctataagacactactgcagaattgaaaactatttatgaaagacatcaaactttttttttaaccatacttatacagaagctattcaataatccatacataagatctagtagcagctcaggaatttaaatgttgtgagaggagtccacagatctttggaagctgatatcaaggaagatatccatgtgtccatacaaaggattctgtcaaggaaggaacatttaagtacattcgattagtcaggattctccagagaaatggaaccaattaggatgtaaatagatacatagataaagagagagagaaaactcaaaagacatttattataaaaaattggctgacctgactatggaggctgaggagtcccatgatgtgctgttgatgcaggctctcagtggattggatggtgcacacttacattagggagggaagcctactttactgagcccacgaattcaaatactcatctgtcatccagaaacaccctcacagacacacccagaataatggttaaactgaataccccatggccagtcaagttaacatatagaattaaccatcatctaggcatcatctaatctgttgagttttgtttctctggagaaccctgagtaaatttacccacccacatataggagggcagtctgccctactcagtctactgattgaaatgctaatatcaactagtaataccctcacagacacacccagaaataatgtttagtcaaatatctgggcacccccgatccagtcaagttacatgtacaaattatcatcacaggcatggaacaggaatctgactcagcacagcagtttttctgttctatgctcttgtctcccgcaagatcaccatttccttcttgggaaagtcttttatgaatttccaatgctgtatctctgtggcttcaacactcacttctaggcactttgcccaactttcttataaaacaaatctcagggtaaaaactactattgaatacttgcgaaaggaaagggtcagactcataccacttttctaaaggcagttagttcttgaactatcttgatagctgcctttcagcctactcttgtgttctctatttgtttactttaaaatgaaagctttttggggctcctttgtgaagatgcttgcttagccccaattattttgggtggtgcttttcattattctacttcctctaactaatcctgtacaccttctatctaagtctttattatctaagtctttattatcttcctaagtcttcattatctgcttcttccttttcttgttttacagctgtgtttttattttttaattgcacactttttaatttactttttagcaacagggtctcactttgtcacctggagtacagtggaatgatcatagctcactacagcctcgagctcctgggctcaagtgatcctcctgccacagcctcctgagtagctaggaccacaagtgtgtgccagcatattgggcttcattttttttaatgggacattggggcagaggaaggtagaagtgcgttctcaggttgtcatcttgagctataagtttgtgtgcatgtaacatgcatcaacttataaataaaattatatatatataatcatagataattaacataccataaaatttatcctttcaaagtgtgaaatgtagtagtttttagtatatttataagattgcaaccatcaacactgtctagtcccagaacatttttatcaccttcaaaataaatcccatacccattaggagtcactttctgtttccttctatttctagcttctgacgaccattaatttacttattgtcctgacacatttgccttttgtggacagtccatataaatggaaacatatgatatgtggtcctttgtgtctggctcctttcgtctagtgtacagttttatattataatgttttacattaattgattttcaggtcttgaagcatccatgcatttctggaataaatcctgcttaatcctcatgtataattttctttatatgttgctagattcagtttgctagtattttttgaagtattttttttgaagaatctatgttaataaggaatattgacttataattttcttttcttaaaataactttgtctggttttggtatcaagataattctggctttagagagtgtatttcttcctcttctaatttttgaaagaggttatgaaagattgatattatttcttctttaaacatatggtagaattcaccaatgaagtgatctggtcctaagattttctttttgagaagttttttgattaattcagtctttctacttgttactggtctatttagattatctatttcttcttgagtcagttttatactttatgtctttttaggactatgtccatttcatctagattatctaatttgttggtataaaatttttcatagtgttccacacaatccattttatttctgtaagggcactggaaaaccaaatatttcattcctgattttagtttgggtcctgttttaccttctgggtcattgtagctacatatttgtcaattttgttttcaaagaactcactttttaattttgtttattttaacttgattttatttttcctagtgatttttgtatttaatttaattttgttctaatctttacaatttctctatttagttctttagaaaagatttccttagttctttgaacataatgaaaatatctgatttaaaatctttattaagtccagcaacagtttcttcagggacgctttctgttgattcctttttttcctctgtgaataatctattcagacagtcttctacttatagtggttcaactcttgattttttaactttatgattgtgtgaaagtgatacacattcaacactgtattttcttatttcatgtcttatttcatgtttcttattatatgccttataattctttgttgaaaactggacattttaaataatagaatgtaacaactttggaaattagattcttccctttcctcagggtttgttgttgttgctgtttattgttcttgttgtttgtttgattgtttagttattttccttaactaattctgtaatgtttgcattctttgtcatgggtggccacagaagtctctgctccattatttagtgatcaggtattaactagacagatatttctttacctcagtaatttagaagtccccattctttgctaagggactgtgtgtgcatgttggccatgccttcaacactcagccaagcagttgacaactctgccttagctttcgctttctacctgtgccagagcctcaaggatgggtgtacatgacagcttgtggccttctcatgtctttcctgaacatgagtaaagccctgggcaaatggatgcccttctaaattcctgggaattcattagacctctgcaaagccactatgaacaactcattccctagcctttcattttcatcttgttggtttgcctgttgtttgtccaacagttacctactgactcagatagttgcaaagttaaacagttgtctttaaatattttaaaccaacacccctggaggaaaggcttttcatactgagtgagctccaagtcatgtcaaataaagacagtcttgcaagtaaggtcttctaggaaactgccaaacttgtcgcataatgagaatactgtagtactgaggtttagaagaagttccaaccttgttgtgccctatctagtgactgtgggttgttgattttcactgtgaatgcagacttctggcttttaaggcttctatggagatataaagaggggtttgagaatagggcaggttaaaatgatgttaagcttgatgttcttatcaagattcaactgtttttttcttgaatagacattcttgaattgctgcaaaactttggttaatctgtagaattctaaaaacttgatacttagaatttttaccaaatttcttattgcttttaaggagggaactttaggagatccttgctctgctatttttactgacatcaccctgaaatataagttttaaaatttctttggaaaacctcccaggcttatgtggattaacccttaattcatccattattttacttggccctcaaacttattttttgagtgctcaccatgtgaaggcattgtgtgaagtaccagagctatgaagatgagtaaagtaacagtccatgttcttgcagaaacttatgaactaagtgctttttataaaaattgaagacaggtttggaagtatccagaagatattaggagagaaaaaggaatatttacattgtttctttggagacatgtacctactggtaaattcagtaagattcctgtgcctggaactctttctcttactaatctttcagtcagcttgaatgtctcctcttcagatagatattttagtcttaccccatctaaagtcactttccccaactctgcccttggtgattctctgacttgtcttactctatatttccttaaaagtaagacaagttagagaatcactaacttttaaaaatattttttatttgtgtatttatgtatttaccccaccaaaatgcaacgtctccaacaacagaaactaaacatagttggtctttgtagtacctagctgcctagaacttaaaaattattcaacaactatttactgaatgagtttaatgaacaaatgtaagaatatatggctagttttaagagataagtatcttggtctagcctctgtttgcagctctatcaaccatcccatttgacattttatatgaaacgaatgttttatataaagactttttgacagttttctgcactgaattttgagttagcagaaccctattgtatgatggtcagtcagttgggagccacaaaaggagctagatcctttattaggatttccacaggaaaggcagagaagggacaagtcaacagtttagcattagctagtttgaataatccccaggggctctaaactgtagagtggtttctagtggcctgatatctggccctgagatgattaaggcagaggaatattgcttcttgggttatctgggccagatagaagggtgtagttctagattggttgatttgcatgtcaaaggtatgctccaggctgagttctgtgccaactggaagaactagcttgccccgagagggagaggagcaatctctccccagccaggaaggttttctgtttcttttaaagatgttatacatttaagaaatattattttaaaaaaatttacacacccacacaaatcattatatacagaaaattaaaaaaaaatacgtaatacacctagtcccagccaatatcttatcagtactttgagacactgagtaatttcaagcccagtaatccgtatgaatggtaaataatgttaacttttctctaggtttttgatctctgtaaagcattttttttgcctatggttttattttgttccttaattttgggtgaaacatatattaccaaatcattgatgatctgataaagaatatttttgctttgttatcaaattttggggtataattcctagaaattagtctttttgttttaaattttaattgataagttactacacattatttcaattgcctgtcataacctcataatgtagtgtggacactagggtcagactgcctgagttgaaatccaggtggagacacttattaatggtgtatctttactcaagttatcaagttctttaagcctttttcctctttgggaagatggttaataataatcctcatctcgtgaagttattagaaggatataacacatgtaaattagatagatagcgtagtacctggcaaatcgtaattgctttgtaagtcttagctatggccaaaactgatacaactatatcagttatatgaaattttataatcctcccacatcatgaaattagtaactgttgtaactttgagtttttctacttccaaatattagtcagtgttgttttttgaaataagatagttttgttgaatgtttatagtcagaaatgaattactttcatatgaattggctgtacttttggtggtgtcaaaatgcagcagaaatatagcatgagactatttatgtctaatattgccctacaagataggagtagtagaaacagtaatagttaatagtcagcgctaattaagtagcaggccctattttaagtgctttccttgttggcttatttaatccttggatcatccttcctaaacattattgtttgccctattttatgcacgaggaatgtgaaatcccaattagataacttacctaagaccatacagctagcaagtggtaggggtgtgagttgagcctagtttgtttggcatgaaagttgacaatacaaatcagcaaatctccttgtttcaaaattgtacttagaatccctgaattatgatgcttcaatccaatttccagctttattctgttccaagttgcttccactttaatcttcctaaagcatagctctggaggtatgctatatgtatactcagaaaatgttcctggagtaacattcatacccctgagcctgatacctgtggccatgatggtaggtttgacccacttttgcatgcagaatcacaatctaaccaaggtagactttggaatacccactaaaaacactctgcattttgtttctgctatgtattaacatttataacactgaatatgatttaattctaatatagttataaaactttacatataagtaaacttatagattagagaaaaacattttctaagccattcacctcatttttgattcaaaaaatatgactaccatatttataacccagttgttttccaaaacaatatgatgtgtctgccaagacaatagaattacccaaagaaattaagggccacttaaccagggcactttaaccagagcgatggtctgtagtttatgtagacaatcatctttacttgttgcatacctataccttcttctgaccaaggccacctggacatgtagatcccaacccccctaattacctctaagattttgttccattgatcgatcgccaatctcttggtgggttcaacttctctttctccactggctcttttctctctctctgtcagattgtggtattcagtgcacacatccagtgacctcacatctcactcagaatgaaatctaaagccttcaaatggcctcagagactctttgtcatctgattcctgtctaactcaacgacctcatctctgccctttcatccttgtttattttaccccagccacacccattcatttattaattcagcaaatatttgttgcactcccgttatatgacagggactgctttaggaacttggaaatatgaacaaagtaaatattacttttttcttggtgcttacattcttgtagaggatacagacaattaacaataaatgtaatacataagtaaactctaaaagtaaaaatattaaaaggtgataaatgggtgggcatgatggctcatgcctataattccagagctttgggattgcttgatgcattcaagaccatcctgggtaatataatgaggctccatctcttaaaaaaattgttagctgggcatggtgccatgcacctgtggttctagctactcaggaggctgaggtgggaggattgacctgagtccaggaattcaaagttgcagtgagctaagtttgctccattgcactccaggctgggcaacagagcaagatgaaggaaggaaggaaggaaggaagaaaggaaggaaggaagggagggagggagggagggagggagggagggagggagggagggagggagggaaagaagaaagaaagaaagaaagaaagaaaaaagaaagaaagaaagaaagaaagaaagaaagaaagaaagaaaagaaagagaaagaaagaaaggaaagaagggagggagggatggagggagggaaagagagagaaaagaaaagaaaagaaagaggaggaaaggagggagggagggggagggaggggggagggagggaaaggctagagaaaatcaggaatgtcagggatgggggaaggtggtattatagtattaaatagaatcagtgtaagccctaattggcaaagtgagatttgagcaaggactttaagatgttaagagttagacaagcagatatctagaggaagagctgattggggtcagagacagcagatgtggcctcactgtgggctcacaaaactctttgagatcaccatcatgatggcatttctgttggaagatgtttgtccttttttttttttattccagaggagaatgtgagcacatttctaaaaaatggttaatattaggttggaagaagagattcaggaaaaagcttttctttctttgtcacattattcaaagcaaaatttgattcaactctcaatgcgtggatttttaaataaaaaaaagaggatgagcatttggttttgattcagaaaatatgactaccattcagaaaatatgacaccagtacacaggtgttctagttaattattgcactgttttaaaaaactgtcattagacaagtttgaagtatcatgagaaaggtggggagatatcattgtacttagtctgcttttatagagtctttaagcgaggggtcactagcctgggaatagacaaggagtgtatttgtatatatacacacagacatgtgcatatataaatatatgttatgtttataaaaaggtatatagttatagttataaaatgtatttatatttataaaaatatatgttcataatgatataatatattttttatactcatatatattatttacaaacacacatattgatacgtatccatttttggccacgcaaaatctgaaccctatgtttcaacagaaacttgcctaccatagtgggcagaaaaatgctagatttttgttttccttgccttccttgaaactaggatattaccatgaaaataagactttgccattcagatctaccaacccaagactttgaatcaagagttactgaaataaagaaatggagactaaaaaattttccctggaagcaactgcaggtattgcaggatgaagtttctggggacacagcgtcattcagtatcctatgccagtggccacaatgcacttgacatcagtggcagtgtcatgcttgccagaccagttctgtggcctgatttggagcaagattcctggctatgcatccttcaagcctggttgtccagccctcttaaaagttacataaactacttaacaaacttttaataaattattattattttactaaatcagctaggtttagtttctgctgcttgcctctaacagatcttgctgataaaatatagaaagtgtaatgatcagaatgtccaatatggagaaaaaagtagaagtgacaaagtcagctatcaggaaaagtgaatggagccaaaggagaaaatgagcatactctcctgtggtggtataaggggtaagatgaagaagaaaagacacatctatccagattttatgctgtgatcaatgtacagtggactttttacattggaaatgtctgtaggaagcagaaagtcaggtgaaaagagaactgtgaaagccatgaatccagccggttcttgtgtgatggaaactcggaaggactagggatatacttccatgacacctctcctctttgtatgtcctctctaaatatggtaaatcaagttatttggctggtgcaaaagtaatggtggtgtttgccattagtttatttaccttatttagagaggatgtataaagaggagaagatgtaatggcttccatcaccactgagacatttcttcctcctgtagagttttatgtattctcaatatggtgaatattattgtatccacagagctgaagaataaagttatctatctttttactttgacattaagctatttagtatcacagattccattttatttatttaaatatttacattttaatttgtttaaggaggatttcatcagcctaccattatggtttacctttctattttaattaaaatataattttatttaaatatttagagtacatatttagatgtggtgggtttttttttttttgcttctttgtgttttgtttttttcaaaataactactaaagtaataccagattgtaaaagattaattgacagcgtaagtactcacacttatgggtaactgacctaaagcaatcaaagacattaatgtttagctcctgtgtaggctgtgttataaagtaattttcatttctaattcagggctcccactgtgagaatctgcccatcaatagaggctcattctttcctaaaaaaaaaaacaaacaaataaaaatgtgctggaatttttttcacttttgcatttgacttttccacctatgctttttaacataggatagcatacacatgcacccattttattttatttttttgctgatcagttttactttgcctttatttaaacaataaattaataaacattttctgttaatttgcaaggaaccagattaattaatagaaatgcacctgcatagaaatgattcctattttacataaaagtcatgatttatgcatcataaaaggcacatacagaattttcattggattagagagttagcagttggattcatgaatttcaatcttgtcactcactaattgtgtgattgtggatgaaagagaaaccttgctcagagccaatcaacagtggtttttggtaccactgtgttttgatttagcagcaatcctgactagggatataccaacactgtgggatggccagcgtctgttacctggtgacattgacttaggtagctacacgttatacactggtgaggaaagcgtctgactcttctcataaatacaaacaagtataaacactagtaaagtgaaaagtgatattctaggtaaactccatattgtctgctttattttaattagttgattagttttactttattgcatttaagcatctgtatttattcttgaaatcttatatattgtcattgtttacccatattataacttgtatgcagcttcccttcacttgggtgtgtctcagcaccatcttgccaaccaataacaaccttcttggaggactccatcatggcatattgtagacctgagtcccttcagtgaacttaagctcatgctcactacccaactgcagcctgccagggcccaatggctgatggccaaagttgtgtctgtgacagattcttggccccttgtgcgatgcattgcccaaaataatgaagaaagagatcaaggagcagagccaaggacgctccagtggaattgtgaacagaaggaagttattttattttaaaaaattatctccattcccaccagtagcctgacattatgaacctaacacagagattcgggaggctatagcttatcatgcaggaaatttctcacatagcctcatttacctttgctagcctagcttttaaaatccaagaatggacccaggaaattgtagattatggaggagcttcttacaaactacttctcatttatcaaccttgaagaccacatatagattacttaaaaaagtatttataaatgcaagaaagttcatttgaaactattctttctaccccaaatatacagtttggctatcttcttattcccttggccttgaagatcaggatgatgtcattttggaactcataacttgtgattttcctatctactaacctagccataatgactagggtgagacttgcatgtctaatacctggcccaggagagatttctcaggaagctttatttcttccactgttttctacctttaatacccaaagtgggtcttgtgataccctagctcaagagattttgtgtgaagtcactctctcctttttcattgcttagcttcagtggctgaaagagatgcctctgatagctgtagattatttgatatccctgttcatatttataagcttggagataggttctactctggtgcctctcattttaaatctttcactatcttattctggggcagcactgttgatctgctttatttgttctctacattttttcatttagacacaattctttcttcagagcattctgttggtgaatttttcaaacatttggataatcttttttttattctttaggaaatactaaggtaaaaactattaaagtcaggctgacatctctccagagaacataaaccaaaaatttggactcagactcagtacactggctttatacataagggtatttctagatcaaaatttatttcacatattattatctacccactgttatcttctttaggcaatattctctcccttttatttatcatgtattggactatatcctttattccttgaaaaaaaatcatgattatgaggcatgctccatttttgtcctccagtagttagagaaattgataatctcttttttaaaatatgagagaagcacttcttaaaataacaccaaatattatttttcagagtagaatcttatatggttgacttggtatagtggcattgaacttcttttgacatgatagaatgggatttgggatatttaatatgtgcacgtactgatggaagaaagagttgggagggtcagcctgtcaattctccttatcttccattggatgtaataacctgttctcagaaacgttgcagtcagtccttcatatctttcgcactccattgttatcactgccttttccaggctttgcctattgttatgaatgtcaaactgaaacagctgagcaggatctacttccaaaaggttattacttgtaatttttcaataggaatatgtctttgataataaaatcttatcctaaatccttcacatgccaaaaggccatatccatccttgtaaaagtcagaactagagctgaaggccagaaatgactgagatgcttggaagaagctggtggctggaggaggagagtagaaacatgtgtggtttgccaggctactgctacaatccctgaggccccagtgctcatattcccagagtccatggacaatctctaggcttattatttgctttccccagtctgtattcaccacagatactttaagctgctttttaagccttccttctcatgttacatctctccttcctattcatttaactggtatttctcttgcataaagaaatcagactggggcaggacctatatggaggaaactacaagatttttaaaatatgtatgttttaaaacaatctaaataaagaaaaaggcatatcaccttcctggatgggaagatttaatatgaaaatacacttttcagattactgtacatataatgagaattccatttttgggggagtgtagttagctaaatgatttaaaactatatagaaaaataactgtgattataaataaaaattattagaaatgtgaccaggtgccgtggctcacacctgtaatcccggcactttgggagactgagatgggaggatggcttgagaccaggagtttgagaccagcctgggcaacatagtgagattgtctctatgaaaattaaaaaataaaatttagtcggatgtggtggcatgcatctgtagtcccagctacttgggatgctgaggtgggaggatcacttgaacccaagagttcgaggctgcagtgatttatgatagtgccactgcactccagcctgggcaacaaagtgagaccccatctctttgtatacgtgaaatgtaaattagtaaggccagattcaccctaattaaggccagattttaataagttattaaagcttattataaaactgctataacaaaagagtacacaattggcacaggaaaaacaattgatccacataacccttgtgtatcttttaccaataaaaatcaactttataatcttctctttcaaaactaaaactgtgggtaaatagtttttttaaaaaattgtttcacattgtcaagacaaaatttcccaaacgatctacatttggaaagaattaatattctagaaacctgcactcaatggagagaacctataaagaatttgcggggatagcggtgagtgaaaagacatttaacttcacagctaccatcatgatctttcatctgctgtcatcccctcttccttgaattttctataatttgacttattatctttcccatagatattttatcttacacaacatgtataataataaacgtgtgcaattacaaaagagataaaagttttttaagaaacaacaaacccaaatagtaaatcatttttctttgttaaagcaatatttgggaggtaatatagagtattgatttttatattgaatttttgaagggtctctcagcacagtaagcttacaagttgcttggaatgatagcacaagccttgtgtgttaaagaaggctggaatagcttatattttacatatgtgtcctcagctctggagcttccctgtgtggacctccttctgtttttcctttcttcattttcaagaggtttctgtgagctctctgactgaggcaacaagacataactaatctccagggacccattctactcttttcaaaaaagataaatcaatttttttgatgttaggaaaatcacatttactgtctactgattttaggtacccaataaatttcttttttttctttttttttttttttgagacggagtctcgctgtcgcccaggctggagtgcagtggcgcggactcagtggcgcggactcagctcactgcaagctccgcctcccgggttcacgccattctcttgcctcagcctcccgagtagctggaactacaggcacccgccaccacgcccggctaattttttttgtatatttagcacagatggggtttcacagtgttagccaggatggtctcgatcttctgacctcgtaatccgcccacctcggcctcccgaagtgctgggattacaggcgtgagcccacggtgcctggccctaaaattgatttttctattcggtaatcaaagatcagtttcacactatttcctttcaaaattaaaagaataattgtacaaaagtgtttattgttttctccatttagagacaagtcaacaaatactcgtctcacaaaaaaattcccacaaatctgtaaccagcccattctcgctatctataaataactgttataaagcctgttgtaggccaggcacgatggctcacgcctataatcccagcactttgggaggccgaggtgggtggatcacctgaggtcaggagttcgagaccagcctggccaatatagtgaaaccccgtctctactaaaaatacataaattagccgggtttgtggcaagtgcctgtagtcccagctactcgggaggctgaggcagtagaattacttgaatccaggaggcggaggttgcaatcagccgagattgtgccactgcactctagcctgggcaacaagagtgagactccgtctcaaaaaaaaaaataaataaataaaataaaacctattgtgaatggtattatctacttcagatattatcacctccgtaagagtgagtatatattttattaaaaaatagatatataattttaaaaaatggaattgctgaacattacttttattgaagttttaaaaattcctgaaatgaagggaaggatgtaagggtctcttttttcccactctagaatactgactattgtaaagttttatttattctttatctttagctttgtctctgttctctaaaaactgactttgtagaatcttatctggaggtctctggttgagaaaataagccagaaatctgaacagttacagttttctgcccttattttctcacaggaattgttgtcattgcttcattatttttgcatagaagtcatacaaatgctatatattttccaaaactattgaataattttctgaagtgacagtataaacactaattttttataatttggtttttactttttgaagatattactattgtaaaatttgaagagtagatgtattgaccaaatgttgatagaagtcattgctgaaggttattgaatcagtttgtttgtttttcatctattatctcatgtatatttattccaagttcattctccttcatgtgcactatgatcttttgcacacacttcaactttatatattttaaacaagctgttctaggaatatggaaaggcagcctctgagaaggaaaacttagtcatgacacagaggagcaaacagcactgagaattcatgctttcaaaagtaatgaaagaggtggtgaactgtgttggggttgcactctttaaatcttggaaggattttattatttgcatttttttcatcttttcattctgattttcattcttggagaagcacaggggtttcctcagtattcaactccactttgcaaccccaccttctggttcagtctccttgaaattatgtttccaaaggtctgaatgagttagtaaatgcctaccattccccttcttttctggcaaaacatggattatttccccaaagttattagttaaatttttaatgaatattacttcaaagctgtagaaacaattatatgtatatttatttatttacttactatgtctgcatgtatgcatgtgtgtgtgtgtgtgtgtgtgtgtgtagggggaaggggcttgaaatattaaggagctagagaagccatctctcaaagaaggacatcctttagtgattctatttgactcatgttctttttttttttttaagcccaagaaatttttgtgattaattttggaatttaagttagcattctttctgactccaacccatccttccaggcttagttgaaatttcagccctaagtgagaagagacacttgaattctcttatatgaaacttagagatatttatatccaggtattttttgtgtgtgttcttgtttccaggatcctttaaggcagtggccgtgtgtttctcattcccttcttgtctttgaggaagcaatgtggcgtagtagcaaggttgaaggctttcagtatagacagacataggtttgaaggctgctctgatactttcaagcttgtctccttgaacattttaacctctctgaggctcagttagctggcagatatctatgaggaataaatgaagtgatccaaaatatttgtgacattagatgggcaataaattagttttatttcctccctatctcttatagcacctatgcttaggctagcacataacagatatggagcaaatttacattgagtgaatcaatggctaaagtaatagaatttcaatttgttataattattaacaaatataacatatgtaatgtgttataatacacatcattatgagtatgcaatcctaaaactatgtataatgttttataaactttttttgctatttctgaacgcaagaatcatcatttcttttacttgattttcaacatcctaaggtttgccttcatcatgtttatgccaagagttaaacagatggtttctgaattttagcccaaatcactcagtttctttattggtctgtcatctgtactggtccctgtctccattagactgtagcccttttcatgattaccttggcattcttccaagtgaagccttctaattttagagtcacaatgctggaagaacaaatcacagatgtgcattgaagtatgcacagtatgggtacggagctatttctaagagtcatagtaaaaaaggtcttttacactaaagaatcattcgaaaacttagtgtatttccttttctttttctttgtatggtccaagaatgctacattatttttctcacatgacactgacatttgagaaactaaaaatattttatcaaaatatttattttccaaatgtaggctacatctctaatacatttataggtcataattttaaatgttttcaattcaaaacaagcttctgtttctatattattaatatagaacgttttaccctttttaacttactaagagtactttatccaaaaatgtttttctgaaggaggtcaagaacttcaccattactagagtccaaacttttccaagaccagaattatgcaatatgtaggtcactgtggagtctcttggattttcacagatctgatttcaaacacaaactgaccgtagttgccacctatccttggtcaagtagaaagatacttcttttcggcatcctatagctgcagtaaaataaaatagaaaaaaagtagaggaattgtttgattgatttgtccagtgtagatgctgtaaatagattttgagagaaaacaaattttttgaaaagtaagatctagaatttaaattgtaagctactgctaatttatttataatgtccatttgtgaagggccctagcttgctggaaccaccttggtttttaaaataaaggtaaattgtttggaccccatctcaggtttctaattatctttggagggagaaatgggagaggaggcaagaggtagaggcttgtgttttttctagccttctcttgattcctagttcctgcatttgctgattttgcaatttctaaactctttcccttctgcgtgtctgccacgttttctgcattgcattgcctcactggacatcctccagctctttatttcccaaagtgttaagttaatgttagctgattttattaaaatattaaaaatatgggacaaggaaagtaaaaattacattgcagtcagaaacaaaagtcctgtctgccaaagaattttccttgacactctactaggttatcagtgacctatcattgaagctgggccctctctcttcttggaaatccccagctttgtcttccttaccttgcacactggcagccccagttgcctttcacttcctgtgcaaagctgctcactctccctttgtctcaccatggacattcaggggttctaacataggacttcatcttctcatatatactgctaggcagtggttttcttgctttctttttctagagtacattctagaagaagcttgtccaacctgaggtccgcaggccacatgtggcccaggatggctttgaggtttgtgtttgacccaacacaaacttgtaaagtttcttaaaacattatgagattttgcatggaccttttttttttttttaagctcatcagctattgttagtgttagtattttatatgtagcccaatgcaattctttctcctccaatgtggcgcagggaagccaaaagattggatacctgtattctagaagaattttgtatcccctcatagatttttaaattgatgtctaatagttgctatcttatgtttaagtaattgcaaaggatatcattcctggtatattttctacatgttcttagtctatttaaaatacatatcaaaagttacaggtttattatagttcactcagttatgaaaaatgggtgccatataacctaattctcaaagccagttcttattaccaaactaatcatccaatccaatttatcttctaacagaaaaggtctgatttcattctttcaattcaaataaacatgttaatatgtgttgctgtgacactcatctcacttttgaattctgattcgtagatcatcaggtggacaaacatggtttgtaagcaaggactagtggacaaataggtgaaagaagacatgtctgcttttggtatttctttcctgtgcctgttttactttgctctcaagggcttttcccttaggttccatgtgttatctaattgcccttttgtttggcagccaagagatgtttatacctcaaggaaaaagcactagagtaaaaatcgggatagctgagaggcaagatattccatcgtaaagtcaggaaaaggtgattgtattggggagatgggaaaagagaattgggccacagtcttttattcaacagatcagttttagaaaagagtgaatatggaagttgagtatcagggaattgatttccttaacatttgctctcatgtgccctctgggtatgtgaatataattcgaagatgattataatgtattctaaacaaagacattttccttataaaatatagactacctctcagggaaagaaattttccttgtaaaatatagactacctcttagggaaagcatattgtaaaataagcatattttacagggttatccagatactatgctaggcattgtatacttgacttggttatataaatgatatgtacagcgaagactacatagaatttatagtattgtaaaattcaaatgctggaataaaatctggacttctaagcaataggaagtacaatgaggagcaaaccagtagcttgtccccttgatgtcccctaggcaggggcaaactttttctatataaggcagagagtaaatacatagcctttatggaacataaggtctctttcaccactctgctattgtagtgtgaaaacagccatagacgtgtaaacgagtgagtaaaccaaaaagtgtctgagacaggtctcaatcaatttagaggtttattttgccaaggttaaggatgtgcccgggaaaaaggaatacaaaaccacagggacatttgtgagtcctgctttttccaaagagagtttggggacttccatgttcaaaggaggaagaacaggcagtgggggaaagaggaaggggagaaaaaaggaaggagggtagataaaaggggcaaatgcttgcattcttttgggtctttgatcagtgttcactgaatccacattttacatgtgaaagaggtgatagaggaatagtcaactgtatattcatctagcccacagaaaatggtcaatttatataagtaaacatagagtagctacctgtggagacctctggccttctatctgtagctatttgcttaggaacaaaaggaaaggcagttccagcttaatatttccctttggcatagtgaatttgtggtcctgagattttatttttctttcacatttccaataaaacttcatttacaaagtcaagcagtgagctggatttggtctgttggccataatttgccaactcataccctatgctatggctgcatacaggggagaaggagaatagggtccaatatatgtggctgcatgtaagctccagacttttgtaggtgtaaaaatgatataattttgaaccatttatgaaatcctggccagttaaaaattcaatcataattgatcatcacattatttagttttattgttcagaagaagaaataaagctccccccccccattttatatttagtggctttcagtgtcaatatatccagtcaggatttctgattcaaatcataatttttacccactaagtgtatttacctacattttataaaatagaaaagataatttaaaaattggcaataataactgctttaagcctagactatctaataataaaatccaaggatgtcttctacctcttttaattcagcactgtggttcttttttttttttttttttttttttgagacgtgcaccaccacacccagctgattttgtatttttagtagagacggggtttctctgtgttggtcaggctggtcttgaactcctgacttcaggtgacccacccacctcggcctcccaaagtgctgggaatacaggcatgagctaccacgcccagtccagcactgtggttcttagagtgtggtacctggaccaagagcatcagtatcacctggaaattttccagaaatgcaaactcttgggccccacatccaacctattgaatcagaaacttttggatccctgcaatctgtgttttcacaagccttccacgtgatgctgatgcatgcttaagatttgagaaccacttctctagtatatatcaggtttttactaactcttttttacttaaagatttttacattctccctcagaaacgtctttcaaatttgacttctctacatacctcccattgctgttacacaaattaaaagcttcctaattaacctcaccttccaccattttagacatgcattcatccatccatccatccatccatccattcatttattcaataaaaatatatagagtacctactgtatgctggacactgtgttagatactggatatacatcgaagaacagatctaacaagattctgaaacacatgtaatcacatcctatttgggggatcccgggttattttatatattaataggaactataagggaaataaaatgaaataatagtgattagggagatgttagttggggtggccaggaaagggtttctgcagaggagaatttctagctgagagctaaaaggtgaaagggatccagcctttcaaacagttggaaaaggcagaggaaataataataataagtaacctgaggacgggcatggtggctcacgcctgtaatcccaacactttgggaggctgagatgggcggatcacctgaggtcaggagttggagactagcctggccaacatggtgaaaccctgtctctaaataataataataataataataataataataataataggtaacctgagattttgccacatgccaattatagtggtaagcgctttacacgtattaacacttttaatcctgacagcaaccttgtgggcacgtactttctgtatttccattttatatgtaagcaaactgaggcatagagaggttggataatttacaaaggtcacatagcctctaggattcagtgtgagatgggactagagggatagatacggctttatttgccaaagtgagaatgttggatttaattctaaatggtattgaagccattcgtgggtcctgagacggtactgacttggtcttatttacaaaggggttgtagaggagccaggtgggagtaggaagcatgatgaaggctgtcaccctggaccaggtgagaaatattcacggcttggacaagagtggtagcaatggagatggaatgatgtggatggaagtaggatttagtttgcaaataaaaacaaattttgctgattgtttaagggagttaaagggaaaggaaggacaaaggaaaactgtttctctacacacaacacttctgacaccaaatgtgtgggttttccacaccaaacaattctccagttctcttcagatatcaactgggtgtcctagaacttaattcaattctgacactaactgcatgacattatcacagacccacaggttaggggctcagtcccgcaagactctccccaacttcagatgcccattgaaattagtacagccccaggttattcacacttctgtccaacttgtctacaaatcgggagttttccacaaccacctctctagattcgataatttgttgtaagggctcacagaactcagggaaacactatgcttactatttctggttcattacaaaggatattagaaactatacacatgaatagccagatgaggaagcacatagggcaaggtttggaagagtcccaagcataggagcttctttctctgaagttgggtgtgttaccctccggcacatgcatgtgttcaccaacccagaagctctttgaacccctttattgagggattttatggaagttacagtacaaaggcatgattgattaattcattctccattggtgactagctgaatccccagcccacctcccttccccagaggctggggaatggggctggcagttccaatcctctcatctcatggttggttcctttgacaactagcccctaatttccaagagtcacttcattagcatagtcaggtgtaatcgaaaggggcttatttgctgggcagggtggctcacacctgtaataccaacacttttgaaggctgaggtgggcagatcactagaggtcaggatttcaagaccagcctggccaacatggcaacaccccatctctactaaaaatacaaaaaaatagctgggtgtagtggcacttgctggtaatcccagcaactcaggaggctgaatcgcttgaacctgggagtcagaggttgtagtgagccaagatcgctccactgcactccaacttgggtaacagagcgagtctccatgtcaaaaaaaagaaaagaaaaaagaaaagaaaagaaaagaaaggggcttattatgtatgaataccaaaagatgctcctctctcccctatcattcaagaaattgcaaaggttttaggagatctgtgttaggaaccacagaccaaatatatatttattatatcacaatatcaaacagaattatcatggatgatttttaggtttgaacttgagcagctgggcaaacattgttaccattttctgcgatggcaagaccaagggaagaaaggctttatttcagtggggcaagtgaagagttctgtgtaggccagtgttgctttgagatgccttttagacctgcaaacaaagccaatgagaagccagctggataacaataatctggagctcacaaaagggatgaaggcaaaaaatgttattgtgggtgtcactagcccactgatggtattttatagaaaagggtttgtttgagtcccccaggaggataatgtagagaagagaagagggcccagaactgacacctggcagtcttggggtacattcagaagttggatagcgggaaagatacctcctgtcatctctggattcatctggtatgagcagactggaacctcagtggaacacccttggaagagagggtggatccattaccaaaccgccaagaaccagtgcgacagcttgttctgatctgcatctacagttgattgacctagtcacttgctacaccagactctatttcacactgaattcctgttatctgaacatgctctttatttttgtgtatctgattttttcttcagatttttttcttctgaaaagcctctctgacacctccctcccccgtctggtcactgtcaccgctgtgctcctatagcgagttgcacactttaatgtgatagcgcttattgcattaaccacttttagttctctgtcttctctatcagactattcagagccagagacatgacctacatcttcatactcagcacttgcaaactacctgtagggtctcagtctctgcagatatctactgaacaaataatggaaggaattcctcagacctggcccccaattcgtgttgcatatgcaaccccacacgccaatctctaaattttctcccaataaaggtttcaggaaaaagaataactttattagctatggagtaaaagtagataggaaggtgtggtttctaaagagtcattattaaattcgcattaatagtaacggtaataataaataaaaagtaaatcagcaccaccttgtactgaacacttagtacataccgggcactgctctaagtttgtgtgtcattcataaactaattcaaaaattagaacctcaggatttctcattttaacattgtctagacaaagcacttattctttctttaatttttcatcttatagtctttttgatggtaaagatctccaaaacttaaatttcttatatttccttagcactttattctccagtgaatgccaaacatttgtctatttgatttagcaatgatatctgttacatatgcaaaatctcagccacttttcaaataaagaattctgaccatggcttttctaaattatttttccgaattagtttagaaaatgttgggatagtttggggaaaatgtaaactaagtaaaatgtatggtacccctgtctttccatggtgtatcaagacagttttcagttggtgatcatgttttagttcttaataactactcatagattatgccatgtgcacgaaagtttatgccatgtgctagtaatcttcagacattaaaaatagggttggtttgctttttcggaggattgccttggaaataatctgtatcctaatttatatagctagttatcttttatgtagctaatgatttgcttgtatggatattggtagaagacagattccatgttacaaaaagtttgagaataacagtgtaaataactgttttattgcaggatttctcaaagcctgtaatacactaatgtgtccagtgaatcaccaataacatgtagcatttttcgtatttggttgcccatgaacctttttcctccttcatacgtttgacatcttgcaaatatttcatagaacacaatttggaaaaactgtggcatttaggttgtgaagatgcagaaggcatacttattgttttccaatctttgttacggaaaaggaaaaccaacagttttgttgggcaatgcctgcagagattacaacaaaaatcccataaaagtgcttatctccttttaatattagattgctcagatctgagcaaataagccgaaggtcttaatttaatacagaatagtgctgtatatcactgtttcattgttgaggtgttaacactccctcagcctaagacaggaagtttccaatttctctagcctccggatgttccagaatggcatttaggatcgtctgtagtatggccttagtggatctctcactgttccatcacatatgtctcaccttctgggcaaactggacccattgccattttctaaatgtactcatgttgtctgcagtcttacttttgttcttcctctttgcctaaaatatccacccattcacctccctatgttgaagttggaccatttgctaatttaatatatatatactggggttgactctatgcaagaaactaatcatatttgtagttttagagaaatatattcataaaatattttctttttcatctagttggatgtgaaccctatctgctttaaactaccttagctgtgaaccctatctgcttttaactaccttagaatattttacatcttagaaaatagtttctttgcctacatgttgtactagtcaactgtgtgcttgtctcttacctcctagtagactaagtgtattgcaagcaagagctgcgccttagttattgtaatactggtacagcctgtctcagctcctggtccctacgtggtacttaagaatctgtcagattgaatggagttcataggttcctagactccactaaccaaaggtgtttgcttctgactccttaggaattctatctatactgacagaaaaggtttcccaggcagcacccaataaaccttttcctgcaaaatgggcttgcttttgaacacgcctcatccagagtcaaagagagacatggctggagaccctagttctactcttacccactcattcccaagatggtctgaaagcaaatgtgaaaaagagaaatgcgttgacttaattaaactgacaatattgttgttgacttttcttaagcaaatactgtcaaaaacaaattgaaagcgcagttgtttcaagtaattttcaaaatgcaaacattttacttgaaatattgttaactaaactgtctaatttgactgaaagttcctgccattactttagatggtacaaaggttgatggttgatgcccttcgtccaccccaccccctcctttttcaggtgctttcagtctaaagatcaaataaagtatgcacatcacgttaagaaagtttgatgcacctgtgtttagagggcatcttcattcttccagctcagatacttgtgccccattgccccttttccagttgtttttttgaaatgaatgatttagggggaaaaaaaaaagcaattcaaaagggtaaaggcagaagaaaaaggccggatggcttctcgtatctttttctttgtgcttttgatgtcagtcttttattgctttttacataagtggaatgagaatttagacaagaaaaagatgagtaaaacctttctgacaaggactgtcttagctatttgatagctataagactgtgggaacctaagttggataccaatccatcacattacagtaatcaacattggcttagttttttgtgtcatacattttaccttgtcaagagaaaagtgataaagaaaaagaggcaattaatgactaaacctgtaataggtaatagtaataggaacactttacttgctgtcagaggcaacatctaacctctgctgatgagcttacgtgaaatcactttctgacctctgtagtctatttatttctcattaaaaatttttttacaggcaaagataagattaaagtgtctgaggatgacctggagaatctccttctaattaaatggtgtgttttggaaaccattcgtttaaaagctcctggtgtcattactagaaaagtggtgaagcctgtggaaattttggtaagctttggtttggttttaaatgaatcaaccttctacaaaaaaagtacacattttgcccacatatatttttcaggttgacatatcttgatttatttttacttgacaaataaatattttatatatttgtcttgtacaacatgtggttttgaaatatgtatacattatggaatggctaaatcaaactaattaaaatatgcatcacttcacttgcttatcagttttctgtgtaagaagactaaaaatctattctcttggtaattttcaggaaaacaatatgtcattactaggaatagtcaccatgttatacaatagacctcttgaacttactcctcctgtctaactgaagttttgtatcctttgactaatatctctccaggtcctcctccaccccttctttacccttcaatccccggtaactaccattctactctatttctgagctcactttttttagattcaacatataagtgaaaatacacttatatgtggtttgtcattcttcctggcttgtttcacttaacaaaatgttttctagtttcattcatgttgtcacaaatgagagcatttccttctttttaaaggttaaatagtattccattatgtatatatacattttataaacatgggagtgcagatatgtcttcaacatactgatttcatttcctttagatatgtacccagtagtgggattgctagatcatatagtagttctatttttaattttttgaggaaccttcatactgtttaccatatggctatactaatttacattcccaccgatagtgtgcaagtgttcccttttctctacatcctcttccacaattatctttcatctttatgatatagccattctacaggagcaaggtgatagatccttgtgtttttaatttatattttcttgatgattagtaatgttgagcatttttttatacctgttggccatttgtatgccttcttttgagaaatgtctattcagattccttgccaatttttaaaaatcattttttttgtttttgttttttactagtgagttgtttaagtttcttgtatattttggatattaacctcttgtcagatgtatggcctgcaaaaattttcccccattaggttgtctcttcattctgttgactgtttctttggctatacataagctttttagtttaatgtaatcccatttttctatttttgctttggttacctgtgcttttggattcatattctcaaaaaattgttgcccagatcactgtcatggggtcttttcccatatgttttcttctggtagtttacagtttcaggtcttactttcaagtctttaatctattacagttgatttttgtatatggagtgaaatacaggtctaatttcattcttataaatgtggatgtccagttttcccaacatcatttattgaagaaactgtccattttctattgtatgttcttggaacctttgttgacattcaattgactgtaaatgtgtgtatttattctggggctgtctattctgttctattgatctatgtgcctggttttatgccagtaccatgctgttttgattactgtagctttataatatattttgaagtcaaatagtgtgatgattcaggttttttctttgttcaagggtcttttgtagtttcatatgttttttctatttctgtaaaaatgtcattagaattttgatagcatatattatgtaatttcttgaattccattgagcacaaaatgaccctagaacaggttattaataagagttgtgtagcaatgtttcattaatatagatatttatcttatggcaagtactttaagtaaaacataataaccctttaataatcattctggccatctgattctgaatcagaatcaatataatcctatttaaatcaggcaggtgaattgaatggtctcttgtctactgattcaaccaacatgaatttcttagcaccaatgagctaaggaattcaggatgtgaagaaagttattttgcatagctggaagacaattttaggccacagattacagatatgggaacagataacaggaatatattggataatctcaatttatattaggaggcagcagctgagtgaaggtgagaggattttctatggacaaagtaggaggaaattctcaagtgcaccatgaaagggtatgtgcacatggcagacttattagttaaatatttgtgaatcaatatggcataacaaattattttttttgaaatgatttgacttagggcctgcattatccaaatggatcacatttaatcagtcctctactattgtttgcttttttatatgcagcttgagagtgcttggattcaaaccaaggaaattttgtaatagaacacagataaaaatccaaattttgtaaaagttgaaacttttgcttccaaaggagacatgatttatttaactgaccttatgtaaattagagtatttagtttttgtgggatttcaacagttcatacttttatttatttttattttattttaatttttttgagacagggtctctgtcaccaaggctggagtgcagtgacacaatctcagctcactacaacctacaagtagctcttccacggtcttttaacctcatgtattagtcaggattatgttataaagggagttgtaacttttgttggggctattaacctcccatattctttcaaaagtaattttacttattttgacaactttgccagaagagatacccatgctcaaacacatgcacacagatgtatactcttgcatgcacaataccccatctgcacaacctcttaaatgtactaccgcaactatctaatattctctttgtatgacattaatatagaaaccaaagtttcagcatagtgtaaatctgtcattaaaatttttttaacactaattcttcactttttatgcatctagagagttttcacatttatttcagtggtcacataatagtccattttcttgaaagcataaatatttagtagtttttgactcttcagaatttagattgttttactttgtggttatgttaatgtggtaattatttgcatctctgttgcccatgctggagtgcagtgacatgatcttggctcactgcaaccaccacctcccaggttcaagcaattctcctgcctcagcctcccaagtagctgagattacaggagtgtgccatcatgcccagttgatttttgtatttttagtaaagccaggatttcaccatgttggccagactggtctggaactcctgacctcaggtgatctgcccgccttggcctcccaaagtgctgggattacaggcataaacgaccacgctcagctgaaaagttttctgttttaataaaacacatctacacaattttgaattggtagcaaagtcatctaatatatggatatagtatacatttttaaactagtccctgttcttgcatatgtatgtggcttccaatttttcacttctataaacagtgtgaagatgaacatccttttagctaaatccttgtatacattactaattatttccttagtataaattcatacaatttggttctttcaagattcatatgttttcaaaaacaggtggaatgtttttgctgaactgaagtttaacgatatgttcccagaaatttgtattttaaaacacatttcacatgggcttatctatgttgagtaatgacagaggctcatattttctcctctgttgggcaactggtcaatgttcctttttatgcatactagaagtattctcccaccacccttccctaaggtagttcgaacaggctctctttgtttgcttttgcctctgtgccctttcctggaaatggaatgaattgaaatggacgaacactctctactttcttggatttactgcattctttctttctctttattatgctacctttctaaaactctgaaacttctacctgtgttctcttttcaaggttttatatgtttagtagaaaagtttatcttcaagaatatccagaaaagagtaacaaaaaagagtattggaaaagatgagtaattgagaaatattaattatcctttaaaacctgttataaagccaaaagaattaaaatgttatgatcccggtgtcagaccagatgttcagatcaatagaaataactggaaagataacaaagaattagcttccttatacataataatttaatgtaggataagtgactcttttaataaatcaatgtaaagggaagaaattaatatgtggcttgggatgactgactaaaagtgggttttttttaaacttcttaagtagaagttctcaaactttttggtttcatgatcccatcacactcttcagaattattgaagatcccaaagagtttttgtctatgtctattttaaatctatcaatattagctatattttaaatttaaactgagaaattgttaaaatattaatttggtgattcatttaaaataacaaaaacctcttacatgctaacatgatacatagttttctaaaacattaactatatttattttataaaaagaagaggactgcctgattttaagattaatcaatgaagccacaaaaaggataaacagatttgaatgtaccatagcaaaatttaatgtctcattttttaaaagtgtaactcaaatgtgaatataatgtaaacatcaatatacaacacaactataaataattttaatatttaaagaactgacacaaatcaataagaatgagtgtcacataggttaatcaggacagaacataaaagtttataggataaaataaatggaaaaactctcaaacataaaaatgtaaatgtaaaaacataaaaatgtaaacctaaaacaaccattagaaatgttagattacagataaaagggtaatgaaacttacattctcataaattatagttagaaatatattttgctacaaaatttgaggaaacagttgaataacatgcatttatagccttaaaatatgcatgtcctgtgtcatctgaacatctgtgttaacagaatctatgtggaaaaatgctgtgtggaagaaagtgcttatggtggcactatttaccacaggaaaaaaagtagggaatgattacattaattattgtttaatgtacccaatggaagattaaacagtcattggaggaagaaatattcaccatgaatatacaataaaaagggaaaacaggttatgaagttaagagaactaagaaagattaaattggttattcaggaggatcaaaactatgtttaaagtttaacaacaacaaaatatctcctattaatactaagtaaacatactggaaagaaatctagctagttaatgactgtctttgggtgtcagaactctggattttcttttctagtttttctgcttttcagaattttccaaactttttgtagagataagtttttatcatacaaaagaatatactctttaatttaaaaaatacttattttgtttttattttttttcggcacaaacaccaaccaagcctctggttgaaagctaggagaaaaggctgtgtgctttagacctcctgctatagatgtgttgcctctggactcctcctttctctttaagattatgtattcctggcacccacttagctctgagcacctttcttgaattacaacacagagtcctgccttctcttccttttttaaagaaagccccacttctagattatcagatgaagcttgttttggcttcacaccatccaggtgaggtgggctggccaggctcaattctgtctacctgagagatgcagttcttgcaacacacagaagttgtagcttccctttgctagtgatctgtgttctcattctgcaactgttttgcctccctcttgatctttcacttcatctgtcatgtaagtaaagatagggactgtttaggctgggcgtgatgatgtctgcttgctcagagggtttcttgacagaaccagctccagcattcattccttcatgctatttatcagtctggcagttgctgctgctgcaacaggcacctctttcttgtctcctccctgttgctagtggtaattctgttactgaggacctgtatgaagttctcctccctttgctaacctgctttataggctacaacagtcagcagcctccaagtcatgatcacaggtcaacagcaacttaagaggactttgcggtgggaaggggaagggctgtggttgtcctgactgaaggcccatccctgtgctgcccccaaccctgctctcaaatacacatcacggccctctgtggctgattccagagtcagtaatgacctctctagcctcagttccaatggaagtaaaacagacaggattgggatctcacaggtctctctattttaaaatgatagaaggtacctgcaaaagcttcactgtcttcccagtcttggatttgagtctctccagctctcccagttctgaaattgccaaatctcaagcaatactcagctgccactagagccaacaggggttctcctgggttaaaaaaatgatgacatccctacccatactccactcatagctaccagtaaaagacatatttttatttttcttcgagacagaatgtcactctgtctcccaggctagagtacagtggcacaatcatagctcactgtaccctcaacctcctgggctcaagcaatcctcctgtctcaaccacccaagtagctgagactacaggtgcaccatcatccccagctaatatttttcatttttttgtagagacaaggtcttcctatgttgcctaggctggtctcaaactcctgagctcaaaggatcctccgaccaaggcctcccaaagtgctaggattacaggcatgagccaccacacccagcagaagacatgtttttaattgtaaggtgtttatgctttggataagtaaacctaaagtaaaagtttttcaaatatcttgaggacatttcaaaattatacacggttaaatagatgtggcttatgatgatgggcagtgggaattacctaataaaatatctctaccttagtaaagttggtagctatctagcaattataaaacttgggagatctctttgtcctgtgattcctgaacatggtgatgatagggagattttgtgaaatgggttttagttctttgtatagtttatagatcatgaaaatctgttgtcatatgaatcaggaaggataatgtagactacctgaggaaacacattgtttatcctcatttccacaagcactgtgaccccaaacacaaacccaaccaaacaaatacacaacacttgccttttcctgtgtcttcctaaccagtcgtttttcatttgtttctttcctaataaccggtgctggactgaggaaagaaaagtccactgcccctgctctaacactgtcattagtatccacaagaacaggacatcctctgcccctcttctcagtgctaccatggccattgtccctgtctcagagtccaatttttctgtttcataacctgagcctccactgtagtttctgccttcaagaactctggccacaaaccctaatatcaaacatcaaaaggtacattagaagggacttatactagtttctaaaattttgacatttagctaatatttccttccatataactgaatatatgtacatgtgaatcagaattatataatttcctctatgtaaccaaatatatgtatatggaaatcagaattatatagatactatattattagattttatattatttataattagatattatataattatatagatattaaaaattagattttctcacattcaattataaaaggtatatcttcaccacaatataattgtagcatcatttttagtggcccaaattctctttaaagtatatttcaaaaaaatgatttgcagctgatttttctgttatagaattacatcattccttctggtgacttgttgatgttgtctccattttggctgcatagaaatccaaagtattttcctgagcctgaattgttcaaacctgtaagttatctctttcagtatatattattctttcattttaatttctttttatttcagaagggtaaattcagaaattaattaggactatataattaagcagccatatttctctcgtaactaagaacaaagttgactacaaagtacagaacagatttgcaatatagatagtgcaacatttacaaatcagttagaaaagtttttgtagtaaacttctctaactttaaaatacattttacatgaaaccagaagggcatgttcaagtgaataagcctgtttttgatagaagacttatttcatgttcttcaggcaattgcttctgtcattggtttccaaggagtacaaaaaaatacaaataaagcaaattaaaaccgtgatctgctgtttcttagaactggaaagttacagggccgaacagaatgttaagaggtcatttagtctgttctctgcctttaggtaaaactgtcaaaaatggcatccagatgcattcattctgcatcccaagctttttctaacaggcagggatgtcagtgtcttactactaaatttattaccaagagcaattttatgacggagcctgagaccttattataaatattcttcctcttcttaggtcaattctgtggttgatttaccttatcatttacatttaccacttaacagaattttttaaaaacctttttatttataagttcatgttccagaaacacaattgtgtctaatattaataacagggtggaaaaaattaccaacaaccctgcaactttatatgcaaggattagctgtacaaggtcatttttagcctagagaaataaagttaagcttatttatataaggctgatttggaaaaaaaaatgttttcttcccacaggaacgttggaaaaaggcaaatttagagaagcactctttcttggactgcttcatggcatttggaagcgggaagttccagtgtcctgcaaggtcagtgagacagctgggccacatttatccagaaagtctgcagaaagatgatggctcagaggggaacaactttggcttaatctctttatatatatatttaaactatagggaaatccagaagaacacattttgtctggtttatctgtggtcctgtgcagtgtctctctgggaatatctaaagtggcttctgatagaagaccttatgagaagagaacattacacttgccagatgccacatcaaagcagcgtttatggttcaaattgtcagctttcacacaaacataattggaagtggtttgagtgctaccttctttaaaaacaaagatagaattatatttctttcactatgacattgtcatggatatttgctagggttctagaaaatctttggcttggagcatagcaggcacttactaggtggtttttgtctatggtgttagtttggcttgtgaaaactttcttttgataccttttatagttaaattaatctggcacccagccctcctcctcagtgtgataccctgttctaatgcaagtgtccattgtttaatgaaagttattgttatctttatttgttcaagcagaaaaggtttttgaacatctcatctgtgccaggccctcttctaagcttcagagagcactgaggaagaccaacatggtccctgacttcatagaatttacaatctacattaaatatgtcacatttcttcattggggatgattctgtaggggaaatgtcagtacctgtttatgacaaaatctcactcaataaatgtagaaatccattaaatttttatatttaaaaaattgtagtttcttgaagtcagtcctcttcattatttgaacaataatgccagtccatatttgcagttattaattgctccgcagtatccattccatccttccgttcttcatgtgtttagagtattagtatgattttggtaatttacgcttcccctaaaatagtattaatcagtcatagccaatcatggaaattctatcctcattttaggcattattctagaaatctaagcctaagcaaatgggtgcctggtgttttgatgagctgcttgtcctgaggtaggaagttgagctaaactggccaaacagagtgaaaggagagacttcttcaggatgaggccccgttcatcctgtcccattggatatgaacaaggaagcatgcagcctcagatgttactagcagcaagttcaagaggaataagctgtatgatggtgcagtctgtagatggcagagcagaaatatagtaggagcctgaatccctggaatctcagtaatattattttgtcgctgaattcatcagatttgaggagcttgtctacttcctgttatgttagataataagtgtccttactttttaagtcacttttagttgagggttccattgtttggagctgaatacccaccatatactgacatacccaccataaaactccaaagctgaacattataattgagtatcagttactttagggacatcatataacacacaacaacattagcaacaaaaacccatcatgctcatcctgcctctcatattattttcactttagagaagcagttcttaagccaataacaaattttttgtttttgtcacataccaaatgtcaatgtcctaagaatagttcttctaaaaacaatagatgctacttttttcaggtttctttatatcactatatctagctatctgtctgtctatctatctatctatctatctatctatctatctatctataccaatagcaactaaataatttattgtaatcatccttgacctggagctagcagtattttaaaccaatgactgaaatgtcttgcaatgaagtgtgtagtatgggccaatggtcaaggattacctgttgactattgtttccaagaggcgctattactaccttccatgatgacatttgaggctaacagacatttttttgagtttgaaagtaattggtataataaagggaaccatgatgctgtaactcaatcaatagtatcttctttagacagaaactacgtatttttagagcacgctgagctcttactctgtgcaaggcagtgctctggctaccataggggctttgagcatgagtaagacatgtttcaacccacatgagaaacaacttagtaggggcaaagtggacattcaattaataaataactgcaaggatttctggtcgagagatgccaaagcgtcacactgagcttcaagagaaaggatatgtctggtcaagatgctctcagaagatttcctggggaaagtggcgggagaccttttagcttgagacaacagaatgagcaaagggttactaagcacagaggcatgtggcttaaggccttatggttttactgttactgggaccagattacagtggtgagaagtaaggctgaaaatgtacactggcccaattgaaaaggccccttaatacctgatgtatgagtttgtatgcagctcacatggcactaataaagaactaaaaggttttgggcagagtggattcatgtgaagcatgacttaggttatatggttatgctaatattctatgtgtgagacagggagtggtagaatctaccagatttggaagatgattagaagcgggggtcaggtgagaggaaggctttgaggtggactgtggctttaaatccaggtgtctggtagaggtggtggaaatacagaaatcaggaatgagagagagtctgggagcaagatctgaagttttcctttgaaagtagagtgtgtcaaaatatatatatcacttaaccaaaatctaccagttaaatataaatgttgaatacatgtgacctatttaagaaacctcatcaagtttagttttctactgtttctgttttaaaatgtccttaattttgtcttattacttattacttattttaaacagccaatgcatgaaatgttttgtttctaaagagaaataaaatagcaaattgttcaggaaagcaaatgacttcatttggacaatgtataccaaggtagattttttttgcactagaaatttaatcccacaaatccttagttgtaatccccagaaaattgcactcgttcttgatttgtgttccaggcgccaatttattttctcatgcaccaaatactcagtgagtcagagaaagttgcctgtaatatggctgatgatcaaagttcatcatgaacacacactcttatggccttgcagctgtcacttcttggagttcaagccactgaggtggtatgagaacccctctcacaagcaaacacagaaggttctgctgatttaagtcagtatgtactcggtgctgccatgggataacaaccaaaaatcagaatggaagaactgtggttcctcttcgtattcgtgggggttctgaaagtaggtttggagcaggatcccactgcgaggcacttccttgtagcacatggaagaaaatctttctagtaattctactactggagaagtctggtgatttatttctgttttgttttgtttcagaaaaacaaacaggaaagagcagcatgaaccaccagacttcttcagaaattgtagcttgcaaagtgaagagtctcattatagcagacagtctcacattaaactatacgatttaaatggaggaataagacggagggttttcagtgtggaggaaaacttctttgagtgagcacctctgagagttgatgatcttagggatgtgcttgctatacctgtcccctggaacacacaccaaaaccaacaagcttgattttccttggttctaattcctgcaagaggatgcctgatttgctgtgtcattgtgcaaattgatatggcttaaactccagtgtaaaacaacagccctgatctttggcaagattaatctgcttataaaggcatgcttggataagaagagagtgtaataagaggaaggctgcaatacttgagaagttaaaatgaagcatggattcctcaggaatagaaagtgtgatttttactttttgtgtatgtttgggtctttcatgtattctagggagtcctaggccacaaagtcatgggcttgtcttgagttcctaatgaaaatctcacatctattggaaaattaattaaaatcagaggtccatctaatagtaatttagtagtactgtttttaaccaaacatctcttgagcatctagtattaatacaattattcttttatttgataactatttactgagtgtgtgctatgtgtcaggttagggttctgggagttatcatggaaaacaaatcagatgaagcccctttcctttaggatgttatattcccacccaagtcaccttgttaaaaactgggaagagtcaaagactcataacatttctgaattggttataatgtggttggggaaatgagacatagccatatgaaaaaaaaaagccctacttaacagcttaagatggcacatgacaaatgccagaagactcagatatgtaacaactgccataagaatttggaggaagggggattagaaaaggcttttggactagattagaataatcagtaaacaacataaaagaaaggtcagcttcctaagatgcagcagtatcaaacttcaagggaagaaaaaaaattaagtgcttataggaatataatatacctatatgttagtgatagcaaggcgatgatatatttgggacttatgatgctctgagcacatctttttctatatatttatgttaaagataatgccattttaaaagctgtgccttatatagtaaagtatctgcacactcttgtatttgagaagtgttattagtagctttctcccttttatacttagaaatagctgattgcttttaaggagtgagcaaatttaaatccccataaatttagtgacaagttaaaaatccaatttattctgaggaatttgttccataaacaaatgcatcccctcaactctagttgttaaatataattaaaggaattgtatttacttgtataattgtttcctaacattttcacaagagtgtgcacatatcctggagagtatataaaagagggttaggaatgagggtgggaaaggtgaatgtggctaattctgagactctgagccaggttatcagaatccttattgatttttagccatgcttctctcttctcactgctttgcaaaggagcaatgagtcactcaaaggagcatagaaaccattggcaaaattgcagtcattattttcctggccatttcattttgatacttcattatgaagctaagacataagtatgtcaagaacagaagaacagaaacagcaattcaagagtggtctttttttctttttcaacttttattttgggttcaaggggggtacatgtgcaagtttgttgcatgggtagattgagtgtctcaggagtttgatatacaaatgatttgtcaaccaggtagtaagcacagtgcctcacccccctcccatgctccacccacaacaattccctctttgtgtccatgtgtatttaatgtttagctcccacttgtaagtgagaacatgctgtatttggttttctgttcctgtattaattcatttaggataatgatcttcagctgtatccatgttgctgcaaaggacaggatttcattctttttatagctgcacaggatttcatggtgttactatgtaccatactttctttttcttttctctgtctctctctttttttttttttttctgagacaggccctgttgcccaggctaaagtgcactggcgtgatcatagctcactgtagcttcaacctcctgtgctcaagcatcctcctgcctcagcctcctgagtcactgggcctacaggcacatgccatagtgcccagctaattttaaaaaaaattttagtagagacaaggtctcactatgtttcataggctagtcttgaactcctgagctcaagcaattctcccaccttggcctcctaaagtgctgagattacaggcatgagccactgcacctggccccacattattttaaatccagtccactgttagtgggcatctaggttgatttcatgtctttgctattgtgaatagtgttgcaatgaacctatgaatgaatgtgtatttttggtataatcatttatattcctttgggtataatgggattgctgggttgaatggtagttctaagttctttgagaaatctccgaactgctttttatagtgaccgaactattttacattctcatcagcaatgtataagcattcccttttctcctcaacctcaccaacgtctgttattttttgactttttaatgataaccgttctgaatgatgtgagacgttatctcattgtggttttcatttgcatttctctaacgattggtaatgttgaacagttttttatatacttgtttcccatgtgtatttctttttttgagaaatgtctgttcatattatttgcccattttttttaaatggggttgtgttttgcttgctgatttaagttccttacagattctggatattagacctttgtgagatgcatatgccaaatattttctcccattctgtagattgtctgtttactccgttgacagtttctcttactgtgcagaagcttttcagtttaattaggtcccacctgtctatttttgtttttattgcaatggcttttggagactttatcatgaaatccttggcaaggcctatgtccagaatggtagttccttgattttcttttacagccattaaagttttaggtcttacatttaagtcttcaattcatcttgagttgatttttgtatacagtgaaaggaaggggtccagtttcagtcttctgcatatggctagctagtttatcccagcaccatttattgaacagggtatcttttccccattgcttgtttttattgcttacttatccgatctgatgtttttaagtgtgcagctttattcctggattctctaatttgttccattggtccatatgtctgtttttgtaccagtatcatgctgtttgggttactgtggccttgtagtatagttttaagtcaggtaatgtgatgtgtctagctttgtccttttgcttaggattattttggtaatttgggctcttttttggttccatatggattttagaatagttttttccaattctgtggaaaatgactttggtagtttgataggaatagcattgaatatttaaattccttgtgcagtatgaccgttttaacaatattgattcttcctatctatgagcatggaacactttctccatttgtttgtgtcatatctgatttctttccttggtgttttttaattcttattttaaatatattttacctccctggttagctgtgttcctaggtattttatgtgggtggctgttgtgaatgggagtgcattcttgatttggctctcagcttgggtgttgttggtgtatagaaataccactgatttttacacattgattttgtattctgaaactttactgaagttatttatcagttttaggagatttgggacagacagtagggttttctaggtatagaatcatatcgtttgtgaagagagatagtttgatttattctcttcctatttggatgccttttatttctttctcttgcctgattactctggcttggacttctagtactaggttgaattggagtatgagagttgggcattcttgtcttctttcggttttcaaggggaagggttccgatttttgcccattcagcatgatgtcagttatgagtttattgtagatggctctcattattttgaggtatgttcctcctatgcctagtttgttgagggtttttaacatgaaggaatgtggaattttatcgaaggccttttctgcatctattgagatgatcatgtattttttgtttttagtttagtttatgagatgaatcacattgattgatttgtttatattgaaccaatcttgtatccaaggtaaataaagtaaacaaagtaagttttatttactctaaagtagactttattcctgggatacaaagtatggtggattagctttttggtatatggctgaaatcaatttgctagtattttgttgagaattgttgcatgtatgttattcagcaatattggcttgaagttttcttttttcattgtctctgccagattttggtatcagagtgatgctgtcctcatagaatgagttagggaggagtccttcctccttgacttttttgaataatttcagtaccaataatttcaagattggtaccagctcttctttatgtatctggtagaattcagctgtgcatccttctattccagggcttttttggttgttagattataatataataacgagttttgattccatttcagaactcattattggtctgttcaggatttcagtttcttcctggtaaaatcttcgaaagctgcatgtttccaggaacttattcatttattctaggtttccaagtttgtgtgcatagatgtgttcataatactctctgagggttttttaaattatttctgtgggattggttgtaatatcccctttgtcatttctgattgtgtttatttggatcttttctctttttttttctttattaatctatctagctggtggtctatgaatcttagttattctttcaaaaaacaaagttttggttttcttaatcttttgtatggatttttgcgtctcgatttttgcatctcagttttggtcaactccagttttggtcatttattttcttctgttagctttggggttggtttgtgcttggttttctagttcccataggtgatattagattgttaatttgagatctttctaacttcttgttgtaggcatttggtgctgtaaactttcctcttaccactgatttagctgtgtctcagagattctggtatattgtatatttgttttcattcatttccaagtatttgtttttatttctgccttaatttcattctttaaagtcattcaggagcagagcaattaatttctatctaattttatggttttgagagatgttcttggtattaatttctatttttattgcactgtggtctgagagtgtggttggtatggttttggttttttgaatttgttgagtattgcttttatgacccagcatgtggtcaatcttagagtatgtgccatgtgcatatgaggataatgtatattctgttgttgggtagagtattctgtagatgtctgtttggtccatttggtcaagtgttgaatttaggttctgaatatatttgttagattttctgctttgatgacttgtctgacactgtcagtgtgttgttaaagtctcccactattattgtgtggtatgtaagtatcaatataagcctctaagaatttttttttatgaatctgggtgcttcagcattagattcatgcatatttaggaaagttaactcttcttgttgaatttaaccctttatcattaggtaacacccttctttgtcctttttgagcattgttggtttaaagtctcttctgtttgaagtaagaataacaacccctactctttttttattttctgtttgcttgatagatctttctctatccccttaccttgagtctttgggtgtcattgcatgtgaaatgggcctcttgaagacagaatacagttgggtcttgtttctttatccagcttgccactctgtgccttttaaatgaggttcttagcctgtttatattcaaggttaatatcagtatgtgaagatttgatcttgtcaccgtgttgttcactggttcttaagtagacttgattgtgtagttgctttatagtgtcagtgggctatgtacttaagtgtgtttttgtggcggcagataatgatctttgatttctgtttggtagtcccttaaggacctcttgtaaggcaggtctagtggtaatgaattctgttcacattttcttgtctgaaaaggattttatttctcctttgcttatgaatcttagttttgttggctatgaagtccttggttagaatttctctgctttaaggatgctaaatatacacccccaatctctcatggcatgtaaggtttctgctgaaagtttcattgttagcctgatggcaattcctttatacatgatctgccccttctccattgctggctctaagattttttcttttgcattgactttggagaatcttatgagcatgtcaacctctctagtgaagttgaggaaatctttgtggacaatatcctgaaatatgttttccaagttgcttgttctctctccatctttttcaggaatgccaataagttgtaggtttggtttcttaacataatcccatatttctaaaagactttgttcatttttataaattattttttctttattgttgtctgcctgcgttgatttgaaggagctgtcttcaagccctgagattctttcctcaacttggtttactctgttatcagtgcttccagttgcattctgaaattcctgtggcgaatttctcatttccagaaattcagtttggttctttgttaaaatggctatcacatctttcaactcttggaccatttcactgttttccttggattgggtttcaaccttctcctatatcttgatgagcttccttgccatccagattctgaattctatatctgtcatttcagatatttcaggctggttgagaactatagctggggagctaatgtggtagtttggaggttaaaaaatgctctggctttcagagttgccagaattcttgcactggttccttctcatctgtgtgagctgatgttcttttaatcttttggatgggactttttgcttcttatattctttgatacctgatatggtttggatctacatccccacccaaatctcatattgaattggaatccttcgttttggaggcgggtcctggtgggaggtgattggataatggagatgttttccacgaatgatttagtaccatccctcttggctctgtcctcataatactgactgagttgttgtgagatctggttgtttaaaagtgtgtagcacatcccccatctctttcttgctcctgttcctgccacgtaagaagcttgctccccctttgccttccatcatgattggaagcttcctgaagttcggccatatccaccccatcagaatcagaagccactatgtttcctgaacagccagctgaaccatgagccaattaaaccttttttcttcataaattacagtctcaggtatttctttatatcaacgtgagaatggactaatacaatgcccttgaggatttggctgtggtataagttggatttagttgactggcttcatatctggatattttcagaggcccaaggctcagctcatcactcctggactgggtgttctaacccaggagggctgggagcaggcccacagctttgttctggggccccttgagattaaagcacgggctgtgctggagcgtttgaggtgtttccagtctgttggcaacaacacttgactggagcttctggcaaaagtgctctggcagggcagtggtgggcccctgtgtgcatgtattccagtgaggtggggacagggggatgctatgagtgagtgcacatcaatgtgggaaggctgcaggtgggtgcacactggcaagatgcaaaagtgctccaatgggtatgcagcatctgccagtgaaacaactcgtggtggccattgacaagcactttggctgggcaattgaggctgggctgcatgtggttgcagccaggcagggaccctgagagaggccagcagactggggtgtgctcaaatcagactgcatggacaagacaaccccactctctccaggtccagcagctaacaaaggctaaagtcacctaaaggagtatggtgagccttgtgggatgagtgtccatggccatgctccactatagacattcccatgtcaaaccctctgggctctttccaggctggaattctgtttccaccaactctccaggcaattatcactagcagctcaaatgtcatgggagttgtgggatctcccatagctaggatctcagaagcccctggtgaaggtgagccactccatgcctatttcacttaccctttctttaggaggctcttgggcccagaaatgagtcctggtgctcggcaaccccctgcagtgttcccaactttctctactttcagcctatggtctgtgtcctttttgtgtccactctccatgccttctttccaaagacttgttcagagtatgctggtctccttgatagtctagtctctttcagtgggagaatttcttcctggctgtatctagttggccatcttggctccctaaaaaaattaacagtgatttttgatacttagaccaaagtgattctaaaacaaactgtgtttatttctgagcaaaaatttcaggatgacacccttttcctttatttacaaaatagatctccagcccccatcctgtgcacagaatacctgggcaggatatgtatctatggagagaaagaaaggccacttagggttggatatcccttttttctcccatggactttctcatctcatcttaactgaatgactgctctttaataagttaggtatctctaatgttcaaaagaaatttcattcctaagaaaaggggactagaattaaaactgctattttacaatattgtccataggttattatctcctcatcacctaattccttctcctcgctttctaatagttttaattttcacttggatatccatggggattctgaagcactgattccactcccagctctgtagagatggaacacttccctaagacaatcagcacatgatgtccctgccccctctctcctttacgatagtgattagtttaggtattggcagatgttttaagcaggaaaattaactactagggtttctattgagacctctgggtcaaaaataatcattccttccaggatcttcataaagacacatttgaccccagaaactggtgcagctattttgagactagaaaagcagacaatattatgctgaagctgataacataaaacagagcagtagaaggaaactgactccatggcaacatcactgagctgctggaatgatctcttcctgaagccagcatgagccacaggtttttcatatacataaagcaatgcatttccttcaatatagaaatcagtctgatgtgtgttttctgttccttgcaaccaaaagtatcctcagtaatgtaattcccttaaaagcaagagttttctttcaagaattattgaactccatgaaatcttgtattagcacttcctaatcatgtaagttaattgctttctaaataacctgtgcttttttaaagggcttagcttcatttactttggttatatcagttaagactgtcaaatgcctgtctcagacactgatgacacccactgctatagaattatggccctgttctccaggtgccatagatgttctatacactcctgagcccaggactctggctctgatgttgctctgatcacctatgtgctgaatactgggaccaccactgccacaaaaatgcctgtgccctggaaccagtgctactgtggttaccagcatgcccttgtgacagactcagcaccaagaggatccctttggctaggactccccacagtgtcataggcggccccaggaaaaagaatagcaggaggaccacagcaatctttgacactaaggccctctaaaactttcatcactactgctgccttcaaatacatctacaaccttggccactgaggacccccacagtcctgtcaaatattgattacagctgatggaactgcacagactatgccaccacatcctgttcacttagcatagcactcacccacaaatgaaagtatttccccacaaatccagcccatcagtcttgaagagatgactgctacctcaaatgcacagatatcattgcaaggtcataaacacatacacaaaggaaaaatgacatcaccaaaggaccactataattttccaatgcgaaaccctaaagagttagagatctgtaagcttcctaaacaaggaattaaaaataattattttagagaagctcagcaagatacaagagaactcaataatatcaatcataacaacaatatatgaataaaactggaagtgaagcaaagagattgaaagatcaaaagaaagcaaacataaatcctggagctgaaaaatacagtgaatcaactgaaaaaatgcaatagggaacttcaacagcagactcaaccaagcagaagaaagaatctctgagattgaagataggtcttttgaaattatccagactaaggagaaaaaaattgaaaagagtaaagtaaacctatgggacttaagggacactaataatgaaaccaatgtatgcatcataaaagtctcagaaggaggattgagaaaggggaagaaaccttatttaaataaattatggctcaaattttcccgaaccctgagagagatatggacatttacacctgtgaaactcaaatgtctccaaacatgttcgacccaaagagaacttcaccatgacaccttataatcaaattgccaaaagtcaaagacaaagaaatttaaaagcagcaagagaaaagtgacttgtcacatacaagagaacctttataaaactattttggacttttcaggagaaacttcacaggccagaaaagaatgggatgatatattcaaactactgaaagaaaaaacattctgaaaaccaatgatatatctggcaaagctgtccttcaaaaatgaaggtgagataaagatatttccagacaaacagagctgaaggagttcatcactactatacctgccttataagaaatgctaaaggtacttcttcaagcttaaatgaaaggacacaaattaataacataaaaatgcatgaaagtataaaacccactggtcatggtaaatatatagtcaaaatcagaatattataatccaataatggtgttatataaatatgtttttaactcccgaaaaaaatattaaacacaaaagtattaaaaataactatagctacaatattttgttaagagatagataatataaaaagcagtaaattgtgacatcaaaaacatataatgcatgtgggggtaggagagaagtaaaatgtagagtttccataggcaaatgaagttaaattgagtgcacccttggataggtatgcagtacagtgtagtactggttttattaggttaaaatatattgctataagtatgttttctgtaagactcatagtgaccacaaagctaaaagctatagtagacacacaagagataaagagaaatgaattaaagtataccactacaaaaacgaatcatatcagaaaggaagatagcaagagaggaacaaaagaactaaggaactacaaaacagaaaatttttacaaaatggcaatagtgagttcttacctataattaattactttgcatgtaaatggattgaattatgtagtcaaaagtcacataataactgaattggtaaaaaaaaaaagcaaacaaaaacaatacccagctatatattgcctataaaatgctcccttgaggacacatataggctgaaagtgaaggggatggaaaaagatattccatgtaaatgtaaaccaaaagacagcagagttagctctgattagacaaactagacgttaattcagaaactgtaaaataagacaaagaaggtcattatataatgataaagggataaattcatcaagagggtaaaacaattgtaaatatatgtgtacccaacatcagagcacctgaatatacaaagcaaatattaacagaactgaagggataaataaatatcaatgcaataatagtaagggacttaaataccccactttcaacaatagagagatcatccaagcagaaaatcaataaggaaacatgggacttgaactacattttagaccaaatggacctaacagacatatacagaacatttcatccaacagcagcagcatatacattcttctcaagcacctatgtctagtgctatgacagtcttcaagataggtcatatagtagaccataaaaaatttaagaaagttgaaggcatatcaagtgccctttcttaccacagtgttatgaaactagaaatcaataacaggaggaaaactggaacattcacaaacatatggaaattaaacaacatactactgaatgacaatgggccaaagaagacataatactttgtttacattttgagacaagtaaaaatggaaacatatctgatatggtatggatgtgtgtcctctcaaaatctcatgttgaaatgtgatcttcagtattggaggtggccctattgggaggtgttttgatagtgaggggaaatcccccatgaatggcttggggcctttctatggcaatgaactactgcaatatctgattgttaaaaagagtttggaacctctcccatttctctcttgcattctctctccctgtgttgcatgctggctccccttcaccttcttccatgactgtaagcctcctgaggccctcaccagaagcagatactggcactatgcttcatgtacagcctgcagaaccatgagccaaataagcctcttttctttataaattccctagtctcaagtattccttcatagcaacacaaatgaacgaacacaacaacataccaaagcttacagaatgcatcaaacacagttctaagggggaagtatatagtgataaacacctacattaagaataaagaaagacctcaaataaacaatgtaaatttacacctcaaggaactagataaagaagaacaaatgaagcacaaagttggcagacatatggaaataaagctcaaagcagaaataaatgaaatagagactagaaaaacaatttaaaaagtcaacaaaaaggtttttcagttaaaaaattaagtcttgaaaaatgatatatcttctggtagactgatgaaaagagacagaagacaaataaatcagaagtgaaggaggacaacagataacacataggatcataagagattactatgtgcatttaaataaaaccagttagataacctagaaaaactagattaatttccagaaacataaaacctaccaagactgaattataaagaaatagaaaatcttaacagaccaacaagtaaggagattgaatcacaaattaaaagtctcctatcaaagaaaagcccatgaactgtttcccttctgaattttactgaacatttaaagaattaatacaaattcttttccaactcttagaaaaaattgaagagagaacacttccaaacccattttacaaagcattaccctgacacaaaagtcagacaaggaaactacaagaaaagaaaactacaggtccatattcctgatgaacataaatgcaaagcttctacaaaaaaaaatactagcacctgtattcaacagcaaattaaaaggatcatacaccatgatcaagtagtatttatcccttggatgcaagggtggtccaacctatgcaaatgaagaatgtcatataccacattaacaaaaggaaaagcaaaaattatatgattatatcaatggatgcagaaagagcatttgaaaaaatttatcatcttttcatgataaaaaactgtcaacaaatcgagtatagaaggaaagtacttcaacataataaaggccatatatgacaagcccacagctaacatcatactcaatggttaaagattagaaacttttctctatgaccaggaacaagacaaggatgccacttctgctacttgtatttgacatagtactggaagttgtagccagagcaattaggcaaaaaaagaaataaaagaaatccaaattggaaaggaagaagtaaaattatgactcttcacagatgatatgatcttatatgtacaatccactgcccccaaaacactgttagaactaataaataactcaacaaagtagcaggatacagtatgaacacacaaaaaatccattgcatttttatatactaactgaacaatctgacaaggaaactatgaaagcaatcccatttataatagcataaaaatgaataaaacaattaggaattagctaaaccaagaaggtgaaagagttatacactgaaaactataaaacattgctgatagaaattaaggacatagataaatagatacatatcccatgtttctggattggaagactaataatgttaaagatgccagtgctacccaaagaagtctgcagattcaatgtaatcgcaatgatgttattttttttttggcagaaatagaaaagcctattctgaaatttatataaaatttcaaggaccccaagtagccaaaacaatcttgaaagagaagaacaaaatggaggactctcattttctgattgcaaaacttactacaaagctgcagtaattaaaacagtgtgctgttgacataaagatagacatgtagaccaatacaatagaatagagagcccagaaatagaccctggaatatgtggtcaaatgatttttgaccaagatactaagaccattccatgggaaaggagcagtcttttcaatgaatggcgctgggacaactaaatatttacatgcaaaagaatgaagttggactcttataacctaataccatacaccaaaattaactcaaaataaaataaatacttaaaactataaaaatcttagaagaaaaacagagcacaagctttatgacattggatttggcattaatttttggatatgacaccaaaggcacaaacaacaaatgaaaaatagacaaaattggactttatgaaaatttaaaaattttgtgcatcaaaagacagtatcaacaaaacaaaaaggcaacacacagaatgggataaaatatttgcaaattacatatctgataagggtattagtttccattatgcatagagaacttctaaaactcaacaacaaaataacccaattcagaaatgagcaaagaacttaaatagacatttctccagagaacatacacaaatggacagtaagcacatgaaaagatgctcaacatcactaatcattagggaaatgcaaatcaaaactccattgaaataccaccttatacctgtgaaagttgattatacaaaatgaagtcatttatgtcatacccaactaaaatgagtcaagaagccatgagaaaaacactaaggttacatacacctgttttttttttaaaaaaaaatgtcttataagctcaatccagatctgcatggacctaaccataatttcaagactgcaagtcccacctggcaactgctgaaactcacctatcagagctcactagctcttgtaagatgctgccagcaccagtgaactttctctcaaaacaatttgtttaaccttcccttgccccagtaaaccttaaccatttctttgttctgtgagcataacagaggccaccctagtctgtgtgtgtgccctgaattgcagttctattccttatatattccaaacaaaacctcttgcttagagattcatctctatatatttttgagttggcatatccattagaatgactaccgtaaacaaagaaaataacaagtgttggtgaggatgtggagaaattggaacctttgtgcattattggtgggaatgtaaaatggaacagctgctatggaaaacggtatggcagttcttcaagcatttaaaaaaaattgccatatgatccagcaattccacttctggatatatatccaaaggaaacaaaatcagtatctcaaaagaagtatttgccctcctaggctcattgcagcattaatcacaatagccaaaatattaaaacaaccaaagtgttgattgataaatggataaaaaagttatatatatatatatggaatatttttcagccttacaaaaggaaatcttgccatttgcaacaacttgagtcaacctggaagacattatactaagtgaaatcagctacacacagaaagacaaatcctacataaagtcatctatatgtgtaatctaaaaatttgaactcattgaaacagtgagtagaatggtggttaccaggggttgggggattggagatatcaggcagagagtacaagctttcagttacaagattaataagttctggagacctaatgtacagtatggtcactataattaataataatgtattgtacaattgacagttgctaagagaacagatcttaaattttctcacccccccacttctcccaaacacacaaaagggtaaccacatgaggtgacggatatgttaattaggttgactgtggtaatcatttcacaatgtgtgtgtatgtgtatatatgggtacatgtatatatgtgtgcatatatgtatgtgtgtgtatatatatatatataatcatctcattttgtgctttaaatatatatataattcttatttatttatattttgaggtcaatcttatctcaatgagctataaataaaataagccataagatcatttctattttgcaagtacttaaacttaattaagtcagtactattcctttgccccttttccttaataagaagctgatatagttaggctttgtgtccccacccaaatctcattgtgaattgtaatctgtataatccccataatccccatgtgtcaagggagagaccaggtggatataattgaatcacaggagtggtttcccccatgctgttctcatgatagtgagtgagttctcacgagatctgatggtttttataaaggactattccccctttgctcacacttctccttcctgccgccttgtgaagaaggtgccttccttccccttcaccttctaccatgattgtaagtgtcctgaggcttccctagccatgctgaactatgagtcaattgagcctctttcctttatagattgtccagtcttgggcagtcctttatagcagtataaaaatggaccaatacagaatgtttaaaaagagatagccaaactattagctcatagctcatttgtatggaaattttatttctaggaggagtaaccataggatcaccattagaacaatcctggctgcagtcaggaaaacaatagctccagagcatgcactcctagtaacagccacttataatcttcctaatgaaacagaaaacagtatgtcaaatcgagaagggctgaggttctccagttcttcattcttgctgtcccatctgctcttgtgactgagcatcagtgagtttgctgtcagatgtgcatagaggccaataccatggcactggcttttgagaaaagaaaacttttatttcaagtcaactggcaaggatacaggaggaaatgctcaaatctgtctccccaagctggaggctggggtaggtttcataagcatagggtaatgatgtgtgatctgattggatcttaacaatgaggtgatgtcgggaagcatgatctgactggatcctgccatgggtgatgacagtgctctatctgattggatcctggatcctgcaatgtggtgtatgctgcttaattcagtccctgctccttggtccaagcacttaatccctctgtggttgcacagttggttatctgggcatgccctggttacatgaccttcatcctgggggtccatggcaaatgaaaagcaactcacaacattgttacataaacgtctacaccagattcgtttgatgtgtttacactttctcatctcctttttttattttatttatttcccattttcttcttttttttatgttttcttcttttccttctcattcagcttacccttatccctttcttctcttcccattttgttcttttttttctatatttaatataaaacatctaccttcccactctaccagattatgctttcaccagtattcccaatcaaaagtttggtaccccagacataatgttgcatgtataatggagatattctttataattttaatgttgtgtgctaaaattaaaaggtttggcaaactgcatcttctaacatatttttttttcatcattttccttgacaagttcctctagatcagtattctcaaaatgtggtccccagaccaccagtattaagattaccaggaaacttgtaataaatgcaagttcctgggccctgtcccagatctcccgactcagaaactttgggggtggggcccagcaatctgttttaacaagccctccagatgattctgatgcactaaaatttgagaatcacaggtgctagattattttgcctcctgctaccatattgattttattttcctaaaagatttctcagagggatgaggttgccatacttccgctttaacttgatagctgcgcttcaatgaatgatgcctatgacactatgtctgtatgctaccttctctgaattccggggcaagatcattctattttcataagctgcagctggtggcaactaggaatatacttcagacctcttgctcctggcaacagtgatagctttccagcacatgctggcattacctacaatgacttctaggaggaaaaaagagagaggtgttctctttaaaagtgacagaggtattcagtctcaaaatcaagacatctaaaattaaaatcatcaattttccccaatactagcattccttcagtactctctctccttctatcactgctctcttagacacctgggtttttggagttatcctttactcctccttccttctggccttctgtgtacattctccactcctttaaaactaggtctcctcagccaggtccagtggctcacacctgtaatcccagcattttgggaggttgagatgggcggatcacttgaggttaggagtttgcgaccagcctgaccaatatggtgaaacctcgtctctactaaaaatacaaaaaaattacttgggtgtaatggtgggtgcctataatcccagctacttgggaggctgaggcaggagagaatagcttgaacccctgaggcagagattgcagtgagccgagatcacaccactgcacttcagcctgggcaacagagggagactctgtcttaaaataaaataaaataaaataaaatagaataaaatagaataaaatagaataaaatagaataaaatagaatagaataaaatagaataaaatagaataaaataaaaaaaatacaaaataaaaaacaaactaggtctccttcacctcagcatcagatgactattatcattgcctaacccttctccctgactgtattatctcttatttcaatccatcttactcactacatacagatgagttttccttaaataataatctgattgtcactctctcattgagattctggtgccactacctgctgaccaaactcattagcctagaactccgggccctccataatctgacaccagccttacctttctaaacatctgagaatgtcctccccagagcgtctacttgctgttccttactacagagtgtccactcctccccttgcccatgttttctgctggctctggaatgctctcactcaacaagtctacttatttaaaggttcttttgccctcatggtgtagctcaagtttcacctccatataaagtcagtgttaatcatgccaggttgtagagtgctctccagactccaaattttgtttcccttgtttctaccttcatctatatattattgtgacctcttccatctctccatgtgcattgctagcattgtgttgtgtcggtcttggtgttctcaatgcctgtgtagcattccttaatgaagtatttaaatacaaatgcagaaaatacgcaagtaccaagtatttaaaaaattttcaacatgtttctattttaatgagctttattagtagatgtgtaatgttgttcttgtaagtgtaaaagataaatctgtcataaacaatgtgcctcattattttcactgttttgacattagaagtattaagaaaacattacttacctgaacatagcttagcttgcttctgaagagcttctgtaaaaatacgaatttacaaggcccgttttctttgacataaaaagctttctatgtcctaggtatgtatatgtcagtttctggtattttacacattgaacaaaattcagtgacatagtaaaggctttaaaaaacagtatttttttttttttttgccactgtaaagaaaaaaactttagtggtgaattgaggtaattctattagaatatccaaatatttggatttgaagaaaattcaacttttcctttaagatatcaaaatcttaatgtaatataaatatcaatactatcttaatagctagttattaatttaataactaaactaacactaaaaagtagaaaagaaaaatattaagccacacaaattcaaaatgtacattatgaattggccaaaagcctgagtatttatctttaagggaaatgtagttttatcatttttaagaacatcacatagactaaaattaattagggaaattctgccttatagattgtaacagaaaattgttttaatacattggtaaatattatttctaatctttttttgaaattttttattattcattctgttcctcattctactttctctacagattttttctaacatatttttcagcttcaaacttttaaaaatttatttatttatttgtttattttatttattttttaatggagaggaggtttcaccatgttgtccagactggtctccaactcctgagctcaagtgatccacctgcttcagcctcccaaagcactgggattataggcatgagccaccatgcctggcctttaaaatgtatttactttaaatgacaagtaaaaattatgatgtactatatgatgctttgaatatgtacatgttgtaaaatggccaagttaagctgtttaagataggcattatgtcacatacttttttttttgaggtgagaacacttaaaatctactctcttagtctggacacagtggctcatgcctataatcccagcactttgggaggccaaggtgggtggatcacctgaggtcaggagttcaagaccagcctggccaacatggtgaaacaccatctgtactaaaaatacaaaagttagccagttgtggtggcaggtgcctgtaatcccagctactcaggaggctgagggaggagaatcacttgaacccaggaggcggaggttgcagtgagccaagatcgtaccactgcactccagcttgggcaacagagtgagactgtctcaaaaaacaaacaaacaaacaaactactctcttagcaactttcatattgttattaactgtagccaccatgatatacaatcagtatattgaacttattcctcctgtctaactgaaatgtgtcccttgaataacatttccccaactcccctaaccccagcctttggtaaccactatttctaattatttctaatcaaaatatgcacggtatttctaaaatgtttaatattgtgctcttaacttatgaacgttgatcttgtttgcatttctcatttgcttagcaaattattttagggatccaggaagtatttattgaatacctcctatatgttgtaataaagcttcgagaaaccccgtttccacacctagatataattgttcaatcagcacaatctattgaggggcactttcgttattaaagtcccaacactgtcacatggcacattcaaaccccccttgaaccggctcctcctgcactgtccagcttcatctctcatcacctcaccttctgcatggagtcaacaacttgcaggtccctagatactatttttcttctaagtctgtcccttggaatggattttctctctgccaagtgtaccttcttcacttgcgcagctcccatactgcaccctcaaattgttgactgtctttttcgcttgttgcagtgcctctagggacttgagaggaagagtggcaggggccttttatcccaggatgctgaactcagagaagttggaaatcactgcactggtcaatagcaagcttatattagagaagggcttaaaacaatgataaggagataggatttatttgaataaagcaaggaacctacaaaactgttctataattcacaaatacaaaattagccagcattttttctagagctgccaagtaaatattgaatgctaggaagtcactacttcctaatattctaccaaacatgaaatgccaacttagttatttgaaaaagtgagctcatttaatttacttgtaggaagagagctaagtactgaaaagaagtggttactttatgtaagtgggagcttgatgtctaatttcacatattggtgctttttgccttctttccatttgataggctggctcacaccttccatgaaacactttatttatggggttgcagacacaccaccttcctttattattctaccttttggcctgcttctttcccatctcctttgctcatcttcctcaatttcctgacttccaaattttggattaccccagggctccttccgtagattttttttaatcaagtttatttaactcactctgtaagtgatctcatactgccccatggctttaaataattgtctaaataatgatgactcttatatttataaatcttctatctctgaccctgaatgaatccttcctaatcatggggctcattacttagcttccattcaacatcttctttggatatctaaaaggcactggtctatagagagctgtacttaagtccaaaactgagctccagattacaattccctcaacctcctcttccttcaatcttccccatttctgaggtaaacaacagctgtatccttgcatttcctcaagtcgaaaactttggagtcatccttgattcctttatattcttcacatgtataatgtaaaccatcagtccatcctacagaatatatccagactctaactatggcttacaactatttctaccatcctgttctaagtcaccactttctattgtctggaaaattgtagtggctttcttatcactcttttcgcttccattcatctcaccctatattttattctcagtgtagcaactgaaggatcctttcagagcttgtcatacttctcaaaactgtccagtagcttcccatctcaatactagccttctcatcatttctcattcttctaactctggatttttgcaccttttatggctcaccctcttattttattctagggtctgataaaatgtcacctcatcagagagaccttccttctctaaaatattttagcccacacctccatcaactttctttcctgttcttatttattattctagaatgcattctactagaatttaagctttatgagaacatgaatattgtttttgtttactggggtgacttcagtgcttagaagtatataaagcacataaggacacaataaacatcgaatgaatgaatgaatgaatgggggtcttattttattgttagaactcttagtgtataatctaagtgtcgctttactgttcccataaaagtcactttttttcaaaggagaagagagaaaagacaggtgtgttacattcacaacctagttatccatttaaatttgacccttggtgttctgcagtctttgctgagctcccagctcctccacgtgctaccacccacagcactgaaaatgagatgctgcttttttcagatcatctccagcagagggatgaaagtgaggctactcatgcttcctgccattatatcacctctttactttccactgcactatcacacaagatagtgtaaatgtgtcagttcttatggaatttttagggtaagcaaattacagcataggtagggaaatattaaaattgtacataaaatgtttattttcctatagtcctagagaaaagtacttaaattgagcacttcacagaaggttcctttttcctaaccttatatgcctttacatggcaatgtgtttgtctcttttgcaaaatagtcacagagcagctgccctccttttagtctcatccctcctctgagaagctgatttttctccaagatatatcaccacccttcctccctaggtcatttctcagtctgagtatagagtaacatgaggggctttagcaggactgtccatggttgtccttgggacttgagttcctcaaaactgttcattgcgggcacaggcacactatgttccttaagacctgcccaaatattaattcttttaaattttctactgaatgaatggttgattgtcatttcaacatcagtctctttctctcttttacacaattcccaaagaccatcaccttttttttttttttttttttgagatggagtcttgctctgtcaccaggttggagcgcagtggcgcgatctcggctcactgcaccccctgcttcccaggttcaagcaattctcctgcctcagcctcctgagtagctgggattacaggtgcgtgccaccacgcccagctaatttttctatttttagtagagacggggtttcaccatgttggtcaggctggtctcaatctcatgacctagtaatccacccacctcggcctcccaaagtgctgggattataggcatgagccaccgtgcccggccgacaatcaccttttttcctaatgcatgctataatctaaatccttacggagaaaattaaatatttacccccagattacttaggctgatctctctcatggtaaaattagtgcattattagaaagaacagtgatatagtttgcctctgtgtccccacccaaatctcatgttgaattataatctccacatttggaggaggaggggcctggtaggaggtgattgaatcatgggggtgaacttcccccttgatgttcgtgatagtgaatgagttctcacgagatatgatggtgtaaaagtgtgtggcacttccccctttgctcgctttctctctccggccaccatgtgaagaaggagcttgcttccccttcaccttctgccatgattgcaagtttcctgaggcttcccagtcatgcttcctgttaagcctgcagaactgtgagtcaattaaacctctttttttttcataaattcccaagtcttagataagttcttttcacagtgtgagaacagatgaatacaaacagtattagctccctttctttataccttgactgcttattatttttctttctattctttaaacacattgtaagtcctttggcttgcattgtttccagtgaaaagtctatgttaacttttaatgtttgttgttctttatggtgtctttgttttctggctacttaatttttttaatccctgggtttatttattaattgcaatttgattatgattcacattagcatgattttctttttctttttttctttttttttttttttttttttgagatggagtcttgctgtctcccaggctggaatgcagtggtgcgatctcagctcattgcaaactctgcctccggagttcaagcaattctctgcctcagcctccgcagtagctgggattacaggcacccaccaccacacctggctaatttttgtatttttagtagagatgggatttcaccatcttggccaggctggtcttgaactcctgacttcatgatctgccctcctcggcctcccaaaatactgggattacaagtgtgagccactgtgccttgcttttttttttttttaaagacagagttctgctctgttgcccaggctggagtgtagtggcacaatcttggctccgtgcaacctcctcctccctggttcaagctattctcttgcctcagcctcccaagtagctgggattacaggcacacaccaccgtgcccagctaatatttttgtatttttattagagacgaggtttggctatgttggccaagctggtctcaaactcctggcctcaggtcatctacctgcctcagccttccaaagtgctgagattacaggcatgaaccactgcacccagtcggcatgattttctttatatttcttctgcttgggggtcttgatctgtaaattatagttttcaaaaaaatttgaaaatgtttcactattacttctcaaaatattttccctgcttggtcatctatatctctaataacatgtatgttagacttcgttattttataagttaataacctatttatttttataggcttttattctgtgtacttcattttagatatttttctttgttatgttaattaaattccattatcttttctttggcagcattttaccatctgttaatcccatccagtttatttttcatttaagatattgtatttttcattgctagaagcacaattatttttaaaatatcttatctttctctcctcatcatgctgttcttttctacctttatgaacctgtggagtataataactatttttaatatctgtcatttctgggcctatattttttcaatgggctttctcttggattgaggtcatttttctgttttgttttttctaagcctgttaacttttgaatagatggcaagacgtaaatgttaagtgccatggatactgggttgtgttgtattcttttagtttagacctcattatgacatgcagttagttgcttagaaaaacaactttgcaaaacttgtttttaagcttcagtaaggtaaatccagagcgccatttaatgtaaaataatctaatcccactactaaggcaatacccatttaagagctctagctaatggtccatgtgctgtacaatggtgagactttttcttgtgtgaacacagcctccatgtcttgtgtgagctcttggccttattcagcttcttgtgctttgatttcccttttgtggttctttttccgtctcagtagttttctctcacacatgcagagatcagtactctgccaaatactcaagtagactcctatctagatccctggaatactcttgtgcgctctctttctgtgaaactccttcttttctgatactcttctctacaaattttagtctctttagcttgcctgaacttggatctctgtctgctgaattaataatactctcagacctgtgagttttttctgtccttgcactgtggcctgaagactgccagaagcaggaaaccgaagcaatcatgggtttcgtctcattctttacttcctctggagatctttgtcctacactggagtttgccccgtttttgagttatttaaggcaggaagataacaccaacttttgttactttatcatggccaggaatggaaattccaatttgtgaaaagtttgacaaaaccttagttgtgagacattctgaacctttatgtgagttagcaaagttgttttttcttagaaacattgctgactttgatccaaatcagtaaatattagccatgtcctatttcatagacatggatacccttttagaataaattatctttagcatttgcaagtaagtagggttaaatttgcatcataaatattactgaataattgatgtgatattcagatggattatagccacacctggagtgctccagatttcatttgaaataaaatacagtcaagatgtttcaagaacagtagtgcagaaaaatctaattatttgatatgaatatgagatcattgatatgtatacattcactcattcaatcaacaaacattgatgatttaaagataagacatagttcctgctttttgtgaaggctgtagtctataagggaagacagacatgcaaattctagctgtaatatagtaagatatagtaggattgtaggataaaggcattagttaagggatatgtaaagtgccacagaaatacagagacaggtggaaagggcaggaaattgaatcttctctatggaaggcatcactttccatcactattcatttattcagttaacattattaggtactaatagtgtgctgtgcactgtgctaaggcctcataatacaaatcctcctctgggagagccctggctaacaagcaatcacaatgtggtgcagtagcagctgtggctaagatgtgaccagggaaccatgtggtggagaggaagggcactacagcctggaggacagttatcaggaaatgcttccagaggagattgagcctcagaaagggaaaggcttgtggcacagagcatcatcattcagagaatgtcaagtaatataacgtggctagagccacatggtgtcaagggggagctctgggggagaggagactgcagagataggtaaggggcagatcttcaagggctggctgtattctgctgtggtgtttgaaagattgcgtgtgtgtgtgtgtgtgtgtgtgtctgtgtctgcgtgtgtgtgtaatgaggagatagtgaagatatgtgttttagaaagtttactccagtggtagggtaaaggacagagtagagggaagtgaaactggaagccatgtggaaggtaaattgattcagtaatccaggaaataaatgatgaagaactacactgagggagtcatggagggactggagataaggggttaaggaggagaattaagagctatttaggagaaccataaaaaaaggacttggtgcctaattggatatggagggtgatggagaggatttagtctatgacaatgttctgtcccgttggactaattgtattcattaagggctatgcttcctaaaaggtttccctatcctgcagagagttcaaaacaacccaatgggacacagggaaaaataacagaattctatttatacttttttcagttttttagtttctatttgtatgtgtcttagaaaatagtctctaaacagtgtagtatatgtgcataatttaaaataaatgagtatcaatatattgtagggcatgctgaaatattttattatcaagagtgtgtgatcaaaatgcttgggcactcttagacaaggagtgcaaaaggaaaagtggatttagaggtcctggggaatttgatgttcctgtagaacattcaggcagtaatttccagtgggcaacaggatctagacttaggtaggactgtccaatagagccttctgtgatcatggaaatatcttaaatatacactgtccagtatagtagcctgtaaccacatgcagcttttgagcacttgaaatatggccagtgcaaccgaggaactgaaattttccattttgcttaatcttaaacttatttattaaatgtatttaaattgaaatagccacttgtatctaatggctatgatactggaaagcacagtcctaaagagagagacttgggactgtcatttattgagagctcccactggctcagcactttatatacattttaaagcaatttaatcatcccgctaccctatggagtaggtggtattaagaaagagttaagttcttactctgtcctttaaataggaaaagagtatattgtaaagaagagcatgtttactctgaaatatgtatgctttctagatattctctgttggcagatatttatacatctttcacaatcaagtaacaattttattcgtttcttccaggtggtttgctctgttagaggttcagatgtgtattattttaatactttataaatatgactgtagtcttctggacccattacccaaacaggtaagtgttttcagaattttgagtatcatgactacttataaatatgacataaccacccccacttcccccaattttgattactagagatgagctgacatttcctcacttaggcctgatcttaacaggtgccttagattgaaccagactgagaagatactcggtctccttaattcaggatctaatctatgtacccaattactacctgactgggacttaatagcagtctttccaccacttccagtgttaggagctcttcattgcacttaccaatttgaacacttttctctgagttaaataaacatggcgcccactttgcccttatttttctagaaaggaatgtctgtgatccaaatgtgaactattgtttttaatgcaagtcataacccttggtccatctgaaaaggaacagcatggaaaaaaactaacctagcagtaaaaacagtgaacagaaatgaaaaggtcatggttttattcctacctcaaactattgaatattcagtcatttaagttttctgtagatctattctcatagatcagtggctctcgaattggtgtgagcatcagcatcactagtagggcttgttagaacagactgtataaaggtgctatttatcgctagaatttctgatccagtaggaacaggggaggggctacagaattgcatttctttcctttttttttttttttttttttggttggggggttgttttttatttgtttttgagacagagtctccaaacactgtgagctgagttcagtggcacaatctcagctcactgcagcctccgcctcctgggttcaagtggttctcatgcctcagcctccctggtaactgggcctgcaggcgcacaccaccatgcctggctaattttttgtatttttagtagagatgttgttttgccatgttggccacgctggtctcccaaagtgctgggattacaggcatgagccacagcacctggcccagaatttgcatttctaacaagctccaggtgatgccgctgctgctgctgcttgtctgggtgccacactttgaggacctctgttgtaagaaataaaaggaagttcaatttaaatccaaatgtttggaaatcatgtgaaaactttgggtaaagggtgctatttaaattggggctgaagctcagaaattaaggattgcaatctcagagctattcacatagcgttttgtgctttgatttactcttgatataataaggctaatgtatggagagataaataaaactcttaggtgacatttcaataggaattatgtaagtgcgtaagtgacacagaaagtattttattactcacaaatatgcacatttcagcatttcacttgatttcttttgcacttctattttgaggacgagtaacttatcggtgatgaagagctctcagaatcttacaatgaaagggaactcaaaacaactctcacaaagggtctcagctacctgctatattgttgacaaaatgaacatcagggtcaggctttatggacatcaaatactagttcctgatccactgagttgaatgtcacaattttgctcaaggttaaactcaacatccaaagattttctcaccagcaagaggacaccagaatgccttttcaggtgaaaaggatggcattggttaaaaccatggagattagtaattttgaccaattccttaagacaggatttttcctagcattttctcctaagaattctattatctgtatttaatttcttatactattttatatatgtcctatttatgttttgacaccactgagaacactttttaaagaaatgttctctcaggttataaaaagtacaagtctgagtgaattcccatgatctcaaagagcattttatctcacaattcttattctagaatgagaaacatcaattaactttatttaactattgaacttgtttcaataaattataaaatcaggtgaccagaaagtacaggaaatggccgtcaaatcaccaggctcttctaggagaaggcagggatgggttgtcaaagcatgtcctgaacactctgttgtcaggtgcaggggaaatcagtggacttggaaaccaactcccctgaaggaatttacttaacatagtagaaaaaatcaaatgctagaatctccaattttaattttgcaacagcccaatgttttattttacctcaaaaggccttaaataatgtagtgttaattctcttccattatgaatcaaacaaaaaggaaatactacaaagtttaaggatctgtggtcaggcagcagtgtcctgatgctagcagtgagggctgttccattttgagcattaaggaaaagtcaactttaattctcttgcaaaagcaagcacatttttgctaacacaatgggtttttatttctttgtatggttgtttttttttttttttcattttacttttggggttcatagaaccttaggaaatctcacaaaatgcatggatcccctttgtagaaaagtgcatacttcttcatacacacaaagttgtggatgcaatttcagtgggttcgtggaaccctgcaacttattctttcaactctccaaagaatctccttgctaaagagcccattttgtgccctatttcattcaaacttgaaaatagactgattctaaattggatccacctcatctttcctcactcctcatcttccctcagccctcatggttgacagaaaatgttccttttcttttttaatcccctaaacctcaaatatctctttgtattatttacaatacgctgacctccccttgaccctacacagtttcatatcttatttctaactcgggcgaaaaaagtcagaatatttggagcctacaaagtatctttatgggggcgatggagtgagactcctctcaaaaaaaatatatctttatggaaagtcacgatcatgaatacgctataagtggctcacatcaccaactccacatcattctttaaacacctgtaacctgcagtatggagatctcactcagcgattctaaatgaagtgtcacagtttttgagccagaattgtagaaagagccttatttgtggtaacctctttagccagataaagcgaagggtggcaggcctatagccttcaggtgtgtacaactaaagagattgttattagaataaggaattgtattctttttcttctgcctgaatggaaggctaaagttgatgttggatattgtgaagttcattgatgcaaacatttcccaacttgaaaaacctaaattttgtactttttagagaagattacaatggaataaaccttaggtctgaaactgtggacttatgtctcttaatttctatttcttctgcatttctgtttttagagttatctccatttggtgggtgtcccccagccggaagggcaatgccgaattgaatataaacaaagaatatgacatctgttgggcctcacaaggaccagggccttctggaggagtggcactaccccacctggcagcacctagacctgagctctacaaaaacacactgcttcactttgttttaggacttagttcaagaacacattcaaatggtgcatgtgtttggtatcttcaacagtagaccaagaatctaacatcactctcagtaatatagagaccggaatacatggtttataggaaatgatcaaatgatccaaaaaaactccacattttttaagaagttggaatttgatttcatgcataactgtattaaaacattaaatagaaataatgtcatttgaatgaaaatcttatcacattaaattcactgtgaaggcagcatacttaaatttttattttgaaaagtctaaaaggcttagatttttaaaatttaataattatttctacaaattttctatttttcttgaggtgattctcaactagcaattggaactcctaggctctattaacataattctttattgtaaacgtatctaatgctaaaagtaataaaatggtagttttctgagacctgtga

SEQ ID NO: 576 - DNA, 36701 bp, Homo sapiens
cccgtgaggaggaaaaggtgtgtccgctgccacccagtgtgagcgggtgacaccacccggttaggaaatcccagctcccaagagggtataaatccctgctttactgctgagctcctgctggaggtgaaagtctggcctggcagccttccccaggtgagcagcaacaaggtgagagaatgcagagctgcaggtaagaggctttggagagagagagagaaagagagagagggagagagagagagaaagagagagagagagagagagagggaggcagagagagagggaaaggcaaagagaggcagagagagaggcaggggggaaggcagagagaagagagagagatggagagacaggcagagagacagaaagaggcagagaaacagagacagaaagaggcagagagacaggcagaggcagagagacagagagagacagaggcagagagacagagacagagagagacagagaaagacagagacagagagaggcagggagacagagagagacagagaaagacagagacagaggcagagagacagagacagagagacaaagaaagacagagacagagagaggcagagagacacagagacacagagagaggtagagagacggagacagacagagagacagagagaggcagagagacagagatggagagagacagagagaggcagagagacagagatggagagagacagagagaggcagagagacagagatggagagagacagagaggcagagaaacagacagagatagagggagacagagagaggcagagagacagagagaggcagagagacagagatggggagagacagagaaaggcagacagagacagagaccaagacagagggagagacatagagacagagagagaaagacagagagaaacacagagacagagagagagagacggagacagaagagagaaatctgggagtcgggacacctgagtccatttctggtggaggctcaggcgactctccggatttctccagacctcaggaacctgatccgggtgaccttccttgcccatgaccttcttcacctgtgtgaaggtggctggaagcattacttgatatttctgggcctcagtttttctatctgtcaaaagaggggctggatcagggggtttctaaggaccttccatgattctaggccacaagtaaaatcgcagtggaatctaacacaagatagcggaccactgagacccgtttctaccgcatgaggctgcacgtgggatgtgcactgaatggagggctttcttccttagaagcctcatgagattttctggtgtgaaaagcttgatattctaaagtcactgtggattctctaatgcctggctctcgggtggttttctgggagaggtagtagagtgtggttagggctgcggtgtgtccccagaggcgaactggcctgggttctgagtccagcttgcctgggatgagctgcgtgacagctcacctgctcagggtctccatttccacctgcaaatagtaaggtcaagggtgatgaggagtacagtcgatgaatccaagtagtatcaagcactcaggacttaaggtcaccctcacacaggggaagaaggtcatgagtgaggaaggtggcccagatcagacacctgagttctggagaaatcaggaaagttgcctgaggctccaacagaaacagactcaggtgtcctgactcccagatctctctgtctgtctttgtttctctctgtctgcctgtttctctctctctctctgtctctgtttctctctttctgtctctacttctctctatgtctctgtttctccctatctctgttcctctctctgtctctcttaaatcatggcacacagtttgctcttgctgtttgaagctccttctctttaattgcattcccttttgggggcctttgctcttcttagagcccttcaggactcctctacccccacccacaactctgctgtaagatctttgtcaagaccctacattgccctgagttctctcttgtgtgagcagaggcagccaaatgtccagaccttcctggaacctcccagcgccgcatggctgcagtgggagctgccggccccctttctgcactccatcccacctcctgcacactcacctcttccatgcccatttcatcagctctgccctcccaaggccagtgggcttcccgcccagctgatcatttggtattaccacatgcacagacacgggagagtgcctttcttctaacctcatttagaagtttgtccatttggattgtattttggtacttggttaccctaaaaggcaagaaggaagctcggctgaatgtttcagggcagctatcctctctcccggggtcttcagttggcctgggagcctcctacccggccctgctagtaggggttcccttctacatccccactcccaccccgacctccaaagcctgtttgacaattagagctgagggatccagaacatccacggaccccgagcccccctcccctccccctggagagcagagttggcctctagcagcaacaggactgaagcagagcagactcgggttgctttttcatgttttcattacggctttccataggggagacactcgatcatgacagtgtctttgcccagtggttctcaaacttgagcccgcatcagaatcactggtgggcttatgaaaatgcagagggctgaatgtctgattcagtaagtcctggttggcgacctgagaatctgcatttctaataagtgtccaggtgatgctgacaccagtgctaggggaccacactttgagaaccctttccttaggagacgtgtccagggccaagcctgtgggggagctatctcaggacaagggccttttgagatggtgccttcacatctcctgagggtcttgtgaatatttggctgaaggccttgtgaatatgtggctgattctgattctcttggtctgaatttttcataaatggtgtttgtgctgccggtccatggaccacactttgagtagaaaggatttagaaagtctgggaagaggtcttcttatttgggggcaaggaagaagttagtgtaaagttttggatggatcctaaattttctagagctaatattcatgagaatgttttcttaaatgtctgtggtaggcagaattctaagatgactctggctgatccatgcccttgtataattccctccttgtgggatgtgtgaatagatggaacatcactaccatgattaagttactttatgtgacaagggtgaaggaattctgtggaagtaatttaggttctcaatcagttgacttgaagttaataaaaaaggtcacatgctgggtgggcctgacatagtcaggtgagctatttaaaagattacatgtgctgggtgggcctgacataaccaggtgagctgtttaaaagaggatcaggaggtcagtgtcaagtggtcagagacttaaagcagcagcagatgttgttttttttccattggccttgaagaaacaaactgccctggtgtagagaggacctcagggcaggaaacatgggtggcatgtaggagccgagagtggccttatccaggaagaaattgggggctcagtcctgcagtcataatagccctgtgggcttggaacaggaacctgtgctccaggaaggagcacagcccaaacgataccttgatttcagtctggtgggaccctgagcagagacatctcacctacagcaatgtgagctaaccaatgcggttgtttttaagtggctgagtctgtgctggtgtgttacacggcaatagaaaatgaatacaaggtcctgatacttcactttgattgtggtgcctgccctccaaggtgtactgtggcaatgacctcagtagcttcatacaacatgagctgatttcttgctcatgctacagcatcgtcatgggttaactgcgttggactatgacgactcatcagagccactcggggacccaggtcattgtcaaaacagaatttacggagaccagcagtgggacgcccattgttttgacacaagtgccggagggtggagattattcctatttatcagaagcagaagcaggcatagcaggagcaagtgagtggattgatggatgcaggaggacctcagcctgctgcccagatggcttgactgtgccgtgctggcagcatggatgaacaagggctcagcctgcaccatgcaggagagagctggcaagagagcaccagctgtgaaatgcacaggcctggaatcggcacttgtttttctcagtcacgtgccccgcccgacttcaagggttcagagaagtgaatattggtgaacatgagtgtacccaccatgtagggttacccagttagctcatttggggtgggagggagggacgcaggatttcagctcaccaagcttcacagagctgctcccgccaccaaggagcgagctggccaggcatctgacagctgagaggagctggaggggctaagaatgcaaatggaacacttgcccacagacccagggcaagccagaggtttcctctggggctttttgggtctggtctgtggaaacccagcaaatctgggctatcttcaagttgaagatcaggttttcttttgctgagggtgagagattttcccacacagtagagataaaaatccctgggtgttttcagtgttttttttttttttttttttgggggggagaatggctgacttcttgttacttggacaccctggacacagggcttgggacaattgccacccttggtgcccctcagaggacaaggtgggcacattttccagagagtggaagatgatctttcaaagcatacaaagaaaatcccatctgttttgacatcttaaaaactttggaagaaaatatttccaaaacatacatatgtatatatagtagtgagtatatatatatgtgtatatatatactgattatatgtattatatactcagacccagtatatacacatatataatatatactgctataatatatatactcactacaaattgacgccaaaaagatacctttaaagctttgccaggaggaatctcatttggctctaaaggccctttcccactagggcaggggaattaagcctgctgctacatgtattgctgtctgagtcggctcaaatctacctctcttgctttcattttgtttcttttggggagatgttcactcttccagtttctcaccagcaccttcttctagccaggaagaagcctgagaagagggggacattgtgtccccagggagtggtgggcagctgatccacacgtgctgacctggggtaggcactggcttctgtggagatgtccctggaccttcctggtcatgaggtgtcctgtggaatctactgctggcgtctgtgactgggaaaacccgaggtctggtgcctcagttgtcagagccagtgctccatccgaggtcaccccgctgtgcctctccctggctccacaggttctctgcatcttggccatgaccttgtttcttctgtggcttagactgtccaggtgatactcaaaatgtttagcaaccagcagggcatgagtaccagcccatcagaaaagatgctacagcacctgttgctgcacctgaagagctccgaggagcaccaggaaagccaagggagcagaaggtggagagctcagggccttggggaagtggttatctaccaagaggtggggcagtcttcccccacttggcctcactgctccttactcactgaatatcctgaagctgtggctacaggtcatcttgtctttcatcatggcagccccatctcagcccagatctcagtttaccttccattctctcctgggagtgcaggggaaggtctgaatctctcccatcagtgaagcacccctttacctaacagccacaccattatttccattcttctttagtgccccttacttcaccaaggtgggattcctccagagatgcaacttggaagcagagcaaaaattcttctgcatccagccctctctcttttacctcttgtccctttgccttcaggtttcaaacccagaataagaagcaggactgcctgcctgattcctcttgtaccttccctcctttagccctggagcccaaagggtctttttcttctactgacacttcctaccaggaaggaacttcccctgcatcatattcacttcctttcctctttctgaggaggcctttgctctctccctttcctggggctgtagtggcagaagaatccagaatatcaaggaggaaaacacattgggaggtaattgcaatattaccttcattgcgtctgtgttgcatgtactgtcccatcctagagaaagaggagtttgaacaaaatttaaactgttctttgtgattcaaggaaatcattaggagcatcaattgttttgtgctttaatgtcctgatatactcagtagggcacagtaacatggaagggactgctggtgtctgcgcttaaaatcccgaaatggctgtgtgctttggttctcgcacctgccttaatggttttcctgtctcctctgttactgggcaatcagctgccgcttttttcagtgtgtgttttcttctcctagccttctccctctttccaatttgccatctggaatctgcttttgattgagcattctgttcacctgttgttgcatgaaaaactatcccaaaacttagtggcttaaaaatgacaactattttatgataactcctagtttctgtatgtcacgaatttgagggctcaactaggtgattcttctgctccatgtgtctgattgagttcaaacagtggtgctcagctggtgaatggactcatctggagggtccacgatggcttcacttacatggctggtgcctttgcagggttcctgggaggctgagcatagctaggattgtcaaccaatgccctacatgtggcctccctagcaaggtggtctcagggcagttggactgtcttcgtggtggctgactttccaaggaagccaggcagaagcaagcaccccttggaaaccaggtggaggctgcatggatttttctgatctagctcaagagttcacacagcatcacttctgctgcattgtattggttacaccaagttacaggccagcccacattcaagggaggtgagttagactccacctcttggtggcagagtggcacagtcacattctagaagaccatgtgggatgggagatactgttgtggtcacctctggaaaatacattctgctactcttaaaaactagtgacgctcatacaaatcaacagaaagagcttctgaaggaagactttaaagctgcttctgtgagtgaaatatgctacatgcctttgtaccaggatctgattggctgtctttcccctactcagatcttcctgtccttgtttcttctgtctttgtcttattttagatgggcaggttttctggatgactgattactcaaatattttaggtgtttcccacactcagattataagacagaaagcaaaatttgttttaagggtgtatgtctgttaacaaccaaccgctgctctaatgccagagcttccagttactaattaactttatccagcaggtagcccagcagagctggaagtccagttcccaggagacctcagaagtcccgagttgtggctctgccgttggtggccatggggacttcggcaagagagttgactgagttcagtggttgtctgctatgactcgatgctttagaaactgaagctgtatctaggactgaggaggcctaagctcaaatccagattgacttagagttccagggttttagacctgcaagagacctgggaggtctcaccagcccaacctctgtattttagaggtgaagaaactgtgactcagagattgagcaaatgactatgtgtttgcctaagatcacatagttagttaatggtagagtgaagacaggaacccagttccaacctccagctccatatgctgtcactgagataaaaaccttagaattcctggcagccttgaagatgtatacgtgtgtatgcatctgtatgtatttagaattgtgtgtttatatgttaagcacgcaacatttatattgtgtattttataaagtaaatatttatagaacacttatatgttctataatatggatctatgaatttaggcttatggattccattaggtaaagttgtacatatttttagtatagtaactggtgttagctaagttgccaactacaataccgacgagttctcaggctgggctgtggaatggtcgcttagcaggaattcggcagaatgcagatggtggaagggctgatttctcatcacgtcttccaactgtgtccttgagcaagctccttatctccctgagtaccgggctctgcttctgtaaaacactgatgagagctactgcttgttgaacactttctttttgcagcactgctgagctcattacatatggtgtgacatctactcctcctgtagtgcacaccagggtatgcccatttcacagatgaggagactgagcctcacacaggtaatgtaacctgcccaccaccctgctgctggcaggaaggaaggcaggattcccacttctctgtccaggtacactgtgctcttctgtatacactttctaactctcaaagttattggaaggtgtagacagacttctttggagcttccccacagggtcgaatatgactaataaatgaagttaagagggaggaaattttgggatccaaaatggcagacatttctaattatggatacttcccaagactggcagtgtgcatctcgtgatggggtaagcttgtcttctatagaggatgctgggtttcagaagactgtttgggtgggcagatagacttaatggcttctggaggcccctctagctccaggtgttgatgcttttacagagcagagaacgagtgccaaaaccaaggattgtgtaggcttgggtttacatcctatttgtcattccttagctctgtgaccttggacaagtgacttaatgtacccaagtctatttccattgctccgtgtttataatggggatgctgagctctaccagactcatgagttttgtcctctggagttgttcagggtagtgcattcctcttacacaaataccaggctgggagaatttgaagcctgtgggtttgccctgcagatgcctagggcctcacaggtagagcttcctcatcagtcattttggaggaggatggtaactgttccaggctagaggagtggtcttgctgggtgtcagtcagggcagggtctaatgcaggaggcaggtgaagcaagtgtttgttgatggtccagcctgctgggggcttggaatgacccagactcacagggaatggaatgttgatacaggatttgaatgagcgaaaacatgagttgagttggttgactgaacttgaccaacttctgtcccaagaaccactgactaagagacacttcagtggtggttttagcgagaagggatgtttgctggcagacagtataaagagagcgcctatgccttggtggaaccatctgtatcagtttctgccgatttgctcctctgagattcagcccaatgtggcctaatgccctattctgccaaagatgggtctccctgcaacgtggcctccaggaagtgatctgtctcaccagaccccaccagggatgggaggctagtgtccaggacatcgccagctatcattctgacacagctatgcagaccaggaacagtctcagcctgctgcttggaagctcattccttgtctagcttttttctttcctatagaacaaaagcagtttctggacaactcatctaggtttttgttttgagccagcacatttttcaataaaagctgactgaaacctggtcatgtatttctctgtatctgagtctagaaagtcttccctcttaaaattctgttatttcctagggcttagttaaaaaatacattctatattgtttcacctttgaatttataaaaaatttccaggttaattttgatgtaaatatttatttcctcatgggtttcaaagaatttatacgacatgcgtaaaacatgttcgggctcctaggaattcattttacacactagaagtgactcagtgataggtgtaaagcctgatagctatgtgacttcattaacattcagcacctgccaccgtgtttttgttctttgaatgactgtgccacctgactcagagatgagacagttgcctaaaaacttctgggaacaaggtaatgatagaaatagagaagagtttcatcttctaggtgaattcagtccagatatattcaaatatattatcaaaaaaaattgttactccttctacatgctggaaaattcctttctggagctatcgtttacttactagtttctcaatctgttaaaaaaatgtattcctgcatgtattctgaagtattcagaggtgaagtttgatgatgtctgcaactttcaggtgttccaggagaaaatatgtctatgtctatgtctgtgtctgtgtgtctgtgtctgtgtctgtgtctgtgtctgtgtctgtgtgtctgtgtctgcgggtgtgtctgtgtctgtgtctgtgtgtatgtctaagtctaggtctaggtctgtgtctgtgtctatgtctatgtctatgtctgtgactttgtcccctatctgtgtctgtgtctatgtctctgtctgtgtctgtgtctgtgtctgtgtctgtgtccgtgtctgtgtctgtgtctatgtgtaggtctaggtctaggtctgtgtctatgtctatgtgtatgtctaatctaggtctcagtttatgtctgcgtctgtgtctgtgtctatgtctgtataaatgtctatgtctgtgtctgtgttggtgtctgtgtctatgtctatgtctaagtctaggtctaggtctgtgtctaagtctatgtctaggtctatgtctatgtctatgcctatgcctatgtctatgtctatgtctatatctatatctatatctatatctatatctatatctatatctgtatctatatctatgtctatgtctgtgtctttgtccctgtctgtgtctgtgtctatgtctgtgtctaggtctaggtctgtgtctgtgtctgtgtctctgcctgggtctatgtctaggtctatgtctacatgtatatctctgtctgtgtctgtgtctgtgcctatgtctgtgtctgtgtttgtgtctgtgtctgtgtcggtgtctatgtctatgtctgtgtctgtgtctctgtctgtgtctgtgtctatgcctatgtctatatctgtgtctgtgtctggctgtggctgtgtccgtgtctgtgtctatgtctgtgtctatgtctgtgtctgtgtctctgtctgtgtctatgtctgtgtctgtgtctctgtctgtgtctatgtctgtgtctgtgtctctgtctgtgtctatgtctatgtctatatctgtgtctgtgtctggctgtggctgtgtctgtgtctgtgtcggtgtctgtgtcagtgtctaggcctatgtctatgtctgtgtctttgtcccctgtctgtgtcccatgtctgtgtctgtgtctggctgtggctgtgtctgtgtctgtgtcggtgtctgtgtcagtgtctaggcctatgtctatgtctgtgtctttgtcccctgtctgtgtcccatgtctgtgtctgtgtctggctgtggctgtggctgtgtctgtgtcggtgtctaggcctatgtctatgtctgtgtctttgtcccctgtctgtgtcccatgtctgtgtctgtgtctggctgtggctgtggctgtgtctgtgtcggtgtctgtgtcggtgtctaggcctatgtctatgtctgtgtctttgtcccctgtctgtgtcccatgtctgtgtctgtgtctggctgtggctgtggctgtgtctgtgtcggtgtctgtgtcggtgtctaggcctatgtctatgtctgtgtctttgtcccctgtctgtgtcccatgtcggtgtctgtgtctgtgtctaggtctatgtctacgtgtatatctctctgtgtctgtgtctgtggctgtgctgtgtctgtgtctgtgtctgtgtctgtgtctgtgtctgtggctgtgtctgtggctgtgtctgtggttgtgtttgtgtctgtgtctgtgtctctgtctgtgtctatgtgtatgtctaggtctaggtctaggtctgtgtctgtgtctgtgtctaggtctaggtcttggtctcggtctgggtctatgtctatgtctatgtctatgtctatgtctatgtctatgtctatgtctatgtctatgtgcctgtgtgtaaatagaaagagaagaagagggagagtgagaataaagcgaatgcagcaaaatgttaacaatggcgaatctactgaaatatatacttgcatttgtcatactatgctttcaacttttcagtctttttgtaatttttaaaaattaaatgaaaaggtggagtaagcacttacatccttttaggctatatgtactgtctatgaccagaagctgcagacacctgggaatcaaaggcaggtaacggttacctgggcctcagtgcgtgctctaccacctgtccaactcagggctgtgcatcagctctttctaccttccagcattctttttccttcctttcacacttcacacatttttgtctttttcttatgcctggtcctgtttttcatcatatgcctctgttttcttatgttgaatgtggtgaaacatggttatttgacaaaaaaaaaaaaaaaaaagatagaattctaactcaaatacttggaaggagctgcccttgaaatttctttcttccagtaagaaggtcaactcagattccagcagaaatgtcaagttgtctgtgatttaaaaactcatttaaagaaagtaggccaggagaatagtgttttgctgcaaacttctgcaaaactaatttgttttcccctctgggcctgccaaagatttactgtttcccacgctacagcaattttggttccaacctttttctgaggttttgattattgaaaactgtcactactatgtgtttgtggtttacttgtctgcagccacatcctagagaagtcacagtaaagcagctcttttgctcaagtccagggagagaaaccaagacaattcccttggctggagatggtggtgggggtagatgaggctagcagttactggaggaggacagcattttaggattcgttctactggaacaggatccttgttgaaacacttcttctcacccatccagccatatcatttgaagaagagagttaacttgaaactcactttacctgtagaaagaagagacttgattagatttctcaaagactcttcagctccatagctctgtgaagcgttagctactgactgatcctgaatggcacagcctggatttctggtgtcaaagtaattttaaacatggttacaaaccttcccataattcccgtaagcctgaccctgagagaatgtgagcatggtggggccctttcatttgaggggaggctgcacgtcagctcctgactttgagtcaaagtgacttttagagtcaaccagcagaaactgtttacctgaaatagttgagtatcagaaagaagactgtgagaacacaatgcctgacagtacctggcagggctccttcccctgggatctttttataaactctggaaaaacaatatattgggaataggcttggctgtgcgtgacagaaagcctggacacataaaaaaggtagtccagggtggtgggcggcttcacgaagccaccaaggactcaggttcccctcttactgccctattgcattcagtgagtggtctgtaccttgtagttcatggtagtggccacaatccagccaccacatccacactgagcagcaggaaggaagattagtggagacctcccagggggatcacatgacacttccacttacatctcattgatccacattttgtcacatggccactccttgttgcaagggatatgatgggaaatgtctgtgtatagagggccatgtgcccaggtaagattcgggggttctattattgggaaagcagggaggacagatattgggagaagaaactagcagcatctgtcatagaaggtgtattttcaaagagcaagggctttggaatcaccagtgctgggtttaaatttcaacatctgcttactagctgtaagatctcggccaggccttttaacccctttaaactcttataatacatcctctgtaaaatcagcatgatactcagtttgtggggataaaatgcaagaatgaatgttcaatatttggcacaatagctattgttatacactagtccctaaaacaccagctttgacttcatttacttatcctgatatatggtattggttagctacagtgtatttaaattcctacttctttcatgttctaatggtgcactaatgagtctggcttggaccagtatagttggggatgtgataagctaatgcgtgtccaaggaggacacagcagcttggtggatgtttatgtgaccttcatctggcaaacctgacagtatggttaggggtaaagtcacaggaactatttgtgcttcagaaactcgtgaagaatagtattgtgtagaaacagagtttaagggagaaagctccaggctagatacatagctaaggggaatatctcaggtcaccagaagggggagctcagactgtaactctgagtccttggactcagggttccccactcacgagggagggtttctggagtgcgagggtcggttcctcaatgccgcaatgccgccctggatttactgcaagtcattcccagagatatctgtgcaaggagcagggaacaactcaaggtaaaagtggctgggaatttttcccctggattcattcacaactcctgccgtgggcaggcttttagtcataagtattccccggtatgttctagtgtgtgggccatgagggctgtgagcaagaccagggctctgccccaaggttgtcaccatccttgcggagccagaagagtcaggcatggcagctggcacgactgctcccacttccggccctgccgatggccgggtggggcattgacttgctgtgtcggatggaatgtgagcagacaagagtgagttagttcccagtgtggcctcgtgtgtgcttttggccgcatcgtttccagtttcgccatccccaaagaggatcatctcccaggaagcttactggtccaaggaggatgagacacccatggagcagacttggaccccatctgccgctcagagccaggcctaaccctgccaagtttaggttaaccaacttccatcttgcccacagacttgtgagcaagagtgaacgaccgttgtttcacaccattcagttctggggtcgttggtttgttaagcagcatcgttgtggccgtggttagcagacacagggaacacttgtgatagtgtgagaaggtcatcagggagacgaggagggcatctgacactccagtctttggggggcatgggggaggactgcttcataaacttgtacaagctatttctgttttggatttcttgttgcttttctccctgggatgctgtagaccagagtgttagcaggacaccaaatctcttggcgcatgtcagagttgtatgtaaaacaggagttaatccgtaggggatatagggaaaactctctgacaagtgaaatatgaggactcttgggctttgagtgatccattaactcactcattcattcattcaaaaaatgagagttagggacagaactgtgaataagataaagcagggttctgtcaaccaaaaagtatctgacagtcttaataatttagaagcttattttgccaagattaaggacaatgcccaggagaaaaaacatggaatcacagaaaaagcagtctgtggtctgtgcctttctccaaagatgattttgagggcttcaatatgtaaagtttttcccctattgaaaagcaggctggagggcagagagggagggtgcagtcattactgaatccatgtgttgcaagggaaaagaaataggtagggaatagtcaattatattcctcttatactcagtaaatctgctcttcacatatgataaggtaaacatagagtggctacctgtggagaatttttaaaatcttttatctgtacgctctctgcttaggaacaaaaggaaaggcagcttcttgcaggactcagacttcagcttatttttttccttttggcagagtgaattgggggtcccaagtttttattttcctttcacagtccttccatcagtggagcctgaattctggagaggggagacaaggctgatgatgaatgccacagagaatgacagggaagggaaggaaaacatggagtattgggattaaaggtggtgcaattttagatagggaggtgagggagacctcacgaagaaagtgaagtccgagcagaaagggcactggcagtggccttagctgaggaagcagcatctctggccaaggcgcaggaatggctaagggaggtctctgcagagacagcagcttatggggcagagcccctctgccaagcacgcctctaggtgctacaaggattcgactttagatatgttcagtgaatatagctgcagagaaacaaatccaaaaattttgagttttgttcttaaacagagtaggccaaaaggttcccattatccagtgaagcttccagaccctgcccctaccccgtcttcaagggattctctctgcagggttcttggttcctggtgacacctctgtttcctcccctaggccacgtgctgctgggtctcagtcctccacttcccgtgtcctctggaagttgtcaggagcaatgttgcgcttgtacgtgttggtaatgggagtttctgccttcacccttcagcctgcggcacacacaggttagaagtaaacctttcagatgcaaaaaggcttgcctgtagcttcgctggggaaagatgttatctagagaagtttccttgtcagaaagcaaagtgtgggccgagctcggtggctgccggctgtaatgttagtacttgagagccctaggcgggtggattgcttgagcccaggagtttgagaccagtttgggcaacatagagagacccacgtctctacaaaaaaaaaaaaaaaaaaagtagttgggcgtggtggtgcgtgcctgtagacctggctacttgggaggctgaggtgagaggagtgcttgaacccagggaggttgaggctgcagtgagtggagattgcatcactccactccagcagggcaacagagtgagaccctgtctcaaaaaaataaaaaaggaaaaattaaaaaaaagaaaaaagaaaagaaaaggaaagaatggtgcgaatgtgcttgtcaaagagcaaactgaagaagtgacgtgtttgcccttaacaaagttgcctttggagtttaaccatacgacgtgccagaactaaacttttaccatctaaactcagctcagatttacttttaatgatgagaaatcagccagtgaaaactatggccatagtttttaatctttaattttttgtcaccgtagaaacctgatttaactttcttcacaaaacataagttggaatggatagtagcactgaacttgttatttggaaattttgaaagtataataacggggtagggagggagtttaatagtaccccagggtgtaggtctttttgttagggacaaatgacatctttctcaaatgtgctccaggtttccctgccagaatcaggatcagtcccaggtgcagggaggttttatgatctgagcaagttttggacccaaagcctgaccatgggctctctgtccttcaggggctgccagaagctgccggtttcgtgggaggcattacaagcgggagttcaggctggaaggggagcctgtagccctgaggtgcccccaggtgccctactggttgtgggcctctgtcagcccccgcatcaacctgacatggcataaaaatgactctgctaggacggtcccaggagaagaagagacacggatgtgggcccaggacggtgctctgtggcttctgccagccttgcaggaggactctggcacctacgtctgcactactaggtaagtctccctgtgcggggctggggaggggatcctggcaggatggaggcttgtgagggtcttcagtcatgatccggatctcagaatccagtgtacaaaatacaaatccagtgaatccacattgcatcccgtttgctgttcctgacaccccccccaaccctacagtctcattctgtctccatttagtctttgctcaaatgccacctctttggagacaacgtccctagccattttagctgacaccgccctctgtcactctctccttaccctgctgtagtttccttgcgataagattttcccatctgacacatttgtgtgcgctactgtatttaatgtttgtctacccattagaatgtaaactctgcaagggcagggacttggtctatgttgttcactgttgaagccacatggtaaggaaccaagaaatagacatagaataggattttactctgaataggattttagagctgggtgagaccttaggattaaattagtccaacactttgggcggccgaagagggtggatcacgaggtcaggagatcacgaccatcctggctaacacagtgaaaccccgtctctactaaaaaaatacaaaaaaattagctgggcatggtggcgggcgcctgtagtcccagctactcaggaggctgaggcaggagaatggcgtgaacccaggagatggagcttgcagtgagcggagatcgagccactgcgctccaggctgggcgactgagcgagactctgtctaaaaaaaaaaaaaaaaaaaattagtccaactgctcgttgtaaggatgagggaaccaagctggcttggaaagttccccaggtggtgcgtggtagagctgactctggagcccgagtctcctgaccctgggtccagtcctcctccctctttgtcctgttgctttcttcccctttaactgtagaaaaaatacacataacaaaaaatttatcatcttaaacagtttttagtgtacagatcagtggcaccatcaccattatccatctttaggagtttttcatcctcacaaactgaaactctgaacccattaaacaataactcccctctcttcttccctccagcctcaggcaaccaccactgtactttccgactctatgattttgacgactctaggtacctcgtttaaatcgtttaagtgaaatcagtctttctgtgactgaattatttcacttagcatagtgttttcaaggttcgttcatgttgtagcatgagtcagagtttccttcctttatgaggtggaatattattattccgttttatgtatgtaccacattttgtttatctatttatccatccagggacacttgacttgcttcctcctttcagctattgtgaatccaatatgaacatggatgtgaagatatctgttcaaatctctgctttcagttcttctgggtatagaccccaaagaggaactgctggatcatctgttaattctatatttaattttgaggaactatcatactgttttccatagtggctgtaccatttttcattcccaacaacagtgccgacactcaatttctctacatactcaccaacacatgttattttctattatttttgataataatcatcctaatgggtgtgaaggggtctctcattgtggctttgatttccacgttcctaatgattagcgatgctgagcatctttttgtgtgcttattaaccatctgtgcatcttcgctggagacacagacatatctcctttatggactctaagtcctttgcccattttaaaaactgcattttgctgttgttgttgagttgtaggagttctttacatttcctggttattaaccccttgccttatcagatatatagttagaaatattttctcctgttctctaagttgcatattcattctgttcatagtgtcatttgttacacaaaaggttttaattttgatcaagtccagtttatctatttttttcttttgttgcctgtgcttttagtgttaagaaatcattgcccaatccaatgtcatgaaggttttcccctttgttttcttctaagaattttatagttttagctcttttgctttttgatccattttgagttaatttttgtatatggtgttaggtaagggtcctgcttcattcttttgcatgtggatatccattttctccagtactatttgctgaaaagactgtcctttccccattgaatggtcttgacatgtcctactccttcttgatggatgaagttttaggcctagtgttggtgatcttaaaaagtttcttggcttcgttcttctgaactaggacaaccctcagcttgattgggaactagtgttttggcctctctcttcagctgcttcatctgttcctccaataaaaacttccttggctttgttcttctgaactaagacaacctttggcttgattgggaactagtgttttggcctctctcttcagctgcttcttctgttcctccaaaggcactgcttgctccttccaccagctggcttcagagtctccagatttcataaactcatttgacttaagaaggactgtacccaggaatatgtacatttagaaaaagaaccggagaagtgagattcttagcacagtggaagtactggtgaatggaaaaatttcagaccacgtcatccccagtcctaggctgggtgtgtgtgtggcagggtatgtggggggtgggaggagatatgaggtagagggtgccctctgtgtgtgtgtgtgtgtgtgcatgtgcgtgcatgtgtgaaattaagaatcttttcaaattaaacccagcttgacactaccatccatatgtctagccccaactataagcaatttagggacaggtttaatcctgtcaatgaaccttgcctaagaagcaggcaaaccatcttctattcttatgctaggaaaatgtggatgcctggttttacaatagctataaatgcatatttcttctttcttttccacagtaaaaattctaattttctctaaggagtactactaggaaaacttcatagcatagtaagaaaacatgaaacctgaagtcagaaagaaagatgggaatcttagctctctcatttcctatctggtgggaccttgggcttatcacttgacttttatgggtgttagttttcctgtaaagaagtttgttgagagggttatgtgagatcacagaatgtgaaggaactagcgtggggtctgccatggtaggtggtcaatatatacataaaaattccctctccttcccaaaaggcaatcctcatgactactgaaagtgagactgtgcaaaaatcagggagatgtgagctgagttctgtttgtcttaaagtttgcttttatgatcaatttttgtaggaaaaaaaaagctgagattgagggggcagtggaaatcccagtgtatgtcaaactttctttgcatgatgggaaggtttacctggctgacctttaatactctttgtcaactgtaagattgggattctaattgagtgagaatcaccagcagttgccataatactctttagcgttgatagtcatgaggcaagagactgccctgttctcatgattgtttaagaccttgtgatctagaaccacgtggtgagtcagagtaggcaaggatgcaagccatcagagaggccaagatttgagcagtagctgcctgggcctccttgcttggtgctctgcaaataaatgccttactttctatcactgcaaaaaaaaaaaaaaaaaaaaaaaaaaaaggaaagaaagaaaagaaaagaaggaaaagaaaaagaaaaaaaaaaaaaaagagaaagagtaggcagtcaaggttatgctgctgtaacaaatagctcctaaatctcagtggcttaaaataacaagggcttatttcttacacatgcaacaggtccattgtgggtttgcagacagttagggacttaggctgaaggagcagtcacagtcactatttcaaatgttattggttggttgctagagcaggaagcctgctttggagggtctctcatggctgttacaactttcatgtagaagggccacacatataactcatgagctaggaagagtccccacagtggggacgaggacatgtgatacaccatgtgctcagaatagggagaactgggcctatttggtgagcagcactacgaatgactatcacgcctttgccatgggggtgccacactacatggggagtgcaagtggtgatcaaattgcccctcacccttctctttcttttgagttatttttatgaagtttcttgctcaaggggaattaccagatcaataatgtgaacagccttgtaactttcaatatgtctactaagcttggtttctgaagatagtacttatgggtactgaagatagatttatgggttttcccagagccttgctgggcttcccattttggtttgacctctttgtagctgtacagcccacttaatttctgtacacctacctttttcatataaaaatgatataatagtaattcctacttcatgggggctggactataagtgaaataacgtgtgcaaagtacacagcacagggtctggcctgcatctactcgctgctggctacctgctgtgtgactgttactcaagtaggcccaggtctttagatttgtcctcagttgcctttattcaacatgtagtgacattacgcatttttcaaggtgagagttaacattctgtatttctttatgcacaaaatataatatttgttcatctattttccctttttaagctaaatataaacagatattggcttcatatatttaaattaattcttcttactttcaagtggtaagcttttatcacatttctttcaccttttttttacattttgttacttgtttggatatggatggtttagattttgctgtgcaagtaatttttacccctatatgtaaaactcgtccttattgtctctgtcaaagtctcatgtgttttaggtagccagaaatttagctgagataattatatttttatatttttctacttaaaagagtagttttaattactgttttctgtcctccatccatttcccacaagtttccagcaaggttttcctcttccctttttccagctctaaggtcttgatagaattatggcagtgaaataatgattaggctagtaaaataataataataataataataataataatcatataataataaagcaaacttaccaagttaatttccccatgcagtattacaaaaatcttttatgggtcttacactaagtttccagcagttttctaaaactagacttcagttggtaaatcattccccaaaggagcaaagggaatattcctttttacggaaacaatggctcttgggaaacaatctctgcatgtggatatggtttcctggatcatgaagttggagtatgcgggggctgggctcaaggagctccagaacctggaaggcataagcccttttgaagaggacttggggatttcttaatgaaccttggtggcattagaatcgggcttgtagacagtcctttgtgaaaaacacagaatatgctttttctgtacaattatgttacgacacttgttgccccccaagtgttcgaaaagatcagggacagaagtattgcaatatagatgttcctcgacttacaatggggtaaataccaataaacccattgtaagttggaaatagcgttgtcacttaacttaccacttaacacttaacttacccaacatcacaacttagcctagtcttccttaaatgggctgagaatgcttacattagcctacagctgggcaaagtcatctaacacaaaacgtattttgtaataaagcgttgaatatctcatgtgatttattgaatactatactgaagtagggtttctattgaatgcttgttgtgtttgcagcattgtaaagtcaaaaaatcctaagttgaaccatcttatgtcgggaaaccatctgtactaatccagaaaatgcagatgcagattttaatagagttggggaaatgatgcttaatttcatttagctttacttttattttgccttgccatttatcttttttttcccttttaaatcagaaatgcttcttactgtgacaaaatgtccattgagctcagagtttttgagaatacagatgctttcctgccgttcatctcatacccgcaaattttaaccttgtcaacctctggggtattagtatgccctgacctgagtgaattcacccgtgacaaaactgacgtgaagattcaatggtacaaggtacggctttaaaaaatgccattttactaaaatgtgttttctttttttactagccataaaagaaagacttaaaatatcgattttctgaagacagtgcacacacacacacgcacaaacacacacatggtttgcctttcatatctgtgagttccacatcctgggattcaaccaacctgggattgaaaatataaacaaataaacaaataaaataacagtacaatacaaataatacaaataagaaaccaacacagtgcatcatctactgtcacatgctgcatgacaaagtttcagtcaacagtaggctgcatgtacaatggtggtcttgtaagattataatggagctgagaaatttctattgcctagtgacatcatagctgtctcaacatcatagtgcaaaatattaccttttctatgtttagatatgtttatatgtacaaaaactgaccactgtgctccaattgcctacagtattcaggacagtaacatgctgtacaggtttgtcgcctaggagcagcaggctgtatcatgtcacttaggtgtgtaggaggctctaccatctaggcctgtgcgagtactctctatgacgttcacacaacaaagaaatcacttaaactgtttctcagaattatcccattgttaagtgacacatgactgtatttacacagggcatttacattgtattagtaatctacaagtaatctagagatgatttaaagtatatgggaggatatccgtaggttatatgcaaagatgacacccctttatataaaccacttacgcatctgtgttttggcacctgtggggaatgtttgctgaaaccaatcccccaaagaaactgagggatgactgtattttaaagaatttaaaagggccgtaattaatatgttctattagtccttatgtgggttgagtaaaggtacttgaaatagtgatttgtgaagacagagtacataacagctgaaggaaataactttttactgtaatttgtctacaaaaatgtagaaaaaagcttacataacaattttatagacatattaaaggagtttttttaaaaagtacatgacagctgggcgtggtggctcacacctataatcccagcactctggcaggccaaggcaggtagatcacctgaggtcaggagtttgagaccagcctggccaacatgtcaaaaccccatctctactaaaaataaaaaattagctgggcgtggtagtgggtgccagtaatcctggtgactcgggaggctgaagcaggagaatcacttgagccctggaggtggaggttgcagtgagccaagatcacgccattgcactccagcctgggaaacacagtgagactccatctcagaaaaaaaaaaaaaaaagcacatgatagcaaacttttgggttaagggagcaaatatgaacacaatttattcccttgtctggttgaatagatgttatttgatgtgctcattgctcctagtgagaacatcagatattgtcattagatattgcttatgtagaccggggttggaaaaccatggttgggccctggaatcaagttgtctcctggatttgaatggctcacaagccaacgatagttgtcacttttttaaatgttggaaaaaaagtaaaagaaggatattttatgatgtgaaaatcacataaaattaaaatttcagggtcggtaaattaagtttcactggacacagccacatcctcttgttgtagtactgtctgtagccgctttcacatggcctagttgtgatggagaccctgcagactccaagatccaaaatacttcctatttggccctttcctgaaaacattggtcaactcctgatagagaccctagattgatactgaaaagtacagttattggcttaatcattaatgagaattaaccctttaattgataataggttaagtagttggctggtttgtaactacagcatctctatataggatattgatttaatattagaaactttgaaatgattttctgaaagtagaggaaagtagccagctcctatgaataagctggctgagctctagaatgcattctctctctctctctctttttaatagagatagggtctcaccatgttggccaggctggcctcgaactcctgggttcaagtgatccttccacctcagcttcccacagtgctgagattataggtgcaagcccccaagcccagcctagaatgcattctcttttggtttgggaaaagcataaagaggacaaatgaaagtttttacctggagaggaaagagcacaggctctggcgtcaatgggtctgggtttgaaactctgttccttctctgatctgttgtgcagccgtggccgagtgactccacctctcgaacctgtttcctctgtaaagtggcaattaataactttcaccacctgggattgtttcaaagattaaatggaatcatgtgtatgaagcacccggtgcagtgcttgacatataaatggtgctcaataaatgtgcatggacaaagatgtcatggtgatgcttagtaatatttattcccttcataataatgatacctattactgcgcatgtactatatccaagcctgttctaaactccctgacatgcaacccgatgaagtaggaactgtaaatatcccccctttttacagttaaggacccataaggatgttcccaagatcacacagccagtagatggtgaagtcaaaactcaaacccaggaggccagttcccatacaccactggaatgactgtggtgctgggctctatttggcatttttcatatttgactactcatgcttagaacaatgaaatatctcctttcaattaaatatgttctaaagtggtacttcatgagccatgtggcaatttcaattttatctgtgttctcgttcggagtaagattctgaagtgactcaaggttatatttgactgttgcaaacgttgaataatcatgattttgaaagtgatgtccctgagaacattgtgtgctcattagggtgtttttagaaatcccattccgctctttctatttcctggaggccttgatcttgaggattctattctgcagagaccccagagaaccttgtgtccatataaaaagtgtggactcgtttcccctatttagtttttcttataacagagatttttctgttactgactcacaaaattgaaatgctttttaaagtaattactgcaacgtcatctcttctgagcattgttgtccaggtcatcatgacgatttatagtgctcttcccagatacttcctaaggcctgaaggtagcagtcaggacataaacatatttgtattttagatggcttactttgtcaaagaagagttcgtctcttttttttccccttggacaaatatgctctaactattgtagttaaccaaatctagcaattttatttgtttatatgttaacaaattccttcccctaataatacagtcaaacgtatgcccaaagtacaaaattggcaaagtaaataccaggacaattcttggattgcaaatcccacattggttgataatgatgatgtaattcatagcctttgagatgtatattggtataatgtcaacttaaaaaaacattttcccttaaggattctcttcttttggataaagacaatgagaaatttctaagtgtgagggggaccactcacttactcgtacacgatgtggccctggaagatgctggctattaccgctgtgtcctgacatttgcccatgaaggccagcaatacaacatcactaggagtattgagctacgcatcaagagtaagtacttgccattgaggcacctatctatcctggttcaataacaagcatgcagagaacaaatgacggtgcacgtagaattccttgcaggtctttggaatgaaggataacggaaaacagatccatcagctctcctgaagcatcaggttaataagacgtgtgtgatactttgaaaggtataaatcagggtgttgttctgagaacaggtgaacgaattgggaaggttatagggttgcaagatgaaggctaaaacacaccactcaagagagtcaaacagtggcttctgtagaaggtacccttggaaagtgtcctgtgaagctttgcacctatagggctagaggtcaccacatgctgtaactttatgttcaattttaggatacttcaattttattgggtattctaaccagagagctagccttgcacatccagtggaaattgccttttatttgtcttccctaaggtgggtctagctgcccttaatagcaatatttcaaatagtcagagctgccattgattaaaaggagtttcgtttgaaaatgctgttttgagcagtattggctattgtttcacatttgttcaacatttactccgtaccaactgtgtgccggacatggagacaggtgtaaccatgtgtaaatcctggactttgccttggagagtgggccacacttctttgttttttatactgaataatgatcacaactggggtcttttgaggggatttcagagagcttcagagacacgctaagtttaaataattggtctataaggggaaaatatatttttctcacagagcatccagagattcagttgcaccgcattttcccacggactgaggtgtcctgattgtgtttgttttacagtcctgtgaggattcgttcatatcagctccttgcttctggacaggccactgactcaggtctcctgaggctttccgtggaccggcacggtcctgtctctgcgatactgtgcatgaacactagggggcagccgccctacatgcctgtctgtgttgtgatcctcccaggatctcagtggctctcaaggggtggtcctgggccagcagcgcctcatcacctgggtactcaacagacatgcaaatctcgggtcccgtggagacctactgattgaaactggagtctgggggctgtcatctgtgtctcacaagcccccgggtgatgctggggaccctcaagtctaagaagcactgagatcctggaggcttctttctctccctggatgccccagctccatagggcagcgcgtgacttggaggaggggaggaaaaggcgtctggccgtggtcgaaaagccgtctgcccctcaggctgtcctgccatgctgtctaatgtgtactcatgtcaggatttcaaaatgctgtttcgtggaagtgaggatgatgaggcccgtcgtggagacaactcacagccctcaccccccaggtgtcctttttgctcatttcaggggcctcgtttctttctttcttttcttttctttttttttttttttttggtttttttttgaggcggagtctcgctctgccacccaggctggagtgcaatggcgcgatctcggctcactgcgacctctacctcccgggttcaagcgattatcctgtctcagcctcctgagtagctgggattacaggcttacgccaccaagcccagctaatttttgtatttttagtagagacaggggttcaccatgttggtcaggctggtctcgaactcctgacctgttgatccacctgcctcggcctcccaaagtgccgggattacaggcgtgagccactgcacccggccacctcctttctttacgttggctctaatcccttggagatccacttctgcctctccagagagtttatctcttcaattaacaaggcctctgtggccgaggccaggttacacactagccttccaaataggtgtttcttgagccctgtgccttttctagaagaactgagtcttgagtattttgtggcaggcactttggagaggtggagaaggtattttaggtcaggtcaagtttcggggaaaatctatctcgtggacctcataaacatgattgttttcaggaagtctgggagggaaatggttaattgtttatcatagagcaaggactgaagacctcctgtcagcggaatgtgtgtttggctgtggcctcttccagtaattgctctgctgggaaagtcattggccaaggatgctcgattttgtagagagcctgtttcctttgccagacaaagcctgactctcataatgactggccatactggaaaggataacttagttgattagccaaacaatgacttgaaccacagcgtcaaatgaaggctttcctaacggaatctcttttccttacatctttctcagaaaaaaaagaagagaccattcctgtgatcatttcccccctcaagaccatatcagcttctctgggtaaggcccacaaggaccatgcattccacgcacctgtgggggtgcctggtatcccaatgcagggggcttgggacccttgcgtctgctgatcatacctgctccttgggtgcaatgtgcctgggtggagaccttagaactccagtgtgtgaggctggaataacaagtgtgaggaaatatttccctttggccagtttggttagaaatggcataatctgaaaacaggtatactttgcttcatgcaaagcctacctataaaaatctgaatgtgaaaatctgaacgttctggcagcagttatcaactgcatgagaagatgaacagcatgaaccccaggcagagccagcaccctcagtgtatttaaaataattcacatcaccaaaacttggctggcgctctgcctctctctaagactccatttgtaaagtgggctcagctgtggtcagtttcttgttgccagaagagctggtaagctggttgaatggtgccatgaaaatgaccaatggggctttctgcttttcactccatgtggtacagtccatcctggccagcacaggtccacactagtggccagtgagggtacgtaagtgtactgtactaacaaccaactgatgctagtggtggggcggaattgatgtttattgaggatccactatgtccaatgggatcccattcaatctcaacatagaccctgtaggttttattctctcaattttccaaaaggaaaaagccacccagggcatcacgttggctcagtggaggccaaaaggccatgctcagagtcaggctggagttcagattcaggtctgtgtgcctataaaacctgcatccttttatgtgtttgtttctgggtagtgtttttgtaggtctgttactcatttatgaaaccctggctgcacagtcttttaaaaaacaatttatttgctttttccttttgtttagtgctggtttaaattttaaatttgaattggaggccatagaggaggagggcttttgtgcagttgctgggactgctggctggcacttgggttgccactgccacagtgcagtccccatggctgcagctctaggaacaaccacctggaaatctggggcaatgggcacatgggtgatacctactggagccccagtgttctggctccctggggcttcccagccaagttccaggcccagttcccaatcagttgctttggatgcactggaatgggtggtggggccacgtgacactgattagtaggttgttacggctgaggaagatctttaaggtcataggagtggcataggatggagaacggctggcattctcaacccgtggtggggccaggtgcattaaaagacacaccacagggagccatatcacccacgaggaaaaaacaagtgagaaggttttcttcttcttttccttctactcttctttgtgaatgaaaaaaaaaataatttcctatgattgaggcagggggacccagtacatcacactgcacaactgcagagggcaccatctatagaaaacacagagtttttggctgggcgtggtggctcatggctgtaatcccagcactttgggaggccgaggcaggtggatcacgaggttaggagatcgagaccatcctggctaacacggtgaaaccccatctctactaaaaaatacaaaaaaaattagccgggcgtggtggcgggtgcccgggtcccagctcctcggggcgccgaggcaggagaatggcgtgaaccggggaggcggagcttgcagtgagccgagatcgccccaccgcactccagcctgggcgacagagcgagactccatctcaaaaacaaaacaaaacaaaacaaaaaaaacacgagtttttaaagaagggttgatccccagtcagagtcatctgggaatggagagttcccaggagaaacattagagccaagaccagcctcaggcaaagagaaagaatccacacattgatctggattttctgaggtaactgaagtgaggggcagaggaagtcggcttgaatttagcatgtcccgtgggagcgcaggggccctggtgaagccatttaacttcaggtgcctcttggtttttgcctgccatgaagaccagttgtaggaaccagaggtacttcgtaaacagtaaagctctgtgtgaacagaatcatttgagaaaactaaattttctaccaaggaaagaattgggtggtgaggggtgtttgagaagccgaggagggactcagggctcaggtttgctggtgggtgggaggtgctggttctgcagttgacgtgctgtgccttgccatccacagggtcaagactgacaatcccgtgtaaggtgtttctgggaaccggcacacccttaaccaccatgctgtggtggacggccaatgacacccacatagagagcgcctacccgggaggccgcgtgaccgaggggccacgccagtaagtgggccagggtcttctgttgagaactctgtgggtttcgctcttccttttggagacagttatcactatgacccacataccacattaaaagttactttttttgattccaaactgttggatgtttagaatttaaaaaattgtattttgctaaaaattatcttgagaatcaaactttctctgtaaatacttaaaagttgagttgcagttgacatgttggtattgatgttgcattttgtagctgtttcattaaacattgatccttttattttcgcaagttaaaaaatattttggagttcatatctttccattttccactctgcaacctgactatcaaacattttcataaacccttaaaaagaccctgagacctagccacagtatctatagtacctcttctgtttctcagggagctgtgggctgccacaatctctaagggaggttaataattaaaaaaaagaaagaattcagttctcataagcagtcatctctagaaaatgttttcttactctgagactcgaacaatcagaccttttgtaagtgggaacttgttgcctgtgagggagaccattcaacattccaaattgtaactctttttaaaattacagttttgatactttgaattagcctgagcttttgcttgccaaatggttgtgttttttgaaagacttatcacaaaagatctttctggatgtaatttagtggataaaaactatgtgtgggtagcacaatcatgtgcttgcaagttctcattgcaaaagacctggccacaactaaatgcccatctcagcttactcatatgatccacttacttaaaggaacctatattccccctacaaatagaacaaaaatattcctagtggatccactcatctgtgtttttattcacactaacagttagtagtgaggtgtctacagattcctctaacactataaatggcagctatcctggccacagccattcccctgggctgtctgcaggtttccagagtgagagtcagcagtagagatgagaagagacggcaccactgagggctggagtcctggaaactccctgcccttcaatatacaagtgatttaatggtgagggactcaagtttcctcaaactagacgtttctgttcccatgactgtttttttttgttgttgttgttcattaagagacttaaaagatgaacttccccattatctaaccctgtagtgtaacaactgtttgatgccagtgaccgccaacttcagtgacactaaggccttcagggacaggcttagaaactgtcccaaatgaatcacaagtatggtggcaagagctcctaactttatgaaacttgaaaacaataaaagcgcaatgggtacttctaaaggagagtgtttagatgtctacattgtgaaagacaagcttgcattcgatacaatcataattaagtgaatgtttttttaactcagggaatattcagaaaataatgagaactacattgaagtgccattgatttttgatcctgtcacaagagaggatttgcacatggattttaaatgtgttgtccataataccctgagttttcagacactacgcaccacagtcaaggaaggtatgtatgtattttggggagcactataggagaatataacatgttgaatgttccatggatactagacaaatctacttgttctccaaatgattccatagaaattcccttgcattgtctgctagtggagagctgaaaagaaacctcccatttttaaagagttttggtagggtggaggctggactttgggagattatactcaaatgaaaaatttaaatagcaagctgatttttggaaaatggatgaaatggttctacagtaaacttcgaaatactctgtctgcatgtggctctgccttgggtcactaatcagctgtcttcgcatggcctctagaagagggtggattgttctttatcctgaagatgagaaacttcatcctctaagagctggggattgggagctacccagggttcagggcagctttagggtcaaagtcattatatgaccggaaataggtacaaggctacagccaaatcaacccagtgttcatttaaggacatttaaaaagaagaagaggaaaacccacattatcatttttgattaaattgatttcatatcaatgtttaattgttgagcaggagggagagctgccttgaatgtagtctctgttgacagcctgtagctaatggcaggcaagccaaagtgattcccagcatctcagtgatggctcgtggacaatcttacagcaataacataaatacaaattgctccaggtctccatgttttgctggggaggcagccacaaacacagtgtaaactggaaagccaatgatgtgttccagcctcaggacagggaatggcacccaactttcctccaactgtgcgctgtgcaccaccagcctcacactcacctgagccactggtcacaaacacagatctcaggacttactccagatccaccctgtcaaatattcctagggagaggctgcagcctgtgacacaaaaagctcctttcacagtgaagtttgagaatgagggcacacatgtgaagggtggcgtttcagatcatttccagatgagcaggctgggagagatggtggttgtacacatttacccacaaaaatcagaatgttccctctcggggtcagattagtgagcccaaggaacctgtggtttgtctggccctgatgctgggaacctttaaaattttccataacatgagccttgtccctgcatgtggctggccgtgactgatccagggaacacaggctgtaagtctttcaccaggactgagaggtgtattcaaacagctgcccagaatattacagctgaacttatttctaatctttgtggggttttaaaatgtgagaatcctctggagcaacaggctgaggtcatgtcgattcctggatgactaaacagactgtgatagataatagcttaaaaatgcaggattctagtctcatcaacaatgtgtctgataacactctgttctcacatttgctttttaactttttattcagagtctcttcctgtatttccataacacagagacgccaaggagcagaacataaaatagctggacccaagcaatcgtgttggcccctgcagctccattattcaaaatttattttcctttgctacttcctttgatcctcatgacacccatgctcattagaaaagggcagattgttcctggctctgtcacagttggccaactgtgacataaacagacagcatcttaaacgcacagtgtcccactgttggaacaaagttaaaccctcagcacttgcccacttaccctacgatgtttctaacagattttgccctatcacgctcgtttctctaatgccacagacatcactctcaaatatcctccatgttggtgtgagggatgtgctttctgaaaatcaatgcacatttatcaagaaaaacaaactccaatttctttcttatcttgtacacctgcattgccctgtcctcttgtacagtgagagactgttcagctcctgatgtgactctgttcttcccacagcctcctccacgttctcctggggcattgtgctggccccactttcactggccttcttggttttggggggaatatggatgcacagacggtgcaaacacagaactggaaaagcagatggtctgactgtgctatggcctcatcatcaagactttcaatcctatcccaagtgaaataaatggaatgaaataattcaaacacaaactccgtacgtcttctcttatggaagtggctgtgtctttttgagggactctgttctttgcctcagttgtctaccaaaggtgccacatttatagtggctttgtagtaaaggactaaagtctta

SEQ ID NO: 577 - DNA, 1975 bp, Homo sapiens
gggagtgcatccgccccaacccttttccccctcgtctcctgtgagaattccccgtcggatacgagcagcgtggccgttggctgcctcgcacaggacttccttcccgactccatcactttctcctggaaatacaagaacaactctgacatcagcagcacccggggcttcccatcagtcctgagagggggcaagtacgcagccacctcacaggtgctgctgccttccaaggacgtcatgcagggcacagacgaacacgtggtgtgcaaagtccagcaccccaacggcaacaaagaaaagaacgtgcctcttccaggtgagggccgggcccagccaccgggacagagagggagccgaagggggcgggagtggcgggcaccgggctgacacgtgtccctcactgcagtgattgccgagctgcctcccaaagtgagcgtcttcgtcccaccccgcgacggcttcttcggcaacccccgcaagtccaagctcatctgccaggccacgggtttcagtccccggcagattcaggtgtcctggctgcgcgaggggaagcaggtggggtctggcgtcaccacggaccaggtgcaggctgaggccaaagagtctgggcccacgacctacaaggtgaccagcacactgaccatcaaagagagcgactggctcagccagagcatgttcacctgccgcgtggatcacaggggcctgaccttccagcagaatgcgtcctccatgtgtggccccggtgagtgacctgtccccaggggcagcacccaccgacacacaggggtccactcgggtctggcattcgccaccccggatgcagccatctactccctgagccttggcttcccagagcggccaagggcaggggctcgggcggcaggacccctgggctcggcagaggcagttgctactctttgggtgggaaccatgcctccgcccacatccacacctgccccacctctgactcccttctcttgactccagatcaagacacagccatccgggtcttcgccatccccccatcctttgccagcatcttcctcaccaagtccaccaagttgacctgcctggtcacagacctgaccacctatgacagcgtgaccatctcctggacccgccagaatggcgaagctgtgaaaacccacaccaacatctccgagagccaccccaatgccactttcagcgccgtgggtgaggccagcatctgcgaggatgactggaattccggggagaggttcacgtgcaccgtgacccacacagacctgccctcgccactgaagcagaccatctcccggcccaagggtaggccccactcttgcccctcttcctgcactccctgggacctcccttggcctctggggcatggtggaaagcacccctcactcccccgttgtctgggcaactggggaaaaggggactcaaccccagcccacaggctggtccccccactgccccgccctcaccaccatctctgttcacaggggtggccctgcacaggcccgatgtctacttgctgccaccagcccgggagcagctgaacctgcgggagtcggccaccatcacgtgcctggtgacgggcttctctcccgcggacgtcttcgtgcagtggatgcagagggggcagcccttgtccccggagaagtatgtgaccagcgccccaatgcctgagccccaggccccaggccggtacttcgcccacagcatcctgaccgtgtccgaagaggaatggaacacgggggagacctacacctgcgtggtggcccatgaggccctgcccaacagggtcaccgagaggaccgtggacaagtccaccggtaaacccaccctgtacaacgtgtccctggtcatgtccgacacagctggcacctgctactgaccctgctggcctgcccacaggctcggggcggctggccgctctgtgtgtgcatgcaaactaaccgtgtcaacggggtgagatgttgcatcttataaaatt

SEQ ID NO: 578 - DNA, 50698 bp, Homo sapiens
aggtgggaaggctaaactgaggaattatgtctgacagaagggaatgacaaggctaaactgaagaattatgtctgacagaagggaagaaatgactgcagtggccttctcagaccctgtaggaaaggactctacttatccggtgaaagtgtctacctagactaagaggtattttagttatcttactcggggcatgttgagtaaagctaatttgccagtcctgggttggggcaaatccttgagcttgatgtgtagggaagggagggggcctgaataatccatgaggagtagtagaatagcagatggaacactgagaagttatttctttgaggatagatttccacaatggaaaggaaatgagaggttctaagaggcgggctagtggcttgtactatagcatagcctgcctttgctggtgtgtggcgattaggcctggtggaactgccatcaataaactaagtgtgatcagggtgagaaacagggaagaaggaaatgtggggaaatggggtgaacgtcaggtggatcagagagataaggtcatgagggtcaagtgtggtatctggaataatgtgggaggccggattgaagtccggggcaagaacaatggtaattgtggagacttaacaaagagtgagtacagctgaaggagccgggagcagaaagtatatgcgtcaggtgggaggaagaaaatagattttggaaattatgagagctgtagagagtgagttgagcatagtttgtgatttttagggcctctaaaagtattaaagcagcggcagccactgcacacagacatgagggctaggctaaaacagtaaggtcaagttgtttggacagaaaggctacagggtgtggtcctggctcttgtgtaagaattctgaccacactaaccatgcctaggaaggaaaggagttgctgttttgtaagggattgaggtttgggagattaatcggacacgatcagcagggagaacacatgtgtttttatgagaattacgctgagataggtaacagatgaggatgaaatttgggcttgactgaagtaatgggggctgtctgtgaagccttgcggcagtacagcccaggtaatttgctgagcctaatgggtgtcagggtcagtctaagtgaaagcaaagagacgctgggacgaggggtgcaggggaatagtgaaaaaagcatctttaagatcaagcacggcatagtgagttgtgaaggaaagtattgaggacaaaagagtgtacgggtttggcaccacagggtggataggcaaaacaatttggttgataaggcacagatcctgaactaatctataagacttatccagtttttggacaggtaaaatgggggaattgtaaggggagtttataggttttagaagcccatgttgtagcaggcgagtgataacaggctttaatccttttgaagcatgctgtgggatgggatattggcattgagcggggtaagggtgattaggttttaatgggatggtaacgggcatgtgatcatttgccagggaagcagtagagatatcccatacttgtgggttaaggtgggggaatacgagaggaagacgcgaaggaggctttgggttggggagaagggcagcaatgagatgcggctgcagtccaggaatagtcagggaaacagataatttggttaaaatatctcagcctaataagggaactgggcaggtggggataactaaaaaagagtgcataaaagagtgttgtccaagttggcaccagagtcggggagttttcaggggtttagaagcctggccgtcaatacccacaacagttatggaggcaagggaaacaggcccttgaaaagaaggtaatgtggagtgggtagcctccgtattgactaaggggacggacttaccttccactgtgagagttacccgaagctcggagtccgtgatggtctacggagcttccgaggcgatcgggcagcatcagtcttcagctgctaagccgagaaggagtcagtcagagagccttgggccagagttccaggggctctgggagtggctgccaggtgagttgaacagtctgatttccagtggggtcccgcacagatgggacacggcttaggagcaatcctgggctgcaggcattccttgtcctggtggtcagatttctggcacttgtagcaagctcctgggggaggaggttctggaggaacgcctggctgctgcagttcaggcgtttggaagttcttgggtgctggagatgtggctggggtttgtctcacagtggaggcaaggaattgcaacttttttctattattgtacaccttgaaggtgaggttaattaaatcctgttgtggggtttgagggccggattctaatttttggagttttatttaatgtagggagcggattgggtaataaaatgtattttgagaataagacggccttttgaccttttagggtctagggctgtaaagtgtctcagggttgctgccaaacgagccatgagctgggctggatttttatatttgatgaaaaagagcctaaacactatctgatttgggataaggaaaaaggagcattaaccttgactatgcctttagctccagccacctttttaagagtaaattgctggtcaggtgggggagggctagtcacagaacgaaactgtaagccggaccgggtgtgaggagggaggtgataaaaggattatagggtggaggagcagaggctaaggaagaattgggacctagctcagcctggcgaggtggggagaggtcagatgggtctgtagaaaaggaaggttagaaagactcacgacgcttggggttgggactgaggggacaggtgggagggaaagaaggaagagttgggacgagttgcactgggcacagagactagggagggaccgatatgtgaaagaatgcctggacatcaggcacctcagaccgtttgcccattttacgacaagaattatttagatcttgcaggatggaaaaattgaaagtgccattttcttgctattggaactactgttgagtttgtattggggtcaagcggcattgcagaagaaaataaggcatttaggttttaggtcaggtgtgagttgaagaggttttaagtttttgagaacacaggccaagggagaagggggaatggagggtggaaggttgcccatagtgaaggaagcaagcctagagaaaagagagagtagaggcacggagggaaggggttcgggggttcttacgttccagaaaagtgggaaagaggttggggcatggatataaggggttggggcgcagagataagaggttggggcatggaaataagggatggggtgcagagataagaggttagggcgtggaaataaggggtcggggcatggaaataagtgattggggtgcagagataagaggtcggggcatggaaataagggatggggtacagagataagaggttggggcatggaaataagggatcagggcacagagataagaggttggggtgcagaaataagggattggggtgcagagatatgaggttggggtacttgcccctctagaaaagcgggacttgccactaagagtgaaggagaaggggttgggggtttcttgcccccccagaaaggtggagaaggggtagagacagagaaggggttggggtacttgccccttccccagaaaagtgggacttgccgctaagggtgaaggaccaaggcaggcgtccctgagtggtctgacacctctgaaacatgggtgaataatcagagagatgtccctgcaatgatcaaacaacaagggaaggctgccttccctagtccgtgactggccctggagttttgggtccatggataaaacatgtctcctttgtctctaccagaaaatgaaaggaattgaaattaagagaagggagagattgaagagtggaaaggagaaagtggttgagggacagtgagagaggttggagaagagagtaagaagaggccacttaccctatttaaaattggtgagctgttccttgggctggtgggtctgaggacctgaggtcataggtggatctttttcacggagcaaagagcaggaggacaggggattgatctcccaagggaggtcccccgatccgagtcacggcaccaaatttcatgcatgtccgtgtgaagagaccaccaaacaggctttgtgtgagcaacatggctgtttatttcacctgggtgcaggcaggctgcgtctgaaaagagtcagcgaagggagataggggtggggccattttataggatttgggtaggtaatggaaaattacagtcaaaggggggttgttctctgacgggcagagtgggggtcacaaggtgctcagtaggggagcttttgagctaggatgagccaggagaaggaatttcacaagacgatgtcatcagttaaggcaggaataggccattttcacttcttttgtggtggaatgtcatcagttaaggcaggaaccagccatatggatgtgtacatgcaggccacaggggatatggtggcttagcttgggctcagaggcctgacagttggggcctccccctagctcacagaagaggagctagggcttaagggtgagcagcaagtcagcaggtggctaaggttgagcagaggaacccaagggtgtgcctcggctgaaatgctttcttggatgagggcttcagcatcaggattcaggggtagtaacaagggcagactgcaagagagcattgttgggggtgcaggcacactgaacccagcacaaggaggccttgaaccctgacccagaaccaccccttacttagagcagtgacacctcagccacatatgccgagcatctgaactgtggcagctagtacaaaatgcattccgtaaacattcgtggaatgaatgagcagacgaatgaatgaacgtttccgtgtatcaaatgggagtgatattatttactccagctctgccaggggattattgatagggtgaattgagacgatagagatggaaaaaccctctaaactgtaaaatactatgcagatgtaaggattataatgtgaatggatacagttgattgccagagataaaaatcatcaaggaatcagctggtgatggtgtagtaacttccctggactgcaagaagcagctttaattggagctcttaagggaaatctcttcctccatcgtcgaattagtaggactattaccactattattgaagacatttttaaatttttttacatcactgaatggaacaaatcaagcaagatttcaggtgataagaaatagcaggaggattgggcacacagcgtggtgggaaaacttaagaagggtcccatcttagcattccagatgagacttactgatggccgagtcccactccctattttagagtgagggaaactgaggcctggaaaacatgcagtgtcatgatgctcacctggattaagtaataatcataacagctcacattatggactgaacatctgtatatatgaggttatttgattcatacaataaccctataaagtagatactataattatcttcatcttacagttaagaaaacagagactcaaaccaagtagctagtccaggtgtacacagttggcaagtaagggtaacatactaacagggtatctccctgttgccagagcaactggaggtccacagataatatcattgtgggaagaaatatattgttttatttacttggggtttggggaatatttgactaaaatgatgactgatgttggacatagaacgtgggaacccctgcaatgatgtctcttacctgggagtgaaaacatgtgcaaggactctcttggggtttagaaaccaatcagctcaagtcaggccccgcagaaaggagtgcactataattcctgagccctcctgctccctctctcattagctgacaccatcaattcaaggttaatgcacgccgggtttgggagctaattattccaccattacagatataaatttcccctggagaacagccagagatgggagctggagagaagagaaagaggctgaggaaggaaagaggccgcctagctctgacagatgggaaaatagcatgtcatcatgggtggcgggcttcccgaccactggagcatgcctccaggaaatctctgcatctttcctggttgtactccaggctgactgctctgcccacactcctatttgcctggatttctggcagtcgctgagcccccacccccatctgtcagccttcatggttcctaaaacagcttgcagaacactcttcaattccacaatttatctagtccctagtctatgccaagcaatgggatgcaggacatggggggtgccgaccacagtgattaataacacatagtccctgacttcaaggagattttattactggggaagaaaaatgtgcattcaatcaactctagcacttggctgtgttatggggacaaagtgctatgggacaaaagagagtcacttgagctaggaggttctgaaaaggaagagccatttgaagtgtgtcttgaaggatgagtacggtttcaagagcggggaaatgggaaagggcgggtattactccaggtaaaagaaacaaaagcataatggcaaagaaggcagaacttgcttgctgtgtctgggatgtaggttaaagcatgctgaaagtgagcctgtaatgggagtaaggactagggaaggcagctggaagagaccatgaagggcctgaacgagcatgatttggaatttagaacttctattagaggcaatggggagccactgatggcttttgaggaagggagtgacatgatgggatctgcattttagaaagagggtggggtggggtgtaatagaggggagcaaatggagggaggcaagaggacccagcttcacgaggagctcttacattaagactccaacaggaagaagggggaattgcaattagtggatgtgttggtgacctcgtaaaaggaggtgaccttttaagatgagagaagctttcatccacccattcaagttcatttagtgtctttttttcgtgaagattcatttagtatctctttttcatgaagacagctcgagccagatttctggccaattgttctggctgggcatttctgtgtcttccttagggtgtcttctggagcaggctgcccacttgccagggcaggtagcaggcagggttgtttggcctggaggcctctcagggtgagtgatggaaaaattcatcgtgggcaggtggagggcctgctcaggtggggagacagcaggtaatgggtgggtggggtgagcacagaggctgctgcagcccagccctgctcagcggctaagggctgggggacaggggaatgagcatgtcagctcagcccctagaactggctgccaaccgagggcaaagagtgctgctccagagcaggacagcaaggcagggcacagtcacctgatcatccagcctctgagaccctggcaactttgacggaaagcgtgctcggagcagcctggggcagtggcccctactatgggtttgcacctgcagagaagagatcagctcatccagtgaagagagaaaggctgggctgagcactccccatggaacttcgcttctggacctggctcttcagtgggctatctggggacctctcatgggtgtattgaactcctgaggcaggcaggaaagcatcaaggcccagagatgcttgggactgggaagcatccttcaccatctccttctggagttccttgacattgttctgtccaaacaagggtggcagattcctcaaaaacctagagcaaggcagagcaatactggagaaaagggaagtttcacttgtggttgtaggcctttctaattttcagatggtgagtgcacctaaggatgtacgttcagacacgtttacagatgaaatgctgtacctccaaatcagcgatgccccatcatcatcttgctgaaaaccagaccagagaggaaagtgtaaaaatgctcatgagtggatacacacacaaagacacacacacacactctccacgtgccctgtgtccaacgcagatatgtttgaatattcaggatgggaggattgaggaagatgatggactcagaacccccccttacatgcacatgaagttcaaagggaggaaggcctgggcagagcagggttacctccaaagccaagagatcagggagacgctgggatgtagatcctgaaaaattttggcataggcgaatgtggaagtctttaggaagaaaaggaaggtggacgttcaccgtggatgcagaggatgctccggaaggccgcggtttattaagcaccttccatgcgccctgtgttgggctaggtgctttaaagtgaaagctgatgctgacaataatcctgtgacataggcatgattattgccttttgcgaacgagaaaaccaaagttcagaggcatcagggaagtgatttgtccggggtcacacgcagagctcggatatctttcaaaagcccacgttcctctgtctacaccaggagttctcaatcgtggctctgctaactcttttggctggatagttctttgttacggaggctgtctgtgtatcacaagatgtctagcagcaaccttggtatctacccccaggtatgaatagcacctgccccctaaaattgggaccatcaaaaatgtctccagacattaattgctacatgtccgctgggggaaaaaccacccctgacctaaggccactgctctgcacctgctactccccaaacaaaggcatttaggattcccacccccagcagtccagagctggtgcagctcagccctcctgtgctctttctgcctgtaaagtgatcatcccacagcctgcacccttcatgagttttgcaaggcaagctcagtcaatgctaccatgcccaggctcaggtcctgaccctgctgtgtggggtggaaccatctgcttctcctgtttttaaaaaatggggggctggtggtcctgaccagcagttctcaaccaaggatgtacatgagagtcacctggggagctgttttattgttttgtttctttgtttatttttgatattcaaaacaaagatacacttgtcctgtcccagtcctcctcatgcccagggttgcactctcctggttgttacgcctggcccgaatcatttccagggctcatttcagccccacccttcactcctgagctcccttggattcattcactcacctcccaattttccctccgtgtgccagatgccagtgttaaggaccggggctcagacagggctctcagtcaaggagtgagggacagggaatgaacatgccatggcacagggcaggacctgctgaaagacagacaggcccagcagcgtagagaagcggtgagcagctgctgtcaaggggagggagtatggggctgaggcaggtgtgtgatgggtgtggggaaggaggggtggtggggcacatctgtgtatgtgagtggtggtatttgggagggaatacgggggtgtgtgcatgtggaggggaaggggtttatgggtgtacgtgcatatgttatatgcgtgtgactgaatagtgtatatggtacgtgtgtcttgtctgtgtgtacaactacatgtctatgtgaagaatctgggtggtgtgtgtgtctgtgcccttgtatgtgcatgtgtttgtgtgtgtgtatacaaggtatgtgtgtttacagagtatcttagtgcacatgtgtgtgtagagggccaggcagcaagaaggcctcccagagaggacaatctttggcctggctcttggaggaggaggaacagttcagtaagtggaaaaagaagggagaggccttccaggaagagggacaggcaggcagggtgtgtacaggcagaggtgtgactgagactggcatgtgtggggcatggtggcaggggggtgagggggtggcgaggagatgggggcacggatgggagaaggtgaggactcagtttgcgggggcacactaagtgtgcctcactggagccctcagcgcccctttagaatttgaggtgggcttgccagagttttgggaagatggcagcagcagcagggcagcacctctgggaagtcccgggaagaggcctggctaggccaagtcagggccacacctgagctggctgcaggactgtttacaaagcaaatgcatactggagggattagcaacctgagttcttggccagctgaggtgggtcacacctgtaatctctgcactttgggagtccgaagtggaagggtctgtgcaaatcaagcctctccgccaaatcacctgccggcttcccacccacccccaatccccacctgaagccaggtgtctctaatctctactcctgagcatgaggaaatccagcacaaccccaccaccaccagcaggtagagcaccagctgtaaccagggcacagctcctgagccagcgggctcacttttcaatctggttgtggagcaggacactgagaagcagcccacagagctgcaagagttcaggctgggaggggactcgaacctgccgtcagcctcactggttgtgcctccttgggcaaggctaccccctggctctctgttcccaagtgggaatcctgaaatgccagcagcattgagttgctgtgattcattcaacaaatgtgtccccctaccgtgtgccaggcactggaatacagcagggagaaaagagataaagaccctgcccatgtgaagcttgtgcactacggggaggagaccaatcaataataaacataacaaatgactcgactgtggaggctgctagaaggagatgaggcagggaaaaatgagaagagcagggtatgggggacagaatggctgtgatggcgaatattggaatatgaaatgtgactgacctgtagaggcagttagggaaatgctgattttgcaaatgagatcctgtcatttccaacatggatggaactgggggacatgttagatgaaataacccaggcacagaaaagctcacttcccaggttctcattcatttgtgggagctaaaaattaaaacaatttaattcacggggatagaaaagtagaatgatggttaacagaggccgggaagggtagtggggttggggggatgtagggatgattaacaggtacaaaatatgcaatgaaagcaatgcaatgaatatgatctgttattgatagcagaacaaggtgactacagacagcaataatttgttgtacattttcacataactgagggagtacaattggaatgtttgtaccacaaggaaatgatgaatgcttgaggttatggagaccccatttaccctaatataattattacacattgcatgtctgtatcaaaatatctcatgtatcccatcaatatatatatacctactatgtgccataattttttaaataagccatgctgaaaagggctcaatgaagtgacaaacagaatgaattattttcccttactaatccagtcaacacctgctatgcgtttggttctatactaagaattaaggatggatgcaaataatttctgtaggggctcatagtctggtatggaggacaggcaaggatacaaactaaggatcctgtggttcatggtatggtgggtgctatccaaggggtcagcctagaagatgaggagaaaacctggttgggacaggagggcctctgagggacctactggggttggcctgatggaaaagagggagaagacaaagggcgttccaggcaggggaacagcatgtgcaaagactaggggaaggtaggggttgaaaaaaaagaaaccgggtgagccacctggcggcagttggagaagtgtgagtagttcagggtgggttgaaactggggagtcacagagtagtgatctttgggaccgtatcctgaaatcttttgaataccatgccaaaggtgttccggctttttcagaaaaataaccactgaaggatctttaagctgggaagtgatctgattgtagtagaattccaggaataatgctgaccagagcacaatgagggtggaggaggggagcaggaatagaacagcattccttcttttgggcctccttttaatgtcacctcttcgaagagacattctattttaggcccatctgaatagaaccctcatcatgccccgtcatcgttagccagctttacatttctttatagtgcttattcctacgcaacattgcatcgacgtctgtatacatttctttattttctggtctcttacctataggatatacatttcacttaagcagggactctactcacggctgtgtcactaacacctagaaaagcacctgacacacagttggctctcaaatttttttgaaaggaaaaagtaataaaattaatggaataataaaattccattaagaaatggaaaactttgctgtgggcctgtttttatctgaagtggttggcagctgggacttgggtttgccctgaggctggtgttgagctgctgtgaaggtcagcaaagtgagccccagcccatgagatctgtatcccaaggctctggagccaaccaagcaggctgatgctgctgcagaaccctgagaacccagtgctgcaaagatcctctccatgtgtgctgactctagccctttggggctggaaggcttctgacgctgggtgccatgccagcatcttacaccaccaaatggttccagggagggtgcaactggctactcaaggccctgggtctgaaattacagatcaaaaaatacattgtgagcaggctgtggtgactcaagcctgtaatcccagcactttgggaggcagaggtgggcagatcacttgaggttaggagttcaagacctgcctgggaaacatggtaaaccccatctctactaaaaatacaaaaagtagccaggcatggtgagaggcacctataatcccagctactcaggaagctgaggcatgagaatcacttgaacctgggaggcagaggttgcagtgagccaagatcgtgccactgcactccagcctgaatgacagagcgagacaccatctaaaaaaaaaaaatacatattgagcacaccctgtaccaggcaaaatgtaagatagcctacttatactataaagtaggtatgttatccccattttacagaagaaaaactgaaactgagaactgaaacttggtgatttgccaagatcacagagccaagaaaccagaacccaggtttgactccaatgcctgtgttctgtttcactcagccacgtagactgaaatgtccaatgccaaacaagacccaccatcccagagccccaagctcggctggcctcaccaccaagactttccatcttctgtgatacacagaccctcagaccccctcatctagcagcacccgttagctcccggggaaaatgccaagccagggtgggcagggtcaacttggtgaatgaaatggagaaataagaagccccattcagctctaaaacatgctgtagaagatgcagaagtatatttggaatcaagaacccctggaaactgaccagggaagcattttgataaatgaaactaatgtatgtattgcctgaccctctggcaatggcattaatgctttttcatttttttaatgtattatttatttgagttgagggaacgtggtaaggctgggcatgctgagcctgagctctttacagtgggtaaagtgatgctggggacttggtgaggttgtttcctgtaatggttcccagtctccgcggctgggattacagtgtcggccacagatctttcgtccaggccgcccctccctggaagcagcttcccacggtgcacagtaaggggtgtggatggtctgtcctcagcagggactcagcctgctttcggtagatccaacccactttccctcaatcgccctgtggcccacagtgccagtgattgtgtttgtgacttgaggtctttaataacctcagcttctgacagtcttctaaaggtgccagtgacttagcagctcagaagaaaaggctgattgagagaaaaagaacaaagcatcaagggttggagagagtgggtggagacctcccctggctttgggggttctcagactgtgggagtctggctgaaccccaagagttatgaaagattccaagtctaacctgaggtttatgttagcgtagctattccagtttcccaggatttgagatggggaggctgctgacgaggtggaaggccagccctctgcttctcctccagtcaggacccatttgcctgggctaggggttcccacagggtgttccctgaatccctgagagagctctgcccccagcccctgcccagccttcctgcaacccctgagagagctctggccccaggccctgccctgcctcccctgccttcctcaacacatggctgactccttcccaccctctaggaatcagcttaaatgtcacctctcgaagagatattgctaggtcattccatctaacctggccagccctgctccattttttgtatttcagagctcttatcacacactgtagttaaatttttctttctttctttctttcctttttctttctttctttcttttcttttctttctttgtctttttgaaatagagtctcactctgacacccaggctggagtgcagtgacacaatctctgctcactgcagccttcgcctcccaggttcaagctattctcatgcctcagcctcacgagtagctgggattacaggcatgcaccaccatatctggcttatttttgtattcttagtagagatggggttttaccatgttggtcaggctggtctcaaactcctgacttcaagtgatcctccagcttcagcctcccaaattgctgggattacaggtgtgagccactgtgcccggcctaaatgtgtttcttaggtattgtctgcctccacctctaaactgtaagcttcaaaggaaaggccaggtgcaactgaagcagcattattccaccagcacttagcacagtgcctggtatggaatgagtaggtattcggtaatatttattaactgaatcaacgatgaatgaaatgagagctctaccttatagccatagtcctcaaattttagagtcaataagaattacctggggagctgattgacattcagattcctaggcctcatttcttgatcttctgattcggtaggtctggggagatgcccaggaatgtgcgttttaacaagtacacccctggtgattctttctgacagaagcacctctggacaggccacatcttgggaaacactgccttacctgcatggtttgtctccactgcagtgacatcgctgagaaatgagttttcaccacctgccattgcctttttctccagtcctttaagcatctctagaatctggaggtttatgccttggagctggggcaatggcggggggtgtgggttgtgcagtgtagcaagaggaaggtatgtatttattattattagaaattagaagcaggccgggagcggtggctcacacctgtaatcccagcactttgagaggccaaggcaggcggatcacctgaggtcaggagttcaagaccagcctggccaatgtggtgaaaccccatccctactaaaaatacaaaacttagcagggcacagtggcacatgcctataatcccaggtactctggagcctgaggcaggagaattgcttgaacccaggaagcggaggttgcagggagacgagatcatgccgctgcactccagcctgggcgacagagcgagattctatctcaataaataaaaaacaaagaaattagaagcaaatataagaagctcgtaatacactgctgttgcccaaatgtgcagataccattgatcgcatttgttcattggctcagtagactttttgaagacccacgatgtgatcaaggcactgacttcaatattggggatgaaacaattaacagaacaaagtacctgacctcaaggagccctagctaagccctagcttagtggtagagacaggtaggtccgtgactgttgagcccagtaaggcccagcaagagcactgtacaagggcagcacaaggagagaaagttaccaagggaagtcaaggcactccatggaggagagaacatcagggccagttttagtttagctaaagcttcgttggccaggaagaagatatcacagagcaaagttagcacaaactaggaatgaccacaatgcacagagtgttcgggaggaagccgcaagggacctacctggagagatgcacagcgttttccagagaaacaaggttggtcttgacctgctccgaacttaccattgccagcccccacataggatccaggccacagcggtattttttgtcacctgtccaggtttacattttttcagattggaatgtttttagccaaagaactctcctgtttaccacggttcccaccagtcgttacactcagccttcatgcatcacattgcctgcccagcccctgaagttgcccagcaactagggctggcaccctttgctacccactcacctcaacacagagctgaaatcagagaagtgacctgatccgctctgggtttttacgaagatcggcctggtgattgtcaagaggggaatatatttggaagttgaaaaaacagtcaggaacttcctcaatagcctggcccaactgtctccacactttgatcctatgtcctcaacctgtgtacattaatttatttagagactgtcttatgtcctaatatatggtatgtgtgataagatatacaaaaaaaaaagcatttaaatgggtgagataaagatgaaagatgacataacactactttttaagcttttattttgttaaccatacccaggaaaacccttttcactggaacaaatttttatgaaaactaatatttgtactgaggttgttatgttttatcatgtttgtattattttcatattaagcttctgcattatgatatttagaagactagttttaagttcaaattattttgatatttagttctaatcactttcagaattgaaaaaaatgatacttcactaaagtgcagaaatccaaatggaaaaggcactaactacattggctgtgcttgctataataataatttttctatcttaccaattatgcaaattgtgtctaaattcagttaggaaatgtcatcttctctgatgtcgatcaattgttcttccacatttgccattggcacttttatatttttaacaagagtttgaaaactcttcatttggaagatgtttaattaggtgacgatgagtgaagtgtcagtgctaccattttcttgctgtttccattactagtgttatctcctttcagtagttcatttttgcaataatctttttttaagccacacatcaatttagggttaatttggtgaaaacaaatcatcaatccatttaacctggtcccaaagcaaaggattgcaagaccaagccctccatgttgtaaagcccccactccatcctcaggttcacgtggcttggcccagctatacatgaccttggacagtcttcctatcacactggtgagcagccagtatccatgcacatagtaaatattagtaaagtacaatatctctcccattgtttgaagccatagaagttctaatattttctcctataattcaaaggctcatcttgcacagagccattcaggcctctttttggagatgcccatttctaagatgaggagttgctgagccaggcgttgggagataagacagaacaaggtatcaagagtgagggtccatcaggtgttgagggtgggggaagaaggaagatgagagggttgagattgtcctagacgttccagctgggattgcaggtgagaagggtattcagttctgacaggcagtatttcctgggaagcacaggtgcaaaaagtaatcttttcccactacagtgtcccaggcaaggggaagacccacaggttttctctgtcctctgctttagttgaactctgtttcactgtactccccaccattattgaatggacttgggtaagcggctgatttgaaattcaaagacctggattccagtccatgccgactccaccccttaatagctggctgactagcacagcttcctcatctgtaaaataacaattttttaaaaagccctgcctgcttcacaggattattatatggctcaaagataaagcatatgcacagccaaaggctctgaaaactgcaaagcactatacaaatgtacggtgttattatgacttagtatcctgcatgcattatgattgaggtacaaggcaagacatatctatgtcctcttgcctttgtttttccgggacacttaggagagagtatgaccatgtggagtaagaggtggacactgagatcagtatcctgtgggcagtacatctgaacatcctgaacgtcctaacactgaccttaggcctcctgagaccagaggtcacacttggaaatgaggtgtggtgcagaggttgctggggtttctggatccacggagcaagaatgcctgggaatactggagaagaacctagttttcctggaaattcccctcccaggcatttcttcacttgatctgaagaaaatctaagaagaagccaacactagaatgaagcattgtttgaaagtgggagataagacgccttatcatacctactttcacttaagatctggctttccctggccaccaggggtaatcagtctcttaacatatttactggatgtctacatagaagtacaattcaagccccttgcaatgaaaatactaacaatatgattgggaagattaaacacaggatagacagattgacagataatggtgatgaagatagataatagatagatatctggatggaggtttggatagataagcacaaacttgacaagacactacaccatcaggagaaaaagaacaatttgttgagcgtctacaatgtgccaggtcaaggtgccaggtgctttcagatgtgttaccacatctgtcattgctgactccttacagcaatcctgtaaggaagcatcagccccattggtcagataagaaatggagacccaaagaggttaagcaacttgtccaggaccatgcagctagccagcccatgttccttcatctaagtctcactgttcctgggtcagaggaaaccctcccacccccacctcccagctctgaattgtctttattactctggagcctttgttctgtgtgagaatatcttaggctttttgagaaaagccccagatcactgtctattcattgagaacctgaaaccggctcctcagccattcctgctctagccaccagcaaggttcccaagtgaaagtgagtcctctcaggagaaatgaaagcgctgtctctttaggtgcccactccttacccaccagcggagcaatgttttccaggctggccaggctccagaagctcactaaggaagttggcttggggccaaaggcatctatggttcattgtacactgtggccctccccttcctgcccctccatttgctccccttcctttctctctctcccttcccggctcctagactgggtctaggcaggagcttcgccatgatgtcaggagggaaggagatgcctctgggcctcgtaccacagcctcagctctctctctgcccctccatctgagtccctcctggctcccagctccctcagggtgcaaggccaagcctccaaggaatccctccccttacctgcatggctggagccaagagtgagtttggggccactggctatgatgaggggatgacccagagctcagtgagcactgtcgaagcacttctgttaggaggtttggttggccagggaggaagaaggcctccctctctgggatgctcctgaaaggactctgtgggaagttaaagaatcctctgtgtgagagcaggatgggggaaggtggagggttggagaaatccagcccagtgtctctgtgtctccccgcctcctcctcctgggcctctatcctctgtgctcttggcctctatgagtctttttgaaacttcccaggctggaaagcactaggtcctgggatatgaaagtctcttttaacatagaataggccttctgttgatcccaaagatgctcttaaaatacacaacaagaaatcggagttttacacacagtcagcttctcattttatagatgggaagctgaggcctaaggaggtgaagtggccactatagccattccattgcaccagggtggagggctgtccaccaaattcagagcccggcatagtgggtgggggtcacccactttatctgactctcatgggtccttgatctcaggggtcttttctggcagaggtctgggagcatgactgagacatgatctcagaatcaaacccctggaggcagtagctatagcaggagctgacgatctccagaaactcaggaccagacgatctccagacactcaggacaagtcagtgtccccaccaaggatggggctttgagaggctccgcccacctctgtttctgcacagcaggtttagcagctccattcttccccagagagccactccatctgagggtggctgcgtgtccacatacgaggggacagggctgaggatgaggagaaccctggggacccagaagaccgtgccttgcctggaagtcctgcctgtaggcctgaaggacttgccctaacagagcctcaacaactacctggtaaggaaactgctggcccctccaggtgtctggagagaggggagggagggagatccaaatacaagccctgctgggaccgagggagggggcaggcctggactctgctgaacacctaatgagcatcagggagcgccactgcaggacgagcagcagagccaagattagagcccctgctgtcctcactacagccacagtcattcacccctgtgcagcagctggccaagaccagcagacacagggcacgcgccgcaccactttatcttctgggattttcttaagcgggacccatggcaataatgcctttcctcaccttaacctaattcgggctctactcctgctttccaacaaatgattctgtctatgctgaagtgataaggataggaaaactgtgcctgcataggaaggaagctggaggtgacaagttggggttgggggtcactgtatttacatggtagaaattctgggaatagagtagaaacggtagtagaaacttgcacatattggaattatttctgcttccagcctgggaagttttcaaaagagacatagaggccaagagcacggagtatagaagcccagtaggccaagccaggaagaggcgggggagactgggagacattaggctggatttctggtttagaaaaaggtgccatcagctccctatgtgaccttaatgccctgtgcctgaccctgtacttcctgaggtggtgccagttagctcacactctgagtggcacctggggtgtatatagaaatagaaagagcttgagatttgggttctattagtcatagtggaatcactgaattcccatggaagacacggaaggcagaggagaatgaaaactaatgtttattgaatgctttctattcccatttgtcagatgggaaaactgagactctgagaggttaaatgactcgggtgtatcaggatccagagctcaaggtctcctctacaagtggaggtaggagcttggccagagatgccctcggggcaggataatgcataggctgcccctactcaggagcctcctagggcctcctgagcaccatgtccctgcagatgcagaaggctaggtggttccagtcaacatctgtgttgcagctttggggacaacccttaggacactgctctctggtggctcagtacctctccactaaattccatcccccagcacctgtaccagaactggtggcctgagcctccattgaggctggccgacacataaatagccacttaacgattggctcgtctaccacagggagtgatggcatcagctgcacttgtcacttgggatgtgctgcggatgcaacactccatcccccagatgggtttggtataaaaaggacaagattcaagtggaatccagttcagcttgggggtgctgaaggccctcctcctaaatgcagggcaaagaaaagggacttggaaaacagatttaaatcatgccacttaactgtgtgacctcagccaaatccccttgcaaatctaagatttgactctaaaaattaacaccttctgggccagcagccatgagaattaaatgaaattaagcaccagacatggcttctaacaattcatgggcatttagaagcctttttcttctcttttcttcccttataaaatgagacgtgtttagcaacttaaccaagcaaacacggtaggatgggattacatttctggctctagcctgggtgaagcttctcagatcatgagactccttagaggaggctgagaggcccagggccaaatgttacatcttcctaacagaagtttggccactgggaaagcactattcaagaggagtcttggaactgaagactggatggttccccaaatcacttgatcgagggccatttcctataggaggaggaggaaatgaggaatatgccaaagtggaaccatgttccttcaggccagaccaggagaaagacacagacagccaagggctggtgggaagaggctgataagcatgtgggagagaggccgtgggcaagcctgcacatctctgtccaacatttggagggcccccactctcctttgtccacctggcaaatgcaactcactcttcaagaatcaaatgaccttttctgtgacttcccttttgacattgccccatcctccctgctcttttgcataccaaatatcccctgtcctctgctcctattagaggatgctgtagggaatgttcattcaccagtcacacatgtctcttcctcactagatgggtgggtgctctggtggtgcttttcacatgcctggttcacaggagaagctcaataaacctgtggaaaattgaatgaggcaatggagggcatgggagctgctccatggacccccttaaactcaatgcttggacagggaaaggacagggattggggagatggactaaaggaagagaatgtgaatatgatcgttggtagatttataatgttgattttataactggtattttcaatgagtgagaacaaaaaagctaacataacagagagcagaatgataagaatttacctgtgtgcaaaactgttcttcactgattttgtaacgtaaaaactttggaaataacagcattcacagtagaagatgtgttctagaaatgttggtacattcagaccatgagacaccttgcagccattagagagaataaggcggattataggaactgacatggaaggtgtcactgatactgcaaaacagcatgtttcatggtgcactcattaagaggagttgggtcagcttgcttagatgtacttttctgcccctcatgtactacttagccttggaaatattccttatcctctctaatcctcagtattctcacctgtaaaatggggagaatggtagtccctacttcaaagagttgtgaggattctagatatgcgtggcacagttgtaagcatgcattaagtgttcaataaatgtttgctataattaagttaaaaaagtaagccgcaaaaagcatgctattgccccaattttgctttttaatttttttgatatagagatatatatgtatgtaaatatatatgtgtatctgtggataaaacaactgttatcggtagttatttctgaagtatgagacaaaagagaagaaatggggggggacttttttgtttttgttatgtttttttaaatagacttcttttttagagcaattttgggtcatagcaaaattgagccttccctacacataaaaccttctttactgtcaacatcccgcatcagagggacacatttgttttcattgatgaatccatattgacacatcattgggacttatacttttaacttctgacttgttgccatttcaacagtgagcgagtattggttttgaaagtaaaataacattaatgagtggctgaatcatgccctaagctccagaatggccagattctagaaagtggcttgtttcacagaagttgccacagagaaggtaatcaacccagggctgcctgagaatggggcctgagcctgagcacccccattctgctgtcaccagcatgacaggtcacaggctggcctgcctggctaccccctgctccctcagagggacgcctgacagcagctcctgaagctgaggaggccgggcccctgggccatgccccacggatggtcctcacatacacaccagctggaaggcttcaggaaacacagggacaaggtctaggaggtcacgacagcagcaaggatcctcgggtcaactaaggcccaggccccagcctgctctgaaggaagagagtaccgggggggaggcagccagccctggattcaaagtctcccctggcactcactagcatggtgtccttcccatgcacctgtttccttgtcgtaataatatagggattaacccgcccaccacacaaggccactgtgaggatggagtgagctctgtgggacagcacctaactcatgacctcctgacactggaggctctcaggtttttgtttcctgtctacatgactgaccccacaagcctagacctggggataaataaaagaatgtctggcttggtcaaggtgagtgtagagttgagagtgtccttcctggtaaagctgggacaaggacagggcaaggatagccttggctcccagcagatatggcccagaggataaactggctgcatttctggtgctgatgaaccactctccaaacaaggtcccagtcttaatttgggatagatttaaaacataatcctggtccaggcatagtggcccatgcctgtaatcccagcactttgggaggccaaggcagatggatcgcttgagctggttcgagaccagcctgggcaacatgatgaaaccccatctctaccaaaaatacaaaaaaattacccaggtgtggtggtacatgcctgtagtcccagctactcaggaggctaaggttgggagcatcgctggagcctgggaagttgagctgcagtgaaccgagatcatgtccctgcacttcagcctggatgacagagtgaggccctgtttaaaaaaaataaaaaattaaaaaaaaaaaaaacataatcctccaaaatgaagtcattcctggagggaacacagggagaaggagctgtaaccgaaaggtatggaaagaggctgcttcctatgcatgctgagaaaatgctgtaccgaccacccaccagagagagaggctggccaggagcaggtgagcctgttgcacggccttccacttaccttgccccctgtttcccaggtgattcctacttcagccccttggtgtgagcagcttctcaacatgaactacagcctccacttggccttcgtgtgtctgagtctcttcactgagaggtgagctttgctacccccagaatggcctccatctgcgttgctttgcattcgggcatgtggtgggagggggcagctcctcctattcacccacagcaaggcaaaacccggtccactcacttccctggagcaccgaacaatgaaacttcctgccatttactctatttacagaacacaagcttccaatatggtcatagatgaatgaacccttatgtttttaaagaagagacttggagggtttccaaattaccatgatattttgatctatggcaaatgggtaaaaaatggagatactaactcaatagctgaaaactaagagatttttctgtaggaatgtcactgctggtacatgggcaaggcacatacacccacacacacgtgggcaaacacaagctcaagggtgtgtacacgtgttgattcacacataaacaagcaaacacaacaaagcccatttcttttccaggatgtgcatccaggggagtcagttcaacgtcgaggtcggcagaagtgacaagctttccctgcctggctttgagaacctcacagcaggatataacaaatttctcaggcccaattttggtggtaggtcatcctctgtgtccaggacatcattcaaagggacgaaaacagagacaataagcagtggagggtttcgggaggttttagttgactccattttctgatctgcagcctgttaaggattggcaatgatggatgaggatggctaccaatgatttttcacactgcctggaaaaaggcacccagcctctccacctgcaagataaaggaatgctccttctcactgtggaggctgcaagagcctcctaacactcacacactgtcgtcctcctgcccccacttccagggtcattattcaatgaattcaccatgcgccaccaggctaccccatctggtcttccccctccagcctgagccctttcagctgactccccaaactgccatctggatgcctcctgggtcattgccctgttggaacacctgtatgtgtcccagcatgctcgcgtagagtccaggcacactaggcccttcccagcccagcctttatctgtctgccattctcatccacccaagtccccgctccttcccctcctacaatgctccccagtgtactcagaatgctccctgacatccctggcctctcctgcctctatgcctttacagaggctttcttcctggaattgcttctttaaacttgactccctagaaaatatcaattttccatcatgtctcagagcaaacgctgccttctctgagaagcctcccctgattcctccaggccccatcccctttcttcacacttccttgtgaacatgcctcaaaatcatagccgttcccattatgctataactgatttcatgtctgtcccggctccaggctgcagccctagaaggagtctgacttcatttccctcactatcccccatagaagctcagtgcgtgacatataacaaattgctgattaatatctgttgaaagaataaagcaaggagggagggagtgaggccaactgcacagctcttcatagcagaaaacaacagaaagagccttggcatttaacaaacctgagtttggctcctagctctcctgcttggcaagtggtttagccttctgtgcctcactgtccctttctgtaaaatggggacatccatctatctcacagggaagactgaatgaagtgtgtaagcctgaggcacagtgcctgccccatcaacagagtgtgggttattttcatcccttctcctccttgctcctcccctcagataataaaaccctctggtctgatctaagattcatgtggtagtccagatcctccgggcagcagatgccaagagctgatgacttcttcaagctatttagggggactatgtctagaagggagaatgaggcagcgggagaggcaagctaggagagctgtcagacctgcaggtctggcctcagggaaggagagagggaaggaagggaggttgggtggaagcatcttagatggaagggcagtcctcagtgtttggaatgaccaccagggagtccttgagctacaggtgcattcagaggagtctcccatctctgtgcctcccaggaacaggccactttgatatccccactgtgttcagtctgtggttggctgtggcccatgagaagtgtggcctcggagcaagtgtggtggtagattccaaagcacagcagccgaggccctcagtcaatcacacctgctcagttggagatgggagagatgcattttcattcagatttgagacacaattaagatgtgagatcctgacattaaagaacctaaagaggctccaatatcccctggttttcccaggccctactgaacacgtatgacaagcacgtgagtctgcacgccttggttagtgccactcaacaatttctcttgcctcccaaaccccaaacaattaagtcagaatacactccttcttgtttgcctactcactggccaacaaggtgcagggtccttgggcaaggagctcattctgagaacagggagcctggggtaggcctaaagggatgtgatgcctcatcccacctggggtgaaaatggggcatggagtcttcagtttaaaaaagggaaaagcacaaccccataccccttgttttgtgcctcttggcacttcactcctgaaaatccctatacttgcatggcaggctggaggcccacggagggccattgctctctgtaatgtctgtgcacccagttttcaggaccccaagtccaaaagagacaagaccttcataggatttcttagggattgagctggacaaagcaaaggtttgtaagcaggcactagtgaacactacccaggagctggctttgacctcgttcctgggagaaagctgccctctggtggcacagcttgcttttataactcaaggggaagaaagagcaagctctggtccagtagaaaagccaattgaggcaaagcctagattagacggtgtagaatataaactggacagaaagcacagtggagctctcgtgtcttttccattctctgcattcttcagggagggcaactaacacggatctatggcacttaaagtagatgccgtaaccgtgccaacccaactctcaatggttggcacttgtctcagtctgttttgtgcttctataacaaaatacctgaggctgagtatttataatgagcagaagtttattggctcacagttttagaggctgaggagtccaatatcaaggtgctggaatttggcaagggccttcttgctgtgtcatcagatggtggaaggtgagagggtgagagagaggacaggagagggctgaacttgcccttttatcatggcaccagttccaccatgaggcttaatcacctcttaagggtcctacctcttaacactcttacaatggcaattaaatgtcaacaagagttttggaggggacaaacattcaaaccacagtggctctagtagctctgttttacaggtgtgaaactgtagcataggccaagcgcagtggctcatgcctataatcccagcactttgggaggctgaggtgggcagatcacctgaggtcaggagttagagaccagcctggtcaacatggtgaaaccccatctttactaaaaatacaaacattagctgggcatggtggtgggtgctgtaatcccagctattctgaaggccgaagcaggagaatcacttgaatccaggaggcagaggttgcagtgagccatattgcaccactgcacctccagcctgggcgacaagagggagactccatctcaaaaaaaaaaagaaagaaagaaagacagaaaaagaagagaaactgcagcacagagaaacttgaaatttgctgaagatcacaaagctgttaggtggcctgagtggaattcaaacacctgtctctgactccaggcttctcgtctcagagctgcaccttgctgcccagaggggcagaaagccacttagcaccaggtcactccagcaccttccagggtgtgccctcaaagatctcgccctttcccaccagatattaacattcaattattgttcaattgcattggctctaacacttcattttcaaattcctacctatatcctatggcttagtctccttagattaataagtagtttgccttgccgtattcctaccgatgagatgtttttaagcttcttttgaaatccgcctggcctcttcctggttaatgcattatcacagtcccctgaggtacccccgggggttatttattgcaagtgaatgctattgcatctattagcctggtgaataaagttgtcccttttccaaaattagctaggattacggaagagagggggaagggaagggaaatgccattattgagcgcctattattacgtgactgatggacatgacgctgggagctttgtacagataaccaatgatgaacaccttcaggatgtccggctaggcaggcacttctcttacactccccattgccgccactccacaaagacaatgtcacacgtctaatctcatttagcccttcccatgaccctgtgatgtcagtatgatctccacttgcaggtaagagaactgcagctctgaaagatttaataacttttcccaaataaagaactgggaggtgacagagctgggatctaggtccattattccacatctccatataaagagaagtaaacttccctgacctggcctggcttcttgaaggtggctctgacacctcagtctctagagatagaactctctctctctgaagttcaatctgtctgctgagactccaggattgaggcccaacagtctgcacactggaccaagtgtggaggttctgaaattctaaattgtttagggttccaggagagtaaaggaagagaagcaaagtatcaggaggtcagcaaaagctcagccatgagtcttgaatgcctcttgtggtaaatttacttagccaagtgggggataaaacaacatctgtgcgcaatcagattaccaaatctgttacctttctaaacaattagttccttacaaatgccataggaaaaaccctccatgtaagaagtggcaaatgtcttagcactatgttccttatgcgttaattcagcgtgaccaacatggagaaaaaaatacaaattagccgggcttggtggcacatgcctgtaatcccagttacttgggaggctgaggcaggagaatcgcttgaacctgggaggcggagtttgtggcgagccgagatcgtgctattattgcactccagcctgggcaagaagagtgaaactctgtctcaaaaataataataataataattaaaaagcattaattatgcaggtagtctctcttacatattaagatacctatgtatgtgtgcatatttttcatacaaaagagaggcacaccatacacaatggttactcttgagaggggataagaaaatttttctttttatatttatagaatatttaaatttttctaacaaccaagcacaacttttgtaattttaatcttttttagaatgcactaatatagtattaagacagctcatggttgtgtttccattctttcttgtttttttttatcttaggagaacccgtacagatagcgctgactctggacattgcaagtatctctagcatttcagagagtaacatggtaagcgctgttcctttgtactctacccaagtagtccctctctgtgtgtttaaaggggatatgctttctagccgctcaaaaaaaaaaaaaaaaaaaaagaatggctcatggccctcctccatttggaatggcagaagctggagtgctatctccaaactcaagacagtgggagattcttgtagagcagattttctgagtaagacaatggaagattcttgtagagcagatttcctgagtagcaggaagaaaatcggttcaagagccagaaggagagaaaccaggcaatgaagtgggtacacttggtgatggataaaatttggggaaaggaatgaaagtgtagtaggcaagcctggccattacatggtcttttataatgggggagacaacccgaggaaaactgacagctgatgctgacaacgactgtctcccttaagagaacatattcgagacaagggcaaactaaaggcagtttgccaagagggtatgctgtgcattccagataaatcgtggacaacctaagcacttagcccaccaaaaaattcaacaatttggtggggccttagtgatcagtgcaatgtgagctgtcacaccaagtaagttaaagtcttgaacatggcgttcccttttggcaataggagctattatctagaataaataaggcgatttgttctcttattgcaatatgccactaacccaagactggggtaactggagtgacttatcagttaccccagtcttggggtagtggcatattgcaattagaatggtaactttattcaccaaagtctgtgtattcttgctctaagtggaggtggggaggggagtaaactttgaccactttcctccatttggtggggttttctcacccactacccccatccatttccataccctgcctccccctcccaggactacacagccaccatatacctccgacagcgctggatggaccagcggctggtgtttgaaggcaacaagagcttcactctggatgcccgcctcgtggagttcctctgggtgccagatacttacattgtggagtccaagaagtccttcctccatgaagtcactgtgggaaacaggctcatccgcctcttctccaatggcacggtcctgtatgccctcaggtacgcggacacctgtgacctcaggggtggaggacggcagctgggagaaaacatgcagatgtgtcttgggtagttgtgaccagaactcaaatagccactgtgaggtcccatggcttcttagatccttgcccccataatagaaggtccctctctcagttcatcatctaccaaatgcctgctctgtgccaagccccatgctggccacaggatagagctgagtaaggcattgacctgtcctcaagacacggacatggaaacaaaggaggtccctggtgctggggcccaagttagggagtaggtgagtggtttgggggtgatgttacaggatgctttcacaggattctgagctatgtcttaaagggtaaaaggaagttagcaagggaagaaataagggcaatggcagagacgacagagaggtgcatgcaaggaactttcctttcttggggcccagtggaactgcagcagctccagaacaccactctacttgtctgagtcatgtttgtagagaaaaccaaggtgcagtgccccaaagtctctgccacctgcagccatgggctcccctttgccatctccccaaattcctgaagctcaagttcctttcacccaattgttaatggagccgggttggatggaacaggactcatccctgcctgtgcaaggactgtgcaaacctaaagctcccagaggccttggggaggaggccaggagccaaatattcatggggctgatgtttaatcttaagtaagagtctaaagttataaaacaagggttgagctaaccgataaactgaatttctggacatgcctcaactgtactgagttttgcaaagaccatctcaaagcccaattcttgtctcatgaaacataattagacttctcttttgacctcaattccaatcatcgttaatgttccccttccccatgttcccacagcaatgtgtgaatgtggatgtgtgagtgtgtgcatgcatttgtgtgtacatgtgtgtctgtctgtattatggcacacaacacaatcaatattgtgtaaggattacaaataatgagtgatgttttaatagcctggctctagaatcataaagattttggtacaagtccctgctctgtccctcagcagctctgtgaccttaggcaagttacttgactctcagagcctcagtttcatcagcagtaaaatgagaattaaaatatttcctacctagtagaactgttcaaaggggtaatgcatgcaaagcactcagcccagggactagctcacagtaagcactcagtaaaccatagctattgttagtctctgtctccctaaagggagtgtgagtgagcatcctggaggtgagcaccattctgtaatcacctccatttcccccaagtacctagcacagtgcttaataaataaggatgctgaataaaaatgtatgacactgaagaaaaaggaagatagaggcctggtgaatgcaatctccactgtgagggcataactgacctttaattgaatatctctggggttaagcccccaaagccacagtgcctggggcccccactgcctctgcatcctggttcccatgaggaggcagggcctcatgagaagagcacagccaggagacctaggctgcagcctcagttctgccactcagagccacatgagcctatgcaagtccctatgcctgctgtcaagtggtgacgatagtgatggtgaacactgttctaggcccacccaggtctgtcaggaagataaaatttaaaaactggatgctaaagcatctcgagccaatgcatctgtctgttctgtgatactgccagaagttttgccccttgaatggccagcattccaacttcctccactctggacccaggtttaaccaagcctcatgcacacattctttagcacccagagcctcaaggatgctttacatgcagactccaagctacatgttcatttaagagttccagtgaaagtcttctttgagtgggccttcgaaggaatgtgaactttctataacttcctcacaatactgtttttgaacctgtttttccctcttagaatcacgacaactgttgcatgtaacatggatctgtctaaataccccatggacacacagacatgcaagttgcagctggaaagctgtaagtatacatcctacaggctcctgagatgattttcctgggtgacttaggtgtgtgtattcatgaaaagtatctcatacacagtgacctttcttttcttaatgttgattcatcgtggattcagcccttctgactgtacttccagacagatttagagacttctcaaagatatgcctaatatcttttggggagaaccattatgcattagtaccagatatctccacctatgagtggacaagaaaaccaaaggaaatgctttaatgtagttggtggtctaggccaggggtcagcaaacaacggctggtgtgcccaatccagccccatcacctgtttctgctaaggaagttttactgacacacagtcgtgcccatgtacttacacaccgtctgtggctacttctgtactgcagtggcagagttgagtatttgtgatagagaccagatgactcataaagccttaagtattaacattcttctttgctgcagagtttcgttttgttttgttctgttttgagacggagtctcgctctgtcgcccaagctggactgtggtggcgcgatctcggctcactgcaagctctgcctcccaggttcacgccattctcctgcctcagcctcccaagtagccgggaccacaggcgcccgccaccacgcccggctaattttttgtatttttagtagagacagggtttcaccatgttagccaggatggtctcgatctcctgacctcatgatctgcctgcctcagtctcccaaagtgctgagattacaggcgtgagccaccgtgcctggcctgctgcagagtttttaacgggctctaataagttacttccacgtgaaattccaagaaggagtggtagcacttcccaaacgttttaaaccatggaatcttctttcataagcgttttgtgggacaatcatttcataaaaaacatttcggtgacaacaaatatagactagcccctgagacctaaacttttaatatttaatttatgccatctatctgattactaactctcaaagggtctgtggttccagatgagttctatgaccatgttctttgccacccacccacccttactctcccaagatcatatcagccacaggtcccagtagaagatatgaaaaaggtcatggacttttcatcaatgtactcatcatttgtcagcaaatatgtccagggctacatttttaggtctaaaaaatcacaaagactttattttatttcttttttcattttttttgttttatatatatatttttattatactttaagttctagggtacatgtgcacaacatgcaggtttgttacatatgtatacatgtgccgtgttggtgtgctgcacccattaactcgtcatttacattaggtatatctcctaatgctatccctcccccctccccacacccttcctgtgttccccttcctgtgtccaagtgttctcactgttcaattcccacctatgagtgagaacatgcggtgtttggttttttgtccttgtgatagtttgctgagaatgatggtttccagcttcatccatgtctctacaaaggacatgaactcatcattttttatggctgcatagtattccatggtgtgtatgtgccacattttcttaatccagtctatcattgttggacatttggcttggttccaagcctttgctattgtgaataatgccgcaataaatatacatgtgcatgtgtctttatagcagcatgatttatattcctttgtgtatatacccagtaatgggatggctgggtcaaatggtatttctagttctagatccctgaggaatcgccacactgtcttccacagtggttgaaccagtttacagtcccaccaacagtgtaaaagtgttcctatttctccacatcctctccagcacctgcagtttcctgactttttaatgattgccattctaactgctatgagatgatatctccttgtggttttgatttgcatttctctgatggccagtgatgatgagcattttttcatgtgtcttttggctgcacaaatgtcttcttttgagaagtgtctgttcatatccttcgcccactttttgatggggttgtttgtttttttctcgtaaatttgttcaagttctttgtagattctggatattagccctttgtcagatgagtacattgcaaaaattttcccccattctgtaggttgcctgttcactctgattgtagtttcttttgctgtgcagaagctctttagtttaattagatcccatttgtcaattttggcttttgttgccactgctcaatgaaataaaagaggacacaaacaaatggaagaacagtccatgctcgtggataggaagaatcaatatcgtgaaaatggccatactacccaaggaaatttatagattcaatgccatccccatcaagctaccaatgactttcttcacagaattgggaaaaactactttaaagttcatatggaaccaaaaaagagcccacattgccaagtcaatcctaagccaaaagaacaaagctggaggcatcatgctacctgacttcaaacaatactacaaggctacagtaaccaaaacagcatggtactggtaccaaaacagaaatatagaccaatggaaccaaagagagccctcagaaataataccacacatctacaactatctgatctttgacaaacctggcaaaaacaagaaatggggaaaggattccctacttaacaaatggtgctgggaaaactggctagccatatgtagaaagctgaaactggatcccttccttacaccttatatgaaaattaattcaagatggattaaagacttaaatgttagacctaaaaccataaaaaccctagaagaaaacctaagcaataccattcagaacataggcatgggcaaggacttcatgtctaaaacactattttattttttttttctgtgcaaagcactgtgataataagaaaaacctcactccccattgcaaaggaagtagagaggctagtgaggaaagacttcttggaggaggtaacaaaatgtgttttatggcctcaatctgctgttgccccaatctccttgactgaacaacttttttgttaacaataatagtaataataatagtaataaatgggcaaggcacagtggctcacgcctataatcccagcactttgggaggccaaggtggacagattacttgaggcctggagttcaagaccagcctggccaagatggtgaaaccccatctctactaaaaatacaaaaattagccaggtgtgatggtgggtgactgtaatcccagctacttgggaggctgaggcaggagaatcgcttgaacccaggaggtggaggttgcagtgagcaaagattgtgccattgcactccagcctgggcaacaagaacaagacaccatctcaaacaaaaaaatatatgtagtaataaatattcttttcccaataaatactgtagcatccatttaacaattacttaatccatgtctgtcactatactagacaccttgcaaacaatcctgagagatatgtatattgtttttcccatcttgcagatagagaaattgaggttcattaggatttggcaattttcccaagggaaagtgaagtagccgcacggggacttcaacccaggtggaatggccccaaggtcccaagttccctgaactctaatagcccttccactgggctggagagtcacatagggagtttgttccagtggcttgtttgtgatctgagctgcttatttttcctgagtataccataaagtgcttttaaacagtaatatggagataatgaaaatcttttaatacctccttcccaatttctccagtgtccatttattatcatcattgttccccaaattgagtaaccatgtgacgcttttgttggattccccaaatcctgccagaatgttcaactgaattgcaacctgattaccacacagtagtcccagacatatccctgtgccagttcccttgcattacctaggaccaagaccagtgtttgtcctttcctgtgtctgctaaggaaagtcttttttctcattctaatactttagttttatatattgtcccactaaagtctccagccagtctggatggctggttgggttccatctgtctatcctcatttaaatacattcaattcatccattcaaccattaaatgacgattctatgtgaggtactgtggtagatgtttgcaatacacagataaaagtaatgctgcagtcttcgagaactctacagtctaatagagggtgcaggactttaaataattataacagaatgagttacaacaatgaaaagtaatggggggggggtcagagttttcctagggaaagtgtcacttggaatgagacatagggcatcagctggaatggaccaagagacaaggagtgggactcagaatctgctaagatgaggattatgtacaagaaggaacaaagcagaagggatggcaaatatgcaaagccatccttgacatttatcactcgtgcttccaacttttaaaaaaaattgcttgatagatataaagctcacacagtcatgccagtaaatgggcatctaaactgtaacctggggatttgcctgtgatgaagaatgaggatttaactctaggttgatgtgtgatgaatgaactccctagcattgttaagtaatctccattgttccttagtaaaccgctccgaaatgcccaccaaactggggcacctgtgataggcaaacaacattgcagatatgatttattaaggcatcaaggtggggcttgtgtgtggagggagaaatatagtcaaactctggagagcagtgggcactccttacgtaaggtcacaagtgggcaacatctgagaagcacagccattatgaagcagaagccatttttcagaagcagacatttaattaaagacccagaaaaacagattaattatcttattgattaaatgcatgcagaaacttcttgaagcaatacagctgtttggtggcagaataaaacttgaggttatcaaaaagagaactcattttcagtcccacatggaaaaagctattaccttccgtgtatcgtggctgggctcatctcaaatcccaggagacagattctcctggaaacctcagcctctgtttcacaaataccatccccagtgagcggagggagttttctctgttcagcctctgtttcacatataccatccccagtgagcggagggagctttctctgttcagcctctgtttcacatataccatccccagtgagcggagggagctttctctgttcagcctctgtttcacatataccatccccagtgagcggagggagctttctctgaatgtttattagcagtgtttgggtacagaaacctcactatgggtttttttctaagtaccatctctagaaaagaactgataccatcccacagttttccttattcacccagggacagagagaccataatgtaatgattgtgagcatttactagttgtaaagtcagagtgtccaggtagaaacttgtactacccactttcatagattttttttttaatgtgggatggtagccgtatttagacagctggctttagtacatgtttggatgcttccaagggaaagtccacagacagtttttacctggaaatcccctaagagttcatggctatatttctcttccctggggagggcgagataacccttgctagacaatggataccatactgtgagacttaacaaaatgttagttccaacaccggcatcacatttcccagtagtctttgaaaacaaaggcaatatacctttatgtataagatcacaggtaccgaaatcactgagttttgccatcactagctctgtgactctgggtgagtaactaatgtctctggacctcagtttcctatcagtgaagtgggaagaataatagtgtctgactcagagttgttttttaacagctttattgaggtataacttatatacgataaaattcacccattttaattgtacagttcaaagatttttagtacatttccgagtagtgcaaccatcaccacatgtcattgttagaatatttccatcaccccaaagagactcctgtacccatctgcagtcacgcctctttcccatcaccagctcccaggcgatgactaacctactcgctgtctgtatgaatttgccttttctggatatttcttataaatggaatcatgcactatgtggttggttggttggttggttggttggttggttggttggttggttggttttgagacagagttttgctctggttgtccaggctggagtgcaatggcgcaatctaggctcactgcaaactccgcctcccaggtgcaagtgattctcctatctcagcctcccaagtagctggcatgcgctgccacacctggctaatttttgtatttttagtagagacagggtttcaccatgttggccaggctggtctcaaactcccgaccacaggtgatccacctgcctcagcctcccaaagtgctgggattacaggcatgagccaccatgcccagccctatgtggtcttttgcatctggtttctttcacttagcatgtttttgaggttcacacatgttatggcttgcatcagtactttattcctttttattactgagtagtatttctttgtatgcatatatatatatatatatatatatattcatgtgagatagatgagatagatatatatatcaaattttatttattgattcatcagttgatgaacatttggtttccaccttttggctattatgagtagtgctgctatgaacactggtgtgtgagtctttctgtggacaggatttcatttctcttggacagatacctaggagtggaatgctgggtcaaatggtaaatatatatttaagttttaaagaaattgctactttgttactgtttcccaaagtggttgtaccatttcacattcccactagctaatgttccagcttctgcatgtgctggccttcgttactgtctatcttttttattacagccatctaatgggtgtgaggcattttattgtggttttgatttgcatttccctaatgactagtgatgttgagtatctttttgtttgcttatgaaccattcatgtatcttctcaaagagatacattgagggttaaatgagatgataatgttgtaaagcacttggaaatgcaattgcttattaaatgataggtattattatcatcgtcactcatagactttgggattaaactttcctaaggtaactttgtttcttgcttgccttgttatcctgagaaagttatgcaacccctctgaatctgagagttttcaagaataatgtgggaaaatcattatagtgactgagttctatggaacagcatttattgaataataacatttcaggaaaaaatataagctttactgtatattaaaatacatatatacgtttatatattatatattatattatattatatattatatatattatatatattataatatttatatattatatagatataaatcaactacaagatccagttcaatttcagaaaatgtaaagaaatgtccatcttagaattgaggaaatatagaaatggctaccttgcaagtttacaagaacattagtgacataatgtataaagtacttataaatgttcaaaaggtaactattgttactattatcaagtatattaattaaactgctttgagacttatctaacgtgcatttttacaggctttaataaagcaggttttttgtttttgtttttgcatttatgccaatatagaaatatgaacagatcagttcttaagtccctgaaaatatcatcagagctattatacaatcttgaaaggcagtatctttgcgtgttcacagatatgtgcttaataaatgtaatttaaataatgagggaggccacttctaatgacttatcatccaccagatctacgcagtacctaacacaagaccagctctcaattgacggcaaatcgtcctggcaggtcacttcattcagagcagacattgcaattgcacttgggaaatcttgctaagttctgcatgggattgtccttggacttatcactatgaagaaagaactcatgctgtctccatattatagcattttccagaccagaccagttcaatctggaacacccttgcactgaccagggctccattttatttgccagggggctatgatggaaatgatgtggagttcacctggctgagagggaacgactctgtgcgtggactggaacacctgcggcttgctcagtacaccatagagcggtatttcaccttagtcaccagatcgcagcaggagacaggtaactcatgtgacaaactgtatgaaataaaaataagtgaactgaggtgtagggttgctctctgagtcagaaatatcgtcttctcactttacctccttgggatgcagtggagcgggacagtagggtttgtgctgagcaattccacctcctccacacccagtattaaaatggtccactgaggaacagacctctggaccagctctgaagccttgcaccatgtacctccagatacttgctaatgagtgctcaaattccgtgcctccatcatgcataaaatttattcatatttctcactggaacactagttctctgacactgaagaataaaaataagaatacagctcaaagatgaagaagacagcagcaatgcccaacaagagcatgaacactctaattattgcaaacatggcaggaagtattacttattcatttcatttaccagaaatgcatctcttggtctttggcgattttacatagacatgtttggaaagatgtgatgttatataaaagcagctggcattttcctctcacttccttatgataatattaagaacgcttattctcatcaatatttgcaccctaaaaaattactacatattttattttatttaattgagacaaagtctttcgcacaggctggagtgcagtggcacgatctcagctcactgcaaccttcgcctcccaggttcaagcgactcttgtgcctcagcctcctgagtagccgggattacaggcatcctccagcatgcccggctaatttttgtatttttggtagagaggggtttcgccatgttggccaggctggtctcgaactcctgacctcaagtgatccacccgccttggcctcccaaagtgctggaattacaggcatgagccaccgcgcccggcctactgtgtattttagttgagcctaggtgacattaaaaatcatatgtcacaccaagatcatggttacatgaaaattagaaactaaagggtatgtatagagaaaagactggaatagaaggaaagatgattttttctctctacttttcttattttccaaatttttcttttcttttttcttttatctatttacttattattttactttattttattttatttatttgagacagtgtctcactctagtgtcacctaggctggagtgcagtggcgcaatctcagctcacggcaaaattcacctcctgggcttgggtgatcctcccacctcagtctcactggtagctgggactataggtgtgtgccatcatgcctgggtaatgttttgtattattgtagagatgaggttacatcatgtttcccagctggtctcgaactcctgagctccagcaaaccacctgccttggcctcccaaaatgctgggattacagacatgagccaccaagcctggctttattttccaaaatttaagtaattatcatgaattatttttataatgggcaaataaatacactttatttttaaagacaactttgtaaattagggctatgcagtcatagtttaccaaatctggattcccaagttgggttcatataaaaaatggcttcagttttcaaaattatgtaatctcatgtagcacataaccaccctctttaggtacaaaagagggtcgttatttagtcaaatgttgattctaaggtttgcttgtttgtttttaaaacattgactttcaaaatcaagaaaataaagcaggcagtgtagactgataaaacatccctggaccaacgggcaaaagacctggtttttattctttcttctaacatcaactccaggtccttttcaaatcactaaaacttcctgtgtctcaatttacccatcaataaagtaaaataataagtaatctctagggtctcaccaagctcgaaaagtacatatttttattctatactatatttatccaggcatatgtctgttgtttttttaatggtataatttctcatttcaggctttaatttgggggtgacagagggttggagcagctcccattcaccatcctgtttttccccaacaacaatctaagccagacttttcctgttcccagaggataacctcttcattcatgcatccacaccagtgctggccactactgctcacctccccataatagaagcacagcaggagcagagcttgggactctaacccatggacatatatgttttgtgctacagtagcctatttaccacagagaattctgttactgatagctctctaacacatgcctttcccacatctagaatacactgctagattccctaaggatggccctgaagtagtataaaatctggggtgcctctgaaatcatcaaaaattcacttatatttaataggtccattaggtctattccatagtattccttgagaaacagatggtcacaggtaatcttcattaaacaggtatttattgaacaactactttgtgagtgcagaactgaaagattcagtgtttgcccccaaggaactcactgtctagtgaggcagacgtcaagaaaaccagtattgattgcactgctgtaggaatactgtgattcagaaaagcccaggttggacataaggcaggacagcgcccctataaatcccattcaatgcaacagcagtgtctcctgtggaaatcataatgacagttcatacataaccagatttagatcaatgacagagggcttaatgtacatatagttaagcatcccatagagaaaccacttgctacacgaacagacacaatttcctatctgttgtttaccctttcaggaaattacactagattggtcttacagtttgagcttcggaggaatgttctgtatttcattttggaaacctacgttccttccactttcctggtggtgttgtcctgggtttcattttggatctctctcgattcagtccctgcaagaacctgcattggtaagcagctccaacaggagatttctaagaactggcttatcaggttacttactttttttccttttaccattgtcttcattgatattcctaaggcagttccaagagttgttttcttgggagattcttttacagagaaagaaagagagagacagaaagagactactttaggattctgggttttttgttgttgttttttttttggagacagaatttcactcttgttgcccaggttggagtggactggcgtgatctcggctcactgcaacctctgccttccaggttcaagtgactctcctgccttatcatcccaggtagctgggactacaggcatgtgccatgatgcccaacttatttttgtatttttagtagagatggggtttcaccacgttgcccaggctggtcctgaactcctgacctcaagtgatctgcccaccttggcctcccaaagtgctgggattacaggtgtgagccactatgccctgccaggagtggtgcatttttaaacttaagttttacagtgacaagtaagggatcattgtgcttagatggtctattgtcagttcttttgcatatttatcaccccctcccaggagaagacagaacgtgaaacattaaaaaaaaacacatccctcatatctgtacaaaatggacaaatcaaccctattctagaaggtcgcagacttttcaaaatgagatgcattccatttctgggtcttgccctcaccctgccaattctcaaatggggacactctgccaggctatggtggaggactaaccagtcactttgtaggaacatcccctgcctgttttcccaggagtgacgaccgtgttatcaatgaccacactgatgatcgggtcccgcacttctcttcccaacaccaactgcttcatcaaggccatcgatgtgtacctggggatctgctttagctttgtgtttggggccttgctagaatatgcagttgctcactacagttccttacagcagatggcagccaaagatagggtaagagtcttgagggccctgtgtatgatccatcactggtgccgtgtgctgatctgtagacatgggctggacctggcttctatccccaccccacccgcagtgattccctgtgctccagtgagtcttatccttgttcaggtgggagcagctggaagtcatggtgccccttgaaaaagaccattcttttcaccaaatacaatgagatattaatatgtttaattttccagcagaaaatatgttatctgtatgcagcataaaatcacaaccacaggagcaagcatccatgaagaatccaatatgaaaaaaacatgatcagctgcttgcaagttttatattaatatatatttactatttaattcttttgttgcattattttgtccttaaattatacaagtaatgctttactgaaaaatgtatggaaatattagattgtgacaaatttcttggtgagcatatttttctgctaattgagaaaaactgtcattatttggtttagcaatggaacactatagtccagctctctaaataataataatagtcattatttatcaagcatttacatgtgccagacacagtaacaagccttttgcaaatactatattattttaaatgctcataacaacccaataaggttgtctccttttttaaatttatgaaatctgataacaagaagggaaagagacttaccgcaggggatatagatactaagaggtagagctgggattccaacctaaacctacttggttccaaagcctgacacttatccgctattcccacttgcagagagcattagaccatgctcttaactatcaccctttacaggttcatggacccctagtgttatttggaagccaaatttgatagataatggcattctaaagttcatgctaagaagcaagaaaatgatagggatccagttcagaagaggtgcccaccttgagcaaagtgctaggaccacggaggatctaatagtgtagaatgaggaatcaaaatgacccaaagatccagttgctttttcccttgggtttggctacagtgagtaatgtttcatagtcatgtcatccaagcaccaaaggcaaatgaccacgtgtgccagccaaagaggaacatggcttttatttattttgctcccttaggcttccttatgagggaggaaggaagttgagttacctcctcatccccccgcccaagaatctggatttactagattggcaaaatggacattggtgaaatactgacagcctcctctaaagacaccagaaagctcttattctgctgtgtatatgataatcactgcactatggagtactcactgtgtcctaaacatccgtcaacatctcctttagttcatccaacaacacaatgaaatgagtaccattattatcccaattttactcttgagaaatgtgccactaattgatgtggcacatttctcaagggtaaaattgggataataatggtactcatttcattgtcctgtacagtgatatggtaactcccataagaccccacacctagcaagcggcctggtcaaggaaccaaaccacactctctctgacttcactacactcccacattcctgggagttgaccccagccatgttggagaatggcaactccttgcaatggcagggagcatcactatttctgctttggtggcaaagcctttaagacacagctgatttctattatctctcgtaatcagttactcctttctccctggaacagaattgaagtcatcaaacacctaccagatgctttccattttttaccatttaatcttcccatcagtctcaagatggcaataccaatcaccatttggcaggcgaggaaataaagtcttggagggattgaggtgactaaagtttcacaatagtgagaggccgaatggaatttgaacccaggtccactaacttcaaagcctgagcatttcgcatctggcacactgctcaggatatccacagtaggccatgtttactcctcctgttatatatgctggtgacctacaaataggtgtctccaaacagggcaacaggagcccaagcctggcttattggccaatttctgaagcactcaatgccactctctattaagcctaattattcaacacttaggcctctaaactttttattagctcattacctacttatttattttgctgagtcaagtcttttaagctaactgcattgtctatgaactaggggacaacaaaggaagtagaagaagtcagtattactaatatcatcaacagctccatctccagctttaaacggaagatcagctttgccagcattgaaatttccagcgacaacgttgactacagtgacttgacaatgaaaaccagcgacaagttcaagtttgtcttccgagaaaagatgggcaggattgttgattatttcacaattcaaaaccccagtaatgttgatcactattccaaactactgtttcctttgatttttatgctagccaatgtattttactgggcatactacatgtatttttgagtcaatgttaaatttcttgcatgccataggtcttcaacaggacaagataatgatgtaaatggtattttaggccaagtgtgcacccacatccaatggtgctacaagtgactgaaataatatttgagtctttctgctcaaagaatgaagctccaaccattgttctaagctgtgtagaagtcctagcattataggatcttgtaatagaaacatcagtccattcctctttcatcttaatcaaggacattcccatggagcccaagattacaaatgtactcagggctgtttattcggtggctccctggtttgcatttacctcatataaagaatgggaaggagaccattgggtaaccctcaagtgtcagaagttgtttctaaagtaactatacatgttttttactaaatctctgcagtgcttataaaatacattgttgcctatttagggagtaacattttctagtttttgtttctggttaaaatgaaatatgggcttatgtcaattcattggaagtcaatgcactaactcaataccaagatgagtttttaaataatgaatattatttaataccacaacagaattatccccaatttccaataagtcctatcattgaaaattcaaatataagtgaagaaaaaattagtagatcaacaatctaaacaaatccctcggttctaagatacaatggattccccatactggaaggactctgaggctttattcccccactatgcatatcttatcattttattattatacacacatccatcctaaactatactaaagcccttttcccatgcatggatggaaatggaagatttttttttaacttgttctagaagtcttaatatgggctgttgccatgaaggcttgcagaattgagtccattttctagctgcctttattcacatagtgatggggtactaaaagtactgggttgactcagagagtcgctgtcattctgtcattgctgctactctaacactgagcaacactctcccagtggcagatcccctgtatcattccaagaggagcattcatccctttgctctaatgatcaggaatgatgcttattagaaaacaaactgcttgacccaggaacaagtggcttagcttaagtaaacttggctttgctcagatccctgatccttccagctggtctgctatgagtggcttatcccgcatgagcaggagcgtgctggccctgagtactgaactttctgagtaacaatgagatacgttacagaacctatgttcaggttgcgggtgagctgccctctccaaatccagccagagatgcacattcctcggccagtctcagccaacagtaccaaaagtgatttttgagtgtgccagggtaaaggcttccagttcagcctcagttattttagacaatctcgccatctttaatttcttagcttcctgttctaataaatgcacggctttacctttcctgtcagaaataaaccaaggctctaaaagatgatttcccttctgtaactccctagagccacaggttctcattccttttcccattatacttctcacaattcagtttctatgagtttgatcacctgatttttttaacaaaatatttctaacgggaatgggtgggagtgctggtgaaaagaggtgaaatgtggttgtatgagccaatcatatttgtgattttttaaaaaaagtttaaaaggaaatatctgttctgaaaccccacttaagcattgtttttatataaaaacaatgataaagatgtgaaactgtgaaataaatataccatattagctacccaccaaa

SEQ ID NO: 579 - DNA, 33588 bp, Homo sapiens
agtgcgtgtctgttttggcaggaagaagacgtttcttccaaggagcagcctccccgctacatccagccagtgtcgcccttacacagctgcatgtcaggtaactggccttcctggggcttcttcttacaggccggcttttgcacgtgcagagacgctccaggggatattcttttatgctaaactgcgtcttttcaaacaagtccctgtcaatgttttaaaagtaatttgctttcaaaaaataataataatcatcagtgaaaatctcaagtacagattttacatgggagatttccaaacgtaatgcgtaaaaaaaaagcaacgagggaagatgcaccaaatgggagacattgcatccacactagattcttatcttagagatgctgaaggcacgtgcactgaacatcgaagagacaccggaggtgaaaagcgaaactgggtttgggaacagggcccaggcgaagcgttgaacacaggctcgcagcccggggctgaagctcagggcgggaaaggagggctgggattccttctccccggaagagaatcaaaggctatattgtcagtcttgcatgggtgtttcctcgtctgcttcttttatctttatttctattgcattgtattatattttactgtattctatattttattattttgttttattttaaattcagacaggatcttgccgtgttgtccaggctggtctcaaactcctggcctcaagtgatcttcccatctcggcctcccaaaggccagagtgtgccagctgggattacaagtgtgagccaccgcgcccagcctcttgtctctttctaaagataccttgtgtctttagaataaaaaagtagaaagttttattcagtagtaaaaattaaatctggaccaaaatgtttaacattccaagggttaaagtgcagagttctttggaaaagaaaaatctgcttttattgtgtcactaaatacataaatacatcagttcagaggtaggccacagacttgatatctaaccgtacgtcatatgactgttcaaacatgtttgagggtcctatatttagacaccaatataaccagcccgataaaacaaacacaaccagtcatgttccccaggcaagtcagaagcagcccataatatgctttttccttgaaaaatcatgtacatatatatgttatatgcatatatgtacttgttttatatgtatatatgtactatacatacacacataaacatttttactttaaaaagtacatatattaacgttacatgtatatacgtacatgttttataggtatatatgttatgtatacatatatgtatgtatatatacatgcatgtacatgtatacattatatacatataagcatacatatatgaacacataaacatgtatgtagatgtctataggtacatgtttatatgttatatgtttatatttatacgtgcatattataacatgtatttatatgtagatgtgtacgtatatgtacatgttttatgtatctatacatatatgtacatatatattttaaagtatatattatttttgtaaagaaaagcatgcatattttaataaagaaaaattatgctttattatatatttatatattatatttatatattttattgttttgttttttttttctagagataggctctcactttgttgctcagacttaacttgaactcctgggctcaagcaatcctcccacctcggcctccctaagtgctgggattataggcgtgagccaccacacccagccttatttacatattttatgtgatacatttatactatgtatgatgtacaaaagttatactatattatatataataattatgaatatataaattaaaatataggtgaaaatattcctttaggccccctacgaggaaatgacttaagatttgttgccaaaaatcacaaagtgaaagcaattaccattagggcacacacctgtggcaggaaaagaaaacatttctgacacccctcctaatactcgttttgagacatgccaccaaaaccgtccacttgtaaaaatgagtcaggctggagtgtgccagcgtgtcagctcctcatcccagaagtagggtggtttccacccccacataaggaggaagtgagatcaggtaggctatgtgacttctcacagacccagcatgtggctgcatatgaagttgcgaagagacagcaggtggaactctatgaaaccccgtccttgtaggtcaaggatggttgaataatagggaccattgcgtagggttccattctacagagtaacttcccagcaatgatcatgcagtgcctcagaaactgcttcctgccctcttggtcttgtcttgtcttttcttttttgagacggagtctcactctgccgcccaggctggagtgcagcggcacagtctcggctcactgcaagctccgtctcccgggttcaagcgattctcctatctcagcctcccaagtagctgggattacaggtgcacgccaccacatccagctaatttttgtatttttagtacagacggggttttgccatgttggccaggctagtctcaaacacctgacctcaggtgatcagcccacctcagcctcccaaagcgctgggattacaggcgtgagccaccgtgcccagcccgtcttttctatgtttttaaaccaagcattgcttgaaaataatcctttttttacttttttttttgcttattttttttctttttatcttatgtttattattattattactataatttttgagacagagtctctctccgttgctgaggctggagtacaatgctgcgatcttgcctcactgtaacctccgactccggggttcaagcaattttcttgcctcagcctcccgagtagctgggattacaggcatgtgacaccatgcctggctaatttttctatttttagcagagacagggtttcaccatgttggccaggctagtctcgagctcttgggttcaagtgatcggcccacctcgtcctcccaaagtgctggaattacaggcatgagccactgcgcctggcctttttacttcttttgtttgtttgtttatttactttaagaaatgttttcttttttatttttatcttatctttattatttcttatttacttcatttaccactcaacaaataacttctttaaaacatttttttttgaggcagggtcttgctctgtcactcaggctggagtgaaactgcagcttcaacctcccaggctcaaacaatctttccacctcagcctcctgagtagctggcagtagagacacatgccaccatgcctggctaattgttttattatttatagagacagggtcttgctatgatgcccgggctggtctcgaagtcctgggctcaagcgatcttcctgcctcaacctccccaagtgctaggattatgggcataagccacactgcccagcctaatattttttatttttgaagagacagcatctcactttgctgcccaggctgctctgaaactcctggcctcaagcaatcttcctgcctcgtcctcccaaagcgctgggattacaggcatgagccaccatgccaggttggatatgatcatattatagccagcaccctgtgtaacagcacaggcaatcacttaaaaacctaaggacactggcagaatacggtgactcacatctgtaatcccagcacttcgggaggccaaggagggcagatcactggagctcaggactttgagaccagcctaggccacatggcaaaaccccgtctctacaaaaaataaaacaaaataaaaacctaaggaaactgaccactggtttggtagacgtgggcgtggctttgagattcccccatgctgcgatgtggggggagtctgctctgtctgtcctaactctctctgatcttctgacttgggaaaaacaaactcgaagttaatcattcccagctcaaagccttgtgcaagtgctctctgccttcacgcttgcttcctttgggagagaaccttcctcttcttgatcggggattcaggaaggagcccaggagcagaggtgagtcctgtgaatgttcatttgtgctggatttgggctccgtgaccaggcatgaatagcgtggtgaacaaagagctccccgttcccttttctgtctctgaataattgcccagtttgttttgataaagcagaaacgtacccgtgacttacaggcctaggaatgcagctctttcctggagaagggggatctgttttctaatctgcaggagaggccttgggcaggccccatgctctgggtcacctcaatgtcacagtttccaaaattaaactcattcaaggctgttatcaccatctctttatttatttaacgtttttctccaagaaaaaatattcatatttttacttataaatacataacattgcgggagaaagaaaaattaggtcgggcacggtggctcacgtctgtaatcccagcactttgggaggtcgaggcgggtggattgcttgagcccaggagtttgagaccagcctgagcaaaagaggaaaccccacctctacttaaaaaaaaaaaaatcaatagccaggcatagtggcatgtgcctgtagtttcagctacttgggaggctgaggtaggaggatcgcttgagcccaagaatttgaggctgcagtgaactatggtcgcaccattgctctccagcctgggtgaaacagccagaccctatctcaaaaaaaaaaaaaaaaaaaaaaaaaggaaaagaaaagaaaaattagaaaaagagcacttttcctaaatctccacacccagagataaaccactgctgggcaggattgctgcaaaaaccatcttcccctagtttgtggtggtttggggttttctcattacatttgtacagtattttgcttttattccgttttctgaccattggcagcatgtcattgtaggtcagaaagcaatgctgagggtattaaaatgctcattttggttttctctccatgtacaattttaaatcaatctctttcccggtgaagatgctattaggttggtgaaacgtaattgcgtcttttgctattacttttagaatatgagaattgtgtgtgctctctagggtaaaacaaacgaacaaataaacaaaaaaacctcacgagcacggcgtacaccttatcccttccttctgtgttctaaacaaagcacaaatgatatctaaggtctttttctcttcgacagacagaaaattattggagatgtagcaattcagtgttagacatccatcaataatgtaagaagtgcattgattcggtctggaaaggccggaaaacttgaagcaaaggcaggaagactgtaagcagggagggggcttccaggtcacagataggtgagagaggaacagttgccttcttttgagtttctgatgagcctttccaaaggaggcaatcagatacgcatctatctcagtgagcaaaggggggactttgactagaatgggaggcagaggccctaagcagttccccgcttgacttttccctttagcttattgacttgcgggccttgagatttattttcctttcacaaagctcattgtctttctcagaagactggttttgtgcctgaatcctgctaggagcaaacacccctcccagcatccccgaaaaggcgttgaggggaaatccctcaaccaatcgcttctctcccactcacaccctggggtttcgcagccctgcggaccttgcccacccctcctctctgccctccccgctcccacaccagctgtgtctatccttggtcaggtttcacctggacagacaccacggccacttctaggctctcagtgcctgctggctccagtgtgtcctcactcactggccgctcggcccttctaaaagtggccaggtcactcccctggttactcagaggcagaaacccaacacatctgcatgctcctgtctctttatcttctatgcatgcccatgtcctgtcaacgaaaagaagcgaactctgtagaatatttgaagagatttattctgagccaaataagagtgaccatggcccatgacacagccctcaggaggacccaagaacgtgtgcccaaggtggtcagggtgcagcttgttttatacattttagggaggcatgaggtgtcaatcaaatacatttaagatacacattggtttggtccagaaaggtggaacaactcaaagtcagggggcttccagcttatacatagatttaaacatttcctggttgacaattggttgagttcatctaaagacctgggatcctaggaggctgaggcaggagaatcacttgaacccgggaggcggagcttgcagtgagccaagatcgcgccattgcactccagcctgggcaacagagcaagactccgtctcaaaaaaataaaaaagaaagattaaaaaaaaaaaaaaaaaaccctgggatccctagaaaagaaatcttcaggttaagagaaaagattgtggagaccaaggttattttgaagtcttgtagcggctgcccttagagacaatagatgacaattgtttcctattcagacttttaaaaggtgctagagtcttagtcaatcttttcaggattggaagggtccggtagaaaaagatgtgaatatctatgtgaatagagattctttacatctttacagatgcaaatttttccccacaaaggacagctttgcagggccatttcaagatatggcaaagaaacatgtttttgggtaaaatattttgattttcttattggtctcatgttatgccagagtcagattggaaagtaagtcacaatatatagttaaatgaaacccttctgatgagaatttttggtttgtagggcatgactctccagaccccttagataggaatttgggcaagataaaaagaaaaatcagagcttcgtcctcagtcccatgcacaagccacatggggtcagaccactgcagtaccctgaaggtgacctcttgctgcctgcaactctaattgttatcttccatctcattcctttcctgctctacaccctgggctctccctcacttctcggcgagactgaggggccgcccctctgtgctttgggggtcgcccgtttccctctgtggacagaacatttccaagtgtgggcaatggtcgccccctctcccggcagcacctacccctagcaatgaaggcgaatgcgtctctccttcatgcagcactcagtgcctgcagagtcctctaggcctttttccttcacactgacactcccagttctgttttcaagtctggacctcctgggctcaagcaaatcctcccacttccgcctcccaaagtgctgggattccaggcatgagccaccacgcgcagcctctcattgtatttctgatcttcataccctctactcagattcttttgtgtatcatccaagctttgatctttccccgcttcccccttccaaatcaggactctctctctgcatttctggacattaggaatcacccctgccctgggctcgggaagcagaagacaaaataatctgcttccggacactgggattctctcatcactttgtgatcactcatgggctatgaaagctgataaaggggatggagaccctatgaccactttcttcctctttctctgaagaccatctggctgtgtattgaaacacgttttacattcttaacatagtattaaacatttttgaagccttttcactcgggaagagcattcctttatagattttgatcattgttttaagatatttttgctattgatatcatgaacgggaatcaaagttcccctaattacttacttactgttttatttataatcaggtcaatttctgctgtcaatgtgattgtggacatctttatgtcttacaggaagtagagagagagacaacatgttacatctgcaccattcttggtaagatacaattatatgcactcattagtagtctcctttctttctttctttctttctcttccttccttcccttctttctcttcttttttttttttttttttttttttttgagacggagtctcactctgtcgcccaggctggagtgcagtggcgcgatctcggctcactgcaagctccgcctcccgggttcacaccattctcctgcctcagcctcccgagtagctgggactacaggcgcctgccaccacgcccggctaattttttgtatttttagtagagacggggtttcaccgtgttagccaggatggtctcgatctcctgacctcgtgatccgcccgcctcggcctcccaaagtgctgggattacaggcgtgagccaccgcgcccggcctcttttctttctttctttctctttctttctttctttctttctttctctctctctttcttccttccttcccttctttattttttttcctttcttatatagagacagggtctcaccatgttgctcaagctggtcttaaacacctgggctcaggcaatgctcccaccttggcctcccaacgtgctcagataatgggcatgagccaccacgcctgaccgcttctggatctcttgatggtgctttctcagaatgcactgatagtgatttatcctgcatctggagaatgaagcatgagacccgtgattaatagatgtgctccaggctcccttgatttgatgttgccccaggcagcctcagaaggaattgtatttcattctctgcaaatcaggtgggcatcaaccgctaccatcggccaggtgtctggttttccagggaaaatcagggtttcccctactacaaaccttggagactcagattacatctttactgcatcccactggggattgggacactatggccctgctgtccatgtgcattcccagggtggcatcgatgaaagaggcagcaatgatagtggcaggctgtatgtcaccaacccctgcggaaatgttccctcatggtacgcaactaccagggctttctcctccaggctggaacctccttcacctccaaacccacttctcatcagataccagtgggctaaagaagtcagtcctgggtattttcatctgtgtgctacaatgaacagagggttttcatagactcagaagtagcagctcactgtgttctcaccttgccccaagcttgtgtctcttccttgctctgctgggtggtccaaaccctaaccccagcctccattccctatgttcaacacagtttgcttaaggaagaacaatgaagaagagggaatggagaaggggcaatagctgttctggggacccgatccatccaagaaaccatgactaaggcaggctttctggctgtttttgctttttcttgttgctgttgtagttttgagacagccttgctctgttgccctgcagtggtgcgatctcagctcgctgcagcctcaacctcccaggctcaagcgatcctcccacctcagccttcccaggagttgggactacaggcacgtgccaccacgcccagctaagctgtgtatttcttgtagagatgagttttcaccatgttgcgcaggctggtcttgaactcctgtggtaaagcaatccacccgctgcagcctcacaaaatactgagattacaggagagagccactgcaccccaccaaggctttctgttaatcatgagtttaatcacttaacaacagactttacagcatcaaaaaaaacccaaaaaacttcaaggccaaataaagccatcaacggtatcagttaattgtaaccagagaaaaacaatcaaatgcctaagagatgtcctcaaagctattctgaaatgtgatgataatatcaatacctcttaaaatagtgatgccaacttcccccatacacaagttctgcaaatgagatggacaggagcatgacgcagtctctgacagtttgtgtttcaggagctggctgccagcgatgctcgctgtactgctaagtttggcaccatcagcttccagcgacatttccgcctcccgaccgaacatccttcttctgatggcggacgaccttggcattggggacattggctgctatggcaacaacaccatgaggcaagggacagagaattactcacctggtgcccccaatgcagacaccagaagaaagagaagccactgaaaatgcatataacccttgatcttggcagttcacacttcaagagttctgcacttctgcgttttctaactctccctaatgttactttcttcccatgccagcactaacctcacctcaatccatcctacatatgactgctcatttcatttttatttttatttatttatttttattttttatttttctctgagacaaagtcttgctctgtggtccaggctggactgcactggtacaatcacagctcactgcagccttgacctcccaggttcaagtgatcctcctgcctcagcctcccgagtaattctgggactgcaggtgcccaccatcatgcttgggtaatttgtaagtttcttgtagaggtggggttttgccgtgttgcccagcctcgtctcgaacttctgggctcaagtgatccacacacctcagcctcccaaagtgctggtattgcagatgtaaaccaccatacctggcctcatttcttttctttttttttttttttttgagacagaatctcactgtgttgcccaggctggagtgcagtggtgcgatctcggctcactgcaacctccgcctctgcgattccagtgattctcctgccttactctccagagtagctgggattacaggcgcccgccaccatgcctggataatttttctatttttagtagagacagggttttgccatattggccaggctggtctcgaactcctggcctcaagtgattcacccgcttcagcctcccaaagtgctgggactacaggtgtgagccactgtgcctggcctcatttcattttttaaatatgatttttatccacccagtacataatggacaatgctttagaaatgctatcagccgggcatgactgtaataccagccctttgggaggctgaggcaggaggatcacttaaggccaggagttcaagaccagcctgggaaacatagtgaaatcctgtctctagaaaatataaacattaattttttttttttgagacggagtctcgctctgtcacccaggctggagtgcagtggcatgatcttggctcactgccagctccgtctcccgggtccacgccattctcctgcctcagcctcccaagtagcttggactacaggcgcccaccaccacaccccgctaattttttgtatttttaatagagacggggtttcatcatgttagccaggatggtctcaatctcctgacctcgtgatctgcctgcctcagcctcccaaagtgctgagattacaggcgtgagccaccacgcctggcacattaatttttaaattaaaaaaaaaattagccaggcatgatggcatgcacctgtaatcctagttattcaagagggtgaggtgtgggaggatcacttgagcccaggagtttaaggttgcagtgagctgtgatcagaccactgcactctgggcgacagagaccctgtttcaaaaagtaggctggccgtggtggctcacgcctgtaatcccagcactttgggaggccaaggcaggctgatcacttggaggtcaggagttcgagaccagcctggccaacatggtgaaacccccgtctctactaaaaatacaaaaattagctgggcatggtggcgggcacctgtaatcccagctacttgggaggctgaggcaggagaatcacttgaacccgggagggggaggttgtagtgagactcaaatagtgccactgcactccagcctgggtgacagagtgagactcagtctcaaaatacaaacaaataaacaaacatacaggagaaatcagtgtcgttgcctgtaagcagaagaccaatattgatctctgtctcactcccaaccctatccatctagccaagcccagcacttatgcgggatttcaatcctcccctgctgaaaagctctgcttcagacagacaagtccacaccctcctaatgccaaaatatggcgtgtccatctgtcaagagctagagctagtccgtcctcctgtccgaattccagccttccaccctcatgtagtacttacagtgtgttggcgtccatgaagtcaaaccttcccatgaacactgtgagctccagagaaggtgccctgggctctcagttctgcattccctctgaggtcggtctctcagtaccaacagtgccttgtggaaacttagtcactctatctactcattcatttatttattttagagacaggttgtctctctgtcacccaggttgaagtgcagtgttgcaatcacagctcactgcagcttcaaactcctgagctcaagcaatcctccttcctcagtctcccaagtagctggttctacagacatgcaccaccaatcctggctaatttttctatttttgtagatttttttgtagagacagggtctcgccatgttggcccggctggtcttgaactcctggccctaaacgatcctcccgctgtggctttccaaagtgctgggattacaggcatgagccaccgcgtccagccactcattcctatttaaatgagttgatgtttcctcgaaagttcagaagacattagaaatctttgacattacctttgggtcattcctgagaacatcttgaagcactcagcgatgaccagcagaccttctatgaagtagcatgtagctatgcttatgaaaagcctgtctaattttaacaagtaaagctgttaatttgtccctccataggactccgaatattgaccgccttgcagaggacggcgtgaagctgacccaacacatctctgccgcatctttgtgcaccccaagcagagccgccttcctcacgggcagataccctgtgcgatcaggtcagtctctctttacaactgcactagggtgcagcctggtgtattcgtcacagtttctagttcttacattttggtttttttattttttatttaaatagagactggggggtgttctctctatcttgcccatgctggtcttgaaatgctgggctcaaaagatccccgctccttgacctcccagagtgctgggattacaggcatgagccaccgtgcccaggcagcttttatattctgatgctttgacatcttagggctttgctgaccttggcaggactggccctcccagggctagccaattcttagagatagcaaacaagtcacctgggagtgcacctttcatgcataaaccaaacagtccagagcccacacccccaaccatcacttttatgagattttcatatatggggctactctctccttgccctaatccccccagaatcaggtaccagctttctagggacagcccctgcagatgaaagcccacggaaattgtacaacctggccagtcttaagccggcttaccctaccttgcccattactttccaaaaaagaaaaacaataaataagaaaggctttttccatgctttcccctcactccctctgcctcctgaccaaccctggagcttccccatatagtcacacagcatggctcacccctgcgtcctcttgaactgtgagtaataaactatcagaaactgtgagtaataaactatctctccaatgacagtcatctcctgatctgttggccttgccatagctgaatgataaaaccttaataataataatacataacacctacattttaaagcacttgggtagaggctgggcacggtggctcatgcctataatcccagcactttgagaggctgaggcaggcagatcacctgaggtcaggagttcaagaccagcctgaccaacatggggaaactccgtctctactgaaaatacaaaaattagctgggcgtgatgatgagtgcctgtaatcccagctacttggaaggctgaggcagtataattgcttgaacccgggaggcggagattgcagtgagccgagatggcgccactgcactccagcctgggtgacagagcaagactctgtcccaaaacaaacaaacaaacaaaaaaacccttgggtagagatttggaatgtctggagagcagaataaaattttatcagtggctaccaaccttgtcagtacgttagaatcatccagaggatattcccaccatcccaaagcccaagttccacccaagaccaatgaaaattagcacccctggggtgataaccaggcgtcagaatattttgaagctccccacacgattccaatgggcagacaactttgagaacctttagattatatcaagagtttgatgaaattataaaatcatttttagttcaggcacaatggctcatgtttctaatcccaacactttaggaggctgaggtgggaggatttacttgagtctaggagttcaagaccagcctgggcaacatagtgagaccccgtctctgccaaaaaattaaaaatattagctaggcatggtgatgagcccctatagtcccagctacttgagagactgaagtgggaggatcagttgagcccaggagttcaaggctgcagtgatctatagtcatgccactgcactcaagcctgggtgacagagtgagaccctgtctctgcaaaaaatttaaaaattagccaggtgtggtggtgcacacctgtagtcccagctactcaggtagctgaggtgggaggatcgtttgagcccaggtggttgagactgcagtggacattgattacaccactgcattccagcctggacgacagaacaagaccccatctttaaataaattaattaacaaacaaaaaaccatttaaatttttagtcctttttcactgaattatattgcttataacctgcacataacaggaaagtccatcttctcgctaaggttttcaataaattaatcatttactttgctgccaaaaatgcaatccactaggcaaagtcatataggaagtccattttcaatttaattttaagtaagagagatttttaccaagtgttctatttttgaataaataataaataacaaacaggaaaaaaaatgtggaacagtaattctttctcttaataattgctcaaagggatggtttccagcattggttaccgtgttcttcagtggaccggagcatctggaggtcttccaacaaatgagacaacttttgcaaaaatactgaaagagaaaggctatgccactggactcattggtatgtacgtttttaaaagtggtaagcacatgacttttatatggaagggacattcagctaaagagtttggaaaggaaagtgggtgaggtgctgtgggatttcccactagacagaaagctgcatgtatctaggaaccatgttcctttccaggttgttttctgcaaagtagatactcaagaaataccagctcaggcaaggtggctcatgcctataatcccagtactttgagaggccgaggcggaaggattgcttgagcccagaagtttgaaacccgcctgggcaacatagcaagaccccacgtctacaaaaaaatacataaaaataaattaaaaaataaataaaatgtgctcatgcctatggcatatgttccaagctccattgcacaacacataattgcttctttgttctgtgggatcctctcccacccttcacatggactttttgtcttagacatgaatgtcttagactgaacaccttcagctcttttctggttggtttatggatcaacttggctagtttagtgctgccatctaaatgtttgtgtccccctaaaattcctatgttgaaacccttaccccccaggtgatggtggcaggaggtgaagcctttgggaagtgatgaggtcgtgaaggtggagcctcatgtgtgggattagtgcccttacaaaagtgactctggtcaggcgcggtggctcatgcctgtaatcccagcactttgggaggccaaggtgggtggatcgcttgaggccaggactttgagaccagcctgggcagcatggcgaaaccctgtctctacgaaaaagaaaaagaaagaaagaaaaggaacatcaacttaatgaaatatttggcatctcaaacaatgttctcgtaggccatgataaaaaaaaataagaaaaaatatattcttgcatcaaaaatttctgtaatgctacctatttttccccttggtgtgtatgaaaatgtctttactagatttagtacctccctgtcagcttccataactaacatggttatttttctacaagtcaacaaacatgtcatgtattggatgaaaaataaaattaatgacaacagttccttgagaggagaccaagttgccattatcattattgtgttatagtaatgattgttatcaacagttccatttattgataacaaacaacatgactagtggatacaatgagtataaaattcaataaactatatttctaaaaattaaaaattataaaatgttctttgtttaattttttaccaaaaaaaaaaaaaaaacaaattctggggagattcagtcatcgctgtcaaacaaaggtgtattttttccaatagactttttttttttttttaaacagggtactcactctgttactcaggctagagggcaatggtgcagtcacagctcactgcagtctcgacctcccagactcaagtgatcctcccaccttagtctcccaagcagttggtactacaggcttgcaccaccatgcccggttaattttttcttttttttctttttttttttttttttttttgtagagatggggtcttcccatgctacccaggctggtctccagcaatcctgggcacaaggaatcctctcacctcggcctcccaaagtgctgggattatagttgtgaaccaccatgcctggccaactataatttttctaagacagaagagtctatccttaagggatatccattgggaaatcatgaggttttccagatggcagacagcattggggtggttgacatctctttgtcaacaccatagtagtggctacatggaagcaaagactatattcctttgactgaatttgaaaggtgtgccttgcaaaacccaccacccacttcaaccatggccactatgatagtggtttctcaaagagagaacaattccaaagtccagaagtcttttgcccatgctgctgatatcacatggtgctttccggccttcatcattgcactgcaaaacaaggtgcaatagactaaataatggtcccagagatgtcaggccctaacctctgaatctagcaaatattagcttatatgcaaaaagagtctttgtaaatgtgattaagtgaacaatcttgaggtgagaagatgatcctgaattatccagctgggcccactgtgcaaggacaaggcttcgtttaacatggaggtagaggaagattgggccacagagaggagaaagcagtgtgattaaagtgaggcgaccacaagccaagggatagctggagccaccaggagctgggagaggcaggaaggatcctcccctagagcctctggagagagtatgtgtgtgtctgtgtcctactatcctcttcttataggacacaagttctatcagattaaggcctgtattagtctgttctcacgctgctaataaagacatacccaagactgggtaatttataaagaaaagaggtttaatggacttccagtttcacatggctggggaggcctcacaatcatggtggaaggcaaaggagaagcaaaggcatgtctttcatggcggcaggcaagagggcatgtgcaggggaactcccatttataaaaccatcagatcttgtgagactcattcactaccatgagaacagtgtaggggaaaccacctccatgattcaattatctccacctggctccactcttgacacatagggattattacaattcaaggtgagatttgcatgaggacacagccaaaccatatcagtgcccaaactaatgacctcattttacattaattatcctttgaacaccctgtctccaaacacagtcacattctgaggtcctgggtgttagggcttcaactcatgaatttgaggcaggccaggatccagctcacaatagagtcattgcagatataatcaagtaaagatgaggtctctacagtgggccctactgcgatgactgctgtccttatgagacaagagattaggtcgcagacacacacagaggacaacgccatggaaacatggagatggagactggagtgatgcggccacaagcccagggaggcctggagccctcaggagctgggagaggcaggaaggatcctcccctagagcctccaatttgagtgtggcctggagacactttgatctcagactcctggtctctaggactgggagaggatagatttctgttgtattaagtgaacagttttacagtaatttgttccacctgtcacgggtaactaatattttggttaaagctgacacatggggtcctcattcccctgaaacgatgaggccagattgtggtgcaaataacagctaatgctgcccacacttctttgcaatctcctggccccccagtgtctaacagagtatcaggaatgtgacaaacagtcaatatcgacatgtccagttatgctcagatgcttgtcacatcaacatcctttttgcctctcaggaaaatggcatctgggtctcaactgtgagtcagccagtgatcattgccaccaccctctccatcatggctttgaccatttctacggaatgcctttctccttgatgggtgattgcgcccgctgggaactctcagagaagcgtgtcaacctggaacaaaaactcaacttcctcttccaagtcctggccttggttgccctcacactggtagcagggaagctcacacacctgatacccgtctcgtggatgccggtcatctggtcagccctttcggccgtcctcctcctcgcaagctcctattttgtgggtgctctgattgtccatgccgattgctttctgatgagaaaccacaccatcacggagcagcccatgtgcttccaaagaacgacaccccttattctgcaggaggttgcgtcctttctcaaaaggtcagcagaaaagggtcagcttcctccaagcactcagctttggaatgaaaacgcatcctaaatagtcttcttcagtcaggcatggtggctcattcctgtaatcccagtgcttttggaggctgaggtgggaggatcgcctgaggtcaggagttcgagaccagcctggccaacatggtgaaaccccgtctctactaaaaatacaaaaattagcccaatgtggggctttacaggtgcatgcctgtaatcccagctactcgggaggctgaggtgggagaatcccttgaacctgggaggtggaggttgcagggaggtgaggtcacatcactgcactccagcctgggtgacacagggagaacctgtctcaaaaaaaaaaagtcgttttctttaattgacgtttgaagaatgggatagccatgacctagaaggacaattttttggtaagaatggggcatagatgagggtcagtggagccctgtgacttgccttgtgtccattaaaacattgttacagctgagctgggcatagtggtacacacctgttatcccagctactcgggagactgaggcaagaggataatttgaggccaggagttagagaccagcctggacaacacagcaagaccccatttccacaaaaattttaaaaattagctggctgtggtggcatggacttgtaggcccagctacttgggaggctgaggcaggaggatcacttgagcccaggaggttgaggctatgtagtgaggctatgaagggagcctgggcgacagagcaaggccttgtctcaaaaagaaattgttacaggtcagctggaatttgctactactctggggtcagtcttattccattagcatcctcggatcaccacagacactatttaagtaacctgcatcacctgaagggctttataatcaattataaacttaaaaaaaagtctatcttcagaagtcagatgtcttttggcagaattcagcctgcggtcaattttatggcaaggaaaattcctgtgtgggaccaggagaaatgggatgaaactagttctcagtactacacagctattttcatgctccccaagggcattctagtaaagatggtaacaccatcaaaagtcaccttacctggtgacaatgaggttgtcatcatctcctacaacattcttagataatttttttctttttttttttgagacagagtctcgagctatggcccaggccggactgcagtggtgcaatcttggctcactgcgacctccgctcctgagttcaagcaattcctgtacctcagcctcccaagtagctgggattacaggcatgcaccaccatgctcagataacttttatatttttaatagagatgggttttgccatgttggccaggctggtcttgaactcctgacctcaagtgatctacccgccttggcttcccaaagtgctgggattacaggcgtgagccactgcatccagcctcttagagagttcttcatggcaatacctaatgtatgacagaaaggacattgacaattagcttgcaaattaaagcagggtaagactgttgtgttctttttgattttaaatgtgacaggatctggctatgttgcccaggctggtctcgaactcctgggctcaagtgatcctcctgcctcagcctcccaaagtgctgagattacaggcatgagacaccatgcccagcctgacgtgttctaattaaggctaacaccttcaccattgctcttaggcttcaaggatctagattagaccatgaaggccgggtgaagggagggagaagctaaaacactgctttcaaggaggacaatggaaataatatgaataacccaatatgcctcatttgtaaagtgtgttttttataactattttatgtcctaatcctcactacgtgatagcaattataaagaaaatggaatgtgtggcaccacttattctataagctaaagcttgaggttaaaaatagatattgaaataattgaacaaaataaaagtcatgtcagtaacctacagttcttttaactttgcattaagcagtagagttagaacattataatattcgggggggaaaagatgcattagatcagtgtgggtttttatttatttatttatttattttgagacaggatttcaatccggttgtccaggctgaagtgcagtggcgcaatctcagctcaccgcaacctcctcctcccagggtcaagcaatcctcccaccccaccctcctgagcagttgggagtacaggtgcatgtcaccacatcccgctaatttttgtatttttagtagagatggggtcttgctatgtttcccatgctggtcttgaactcctaggctgaagcaatgctcctgcctcagcctcccaaaatgctgggattgcaggtgtgagccaccacgcctggcccagtgtggatttttaaatagatttcagaagggaagggaaaagtcatgatgttaaagagtcttaaacaagacgtgtgttgtggtgcatgcctgtgatcccagctacttgggaggctgaggcaggagaattgcttgaacctgggaggcagaggttgcagtgagctgagatcgtgccactgcacccccgcctgggcgacagagccacaatccgtctcaaaatgaaaaacagagagaggtaacagaccagaaaggcatggtggctcacgcctgtaatcccaacactttggaaggccgagatgggcaggggcaggtcacttgagccgaggagttcaagaccagcctagtaaacatagtgagaccctgtctctacaaaaaaaaaaaaaaaaaaaaaaaaaaattagctgggcctgttagcacatgcctgtggccccagctacttgggaggctgaggtgggaggatcacttgagcctgggagattgaggctgcagtgagctgagatcatgtcactgcactccagcctgggtaacagagcaaggccctgtctttaaaatagccaaaaaaaaaaaaaaaaaaaaaaaaggaagattgttaaatataagaattaattttccgttgaagaagagttttgagtgtttctttttggtgagcagagttgagaagacatttgagtaatgatgtgacaagtgagatccgtatttagtatctacaggacttcaatctctgttttaccaaaaaagtcaccttaattgcttcgtatttatttttaggaataagcatgggcctttcctcctctttgtttcctttctacacgttcacatccctcttatcactatggagaacttcctcgggaagagtctccacgggctgtatggggacaacgtagaggagatggactggatggtaggtaagtgcacttccagggaaaatgggctgcttcccttccagcaatagaagcaggaaaggaaacaaagaatgagaaggttaaagacagaagatgcagaatagcgattgcagtgcgattggattttaagagtgcaaaatattatagcacagatcttcactgcattagcagagggtgaattccataacacatgcacgggaggcaatgcgattcggccaaagatgtccacatcttaatcccatgtggcagaaagctgtccactccctagacagaataatggctgcagagacatccacgtcctaatcttgatgtggtagacataaaaatggccccaaagatagccactttctaatccccatgtgggagacagaataatggccccaaagatgtccacatcctaatccccatgtgctagacagaataatgactccaaagatgtccacgtcttaatccccatgtgttagagagaataatgacctcagagatttccacgtctgaattcccaagtggcatacagaattttggccccaaagatgtctacgtcctattgccatgtggtagacaaacaaaagaaagagcagataaaattcctctccgctgtagagtggctagtggctccactgcactgaaaataggactaaatttcctcctatcacctacaaaagccccatgacctgctgctgcccagatcctagtctgacctctacccaacccccttgtcctccccacctgctgcattctggccacgtggacgccacacagtatctttcacatttgtcccctgtcagggcttccacacctgctgttccctcctggaatgcttcctcaggcttcactggctcctcttcagagcctgccctgacgcacccctaaagtagctcctccccaatcatcttctcccccattctcctgtggtccttttttgttttgcctttgttttcctcctcctcttcctcctttctcctcctccccctcttcttcttcttcttcttcttattcttcttcttcatattcctcctcctcctcctccttcttcttcctcttccacttcttcctcttcttcttctttcttctttctgtcttctttcttctttttttcctaacacagcatcaccattgcttctcttcgtgaccatgtgttaggtaggttgattttccatttcccccaggggaatataaactcctgtggggccggattgtcttgcctcattccctcattatatttcctgggtttagaacaggatggaaggggaatattgcttgagtgagtcagggctgggtgagcacctgtatatgggcacagcacatccctgcctcccaaaaaagaacttaggaaccgcagggtttaggtggtggtgggctgcgaatcccaggatcctcagaataattgccatcagagatttgggtgaacgacgtatttaaaaaaaaaaaattgtttcctcaacaagctaggcatggaaggagaaaaagttaattgtgtgtgtgtgtgtggcagggtctcactttttgttttgtttttttttttttgttttttttgttttttttttgagaccgagtctcactctgttgcccaggctggagtgcaatggcacggtctcagctcactgcaacctccgcctcccgggttcaagcaattctcctgcctcagcctccggagtagctgggtttacaggcacccgccaccatgcctggctaatttttgtacttttagtagagatggggtttcaccatgttggccaggctggtctcgaactgctgaccttgtgatccgcccgcctcagcctcccaaagtgctgggattacagggatgagccactgcgcctggccgacagggtctcactcttacccaggctggagtgcagtggtgcaaccgtggctcactgcaccctgccttcccaggctcaagcaatcctcccacctcagcctcccaagtacctgggaccacaggtgtgcactaccacacccggctaatttttttattatttgtagagacaagttcttgctgtgttgttcaggctggtctcaaactcataggctcaaagagcctcccacctcagcctctcaaattgctgagatttcaggcatgagccactgtgcccggccaactgtgagtgacattaatgacatgagttcccttgtgtgtggctgcaagaagctcagggtcacttttgaggactggtctgcattttcagtctatgctttcttctcaggaatattcacatgcctcacttttttttttttttttttttttttttttttgagaccgagtctcactctgtcacccaggctggagcgcagtggcgtgatctcagctcacagcaatctccacttcccgggtttaagctattctcctgcctcagcctcccaagtagctggtactacaagcatgtgccaccacgcccggctaatttttgtatttttagtagagatgtagtttcatcatgttggccaggctggtctacaactcctgaccccaaatgatcctcctgcctcggcctcctaaagtgctgggattacaagtgtgagccactgtgcccagcctgcatgctgcacttttaagtttttgatattttgtccttgtacgttgcctaaaattctgaccaaaggatggggtgcatataaagtcatacatcaatctccaacaaaggatatcaaaattatccaacagctgacttccattatgcgttaaaactaaggcttcattcttgtggctagcccccgaatgctaaagcatacacttcagagctgcatttctgatatttttccatttcgacggccccaaaaacatctgttctttgcaggacggatccttgacactttggacgtggagggtttgagcaacagcaccctcatttattttacgtcggatcacggcggttccctagagaatcaacttggaaacacccagtatggtggctggaatggaatttataaaggtaagactgagatgctcccagatcttcatcttgcaagtttatctcttccctgcaattcccagcagggcaatctattccaggagggtcaatattattgctcagggacagtgatttttcctatccagggcaaaagtggtaatttgacatactccagtttgaatttttgttcctggaccaaactgagggtcaggctgcttattctggtggttcaaaaatgagatgcagatgaactgggagaggagggagtttatttctgtaaccggttacagggaggtctggaaattgttgccagaccaactcaaaattacaaagttctccagagcttctatttctaagctgtatgtctgcgtgtaagtgtgcactcatctaaagacattagtgatgaacttcttctaatctgtaactaaggtctgagtcccggagaccctcctctggagactaagtaaattgacttaatctaaatgggtccaggtggccgggcacggtggttcatgcctgtaatcccagcactttgggaagccgaggtgcgtggatcacctgaagtcaggaatttgaggccaacctggccaacatggtgaaacctcgcctctactaaaaatacaaaaattagccgggcatggtggcacacgcctgtagtcccagctactcaggaggctgaggcagaagaatcgcttgaacctgggaggcggaggttgcagtgagctgagatcgcgccactgcactccagcctaagcaatagagagagtctccatctcaacaacaaaaataataaaataaataaataaacaaataaataaatgggtccaggtgccagggctgattacccttaccttgtctcctgctaaatcgcggaggtctggggagttgtttcagacctctaataaaacttgtttaatcctaaaagggtcctgctaagaattccttggttatcttgtcacgcttcaaggcccaggagaggcctgggcagaactcctggggggcttttgtgacatcccggcctttgtatacaggcgctggttgtttcagcttttgctatttaacttcaccactcgtcagtgctgaaacagttgttacggaggcctgtgttagtgagacgtggcctgccacgtttttgtgcacaattaaggaatttttagtagattatcagagttgtgtaaccatcatcatgtcgatgaaaagagctaaactctgtaaaacatttgaagaggtttattctgagccaaataggagtgaccatggcctgtgacacagccctcaggaggtcccgagaacgtgtgcccaagatggtcaaggcgcagcttggttttatacattttagggaggcatgagacagcaatcaaatacatttaagagacacattggtttggtccagaaaggtgggacaactcaaagccacggggcttccagcctacaggtagatttaaacatttcctggttgacaattcgttgtttctctaaagacctgggatcaacagaaaggaatgtctgggttaagataaaggattgtggaggccaggcacagtggctcacacttgtaatcccaacgctttgggaggccaaggcgggtggatcacttgaggttaggagttcgagaccagcctggccaacatggtgaaactctgtctctactaaaaatacaaaaattagctgggtgtggtggtgcgtgcctgtaatcccagctacttgggaggctgaggcaggagaatccgttgaacctgggaggcggaggttgcagtgagccaagactgtgccactgtactccagcctgggcgacaaagcgaaactccatctcaaaaaaaaaaaaaaaaaaaaaaaaagattgtggacacccaagttcttatttgcagaggaagccttcaggtactaggcttcagagacaagaggttgtaacatgcttcttatcagacctaaaggctgtgtggatgttaatgccagagaggaatcatgaggcatgttcgactcccgcttcctgtcacggcctgaaacagcctctcaggttaagtttttaaagagctctgggtgaggaggaagtccattcagatggttgggggtccttagaattttatttttgttttacaatcactattttcattcgtaaaatttattgttattatttttatttatttttattgagacagtctggctctatctcccaggctggagtacagtggtacgatcttggctcaccgcaacctttgcctcctgggctcaagtgatcctcctgtctcagcgatcataagtagctgggactacaggtgcatgcaaccactcctggctaatttttgtatttttgtagagatggggttttgccatgttgcccaggctggtctcaaactcctcacctcaagtgatcctcccacgttggcatcccaaggtgctgggatgacagcaggcatgagccaccacatgtggtccaccactgtttatttcagaacatttcatcacctcacaaaaaaatcctctactcatagcagtcactcccttttcccccgtgctaacatccatcacccaaaaacttatttttgatttgtttattatttaatttttaaaattatcttttgtaaagatagggtcttgttatgttgcccaggctggtctgaaactcctgaactcaagcagtcctcccagctgggcctcccaaagtgctgggattccaggcgtgagccaccatgcctggccacaaaattattttgtatcattgtatattttcctactctagacatttatgtaaatgaaatcatgcaatatgtggagtttttttgtttttacttagcatgatgcctctgaggttcatctgtgttgtggaaatgtttcattcctttccatggctgaatatattccattgtgtggactcaggtttgaattttaccttcagacaatgcatccaagaaggataaggccaggcgcagtggctctcacctgtaatcccagcactttgggagaccgaggcaggcagatcacttgaggtcaggagtttgagaccagcctggccaacatggtgaaacctcatctctactaaaaatacaaaaattagccaggcgtggtggtgcacgcctgtaatcccagctgaggaggctgaggcaggagaattgcttgaacctgggaggtgaaggttgcagtcagctgagattgtgccactgcactctcgcctgggtgacagagtaagactctgtctcaaaaaaaaaaaaaaaaaaaaaaaaggtagaagggtagacacctagctggccacattatattcaaacctgtattccattgtttccaaacacgccattctttcgtgtaccacaaagatgctaaaatgtgctgccccgtgtacatgacttcacactgttgtgcttacacattttgtcttctccctgcttagagagctttatttttcagtccttgaaagagcctttttaggctaatattggcaaatatacctatgatgtatatttgctttgaagtagatggatccatcagtctagtacatatgtaaaacgggatatataaatgccaactacatccactaatgccttcccacaacaacttcacattgaaggcctgactcctcagaaaccttctttatctcattgccattgacgttaatgtatcctctacccaatctggttctctgtgccatcaagaatgtcagtattataaactggcggagctttaaacaacaggaatttatcctgtcccagccctggagaccaggagtttgagatcaacgtgtctcagggaaatgttcccgccagaagctctaggggaggctcctccctgcctctgccaactcctgggggccccaggtgtccctgagcttgtggccacatcactccagtctctgcctccgtctctatgtggccttctcctctgtgtctgtgtctcctcttctgtctcttagaatgctgtcattggacttagagtccatccttctccgcgacgatcttgagatacttaattgcatctacaaggacccctttttaaaataaggtcccattcacagaatctggggatcagggtgtggatatatgtttcaggaggactaaagtgcaatccattgcaattgaatccacttctttctggatgctctaggggaggctccttcctgcctctcccagttaccgggggctccaggcatccctgggcttgtggccgcatcactccagtctctgcctctgtctccacgtgaccttcttctctgtgtccgtgtctcctcttctgtctcttagaaggacatctgtcattgcatttagggccaccctaatccaggattatctcaaggtccttaacttgattatatctgcaaaccccctatttccaaataaagtctcatttataggctctgggagatatgacatgaacatgttttggggtcactgttcaatacgttatagttgtatccactttcttcttgaggctctaggggaggatccttcctgctgctcccagcgcctgggggttccaggagtccctgggcttgtggccacatcactccagtctttgcctccgtctccacatggccttctcctctgtgtctgtgtcttctaagaacaagagtcatttgtagtgaaggacctaacttaatccaatgcacactaaccaataacaaggttaataaaaaatataaaatcaaacctctacaggggaactacatgagattgaatgttttaatgtcactaaaacagagagagagagagagagaaattgagagactcagggagagagaaacttcaaacaagtgaaacaagcagaaaagttaaatcagccaggctgagcatctatttctggtttttaaccactttcttttgtttctgttcaaacccaggtgggaagggcatgggaggatgggaaggtgggatccgcgtgcccgggatcttccgctggcccggggtgctcccggccggccgagtgattggcgagcccacgagtctgatggacgtgttccccaccgtggtccggctggcgggcggcgaggtgccccaggacaggtacagaacaacccaaagaaacaattcagctttgcacagacacagcaacacttatggcaaatgaacatgtcactttggctttgcagtaaggcgtccctgaaattgttccccgaccaaaccgagggtcgggctgcttattctcatggcccaataacgagatgcaaatgaacgaggaaagaaaggagttttatttctgtaaccagatacggggagaaggctggaaatgatcactagaccaactcaaaattacaaagttttccagagcttctataccttctaagctgtatgtccacatgtaagcgtgcatccatctaaagacataagtgattcaacttcctttcatctagaactaaggtctgagtcctgaggaccttcctctggagcctcagtaagttgacttaatctagatggttccaggtgctggggtgattacccttatcttgtctcctgctaaatcatggaggtttggggagttcttttagaccccccaataaaacttgtttgtggaggtctggggagttccttcagatccccaataaaacttgtttaatcctaaatgggtcctgttaagaatcccttcattattttatcgcgcttcaaggtccaggaaaggcctgggtagaactcttagtgggcttttgttacattccagcctttgggtgctggctctttcagcttttttttcttctttttttttttttgagactgagtctcactcagttgcccaggctggagtgcagtggtgcgatctaggctcactgcaacctccgcctcctgggttcaagcgatcctcctgcctcagcctcccgagtagctgggattacaggcacacaccagcacacctggctaatttttgtgtttttagttgagacggggtttcaccatgttggccaggctgatcccgaattcctgacctcaggtgatccacccgcctcgacctcccaaagtgctgggattacacgcacgagccactgtgcctggccaattaattactttttagccaaaggtgacgtttggtggtgactaacgtgggcagctgctgcattcttcttctaagcgtgctaatgcacacacatgccttccatccatctgcgttcacacccagactttccctccactgatacaacataaggagagtgcaccacctggggctgggactggtggatgctggagggacaaatgtccagagtccctgttccaaccctgagccatgccatgttccttcctgcagagtgattgacggccaagaccttctgcccttgctcctggggacagcccaacactcagaccacgagttcctgatgcattattgtgagaggtttctgcacgcagccaggtggcatcaacgggacagtgagtaggggagccccttcctaacacccttagggaaagagtccctctgtgcaggaaagcaccatgccctagaacaggctagggatggagctgcattccagagtccatctccatgtctccgcacttccgtttttctccacgagctttttaaatttagtttttgtcaatatgtgtccctctcattccagcgacatgccttctgagatcacctgccaatcgtcttaaaacgatggggagtcgttacctatagtttcagcaccatgtatgggctatatttcattctttcttccctgcactatatgaagtgcaacttttatcatcatcacacacacgtatgtgcatgcatacacacacgcacgcacacatgcttgcacacacatgtgttcaagacttttctagtctcttttttttcttatttttttgtaattatttttttgagactagtctttgtcgctcaggctggagtgcaactgcagtctcccgggttcaagtgattctcctgcctcagcctcctgagtagctgggattacaggtgcccaccactacacctggctaatttcttgtatttttagtagagatggggtttcaccatgttgggcaagctgttcttgaacccctggcctcaagtgatccaccctcctcggcctcccaaagtgctgggatgacaggcatgagccaccacgcctggtctccaatttttctttattaagttgaaacaaggtctcagtatgttgcccaggcaactcctgggctcaagcaatccacccatcttggcctcccaaaatgctgaaattgcaggtgtgagccaccacgcccagccttttgtagtctattttatgcatctagatgtgcttccaaatgttttaatcacctgaccttaacacgacttcatcttctttgtgaacaattacaggcgcactcctgtaatcccagctacttgtgaggctgaggcaggagaatcacttgaacccaggaggcggaggttgcaccactgcactctagcctgggcgacagagcaagactctgtctcaaataaaaaaaaaaaaaaagaaaagaaaagaaaagaaaagaaaaaactgactgagtgcaattcacaggcacttcgtgctttcacagtgttgtgcaacctccacgtctatgtagctccagaacattttcatcacgccaaaagcagacactgttcctatcagcagtcactctccatttcacaccctgcagaccctggaaaccactactctacttcctgtcattatgtgtttccctatccttgacattcaatgtgaatggaatcatgcaatgtgtgctcttttgtaacttctttctctgagcgtagtattttgaaagttcgttgatgttgcagcctgtgtcattgtgtcattccttctcatagctgcagagtatgccatgtaagatgtaccatgttttgtttatctgtccatccatcgatggacgcttgggttaggcctaccttttagccctatgaagatgccattctccagcaaggcaccctatttctctatgccaactctgtaatgattatctttccaccaggaggaacaatgtggaaagtccactttgtgacgcctgtgttccagccagagggagccggtgcctgctatggaagaaaggtctgcccgtgctttggggaaaaagtagtccaccacgatccacctttgctctttgacctctcaagagacccttctgagacccacatcctcacaccagcctcagagcccgtgttctatcaggtgatggaacgagtccagcaggcggtgtgggaacaccagcggacactcagcccagttcctctgcagctggacaggctgggcaacatctggagaccgtggctgcagccctgctgtggcccgttccccctctgctggtgccttagggaagatgacccacaataaatgtctgcagtgaaaagctggagccccgattcctaaattttgtcactcaaattgaaacaaaccagctggccatggtggttgtcatcccagcactttaggaggccaccacaggaggatcactcccgtgatcaaaaccaacctgggcaacatgatgaaactctagctctacaaaac

SEQ ID NO: 580 - DNA, 4993 bp, Homo sapiens
ccgcctggctttggactcttctcctcctccacctcctcctcctcctcccgcgccgccgcctcctcctcctcttcctctccgcgccttcgctacgcgcccggccgcccgaggcagatccaggcggcggcggaggcggcgggcgcaggagagcggctcccagggctgaagtggccgccaccaccgccgcctgcgcctggagcccggtggccgccggacgcaccgcgcggatcgggagcgggagtcgaggcggcgcggaggcgcagggctcgcaggggcgggcgggcgcgctggccatgctcctggacgcgggtccgcagttcccggccatcggggtgggcagcttcgcgcgccaccatcaccactccgccgcggcggcggcggcggctgccgccgagatgcaggaccgtgaactgagcctggcggcggcgcagaacggcttcgttgactccgccgccgcgcacatgggagccttcaagctcaacccgggcgcgcacgagctgtccccgggccagagctcggcgttcacgtcgcagggccccggcgcctaccccggctccgctgcggctgccgctgcggccgcagcgctcgggccccacgccgcgcacgttggctcctactctgggccgcccttcaactccacccgggacttcctgttccgcagccgcggcttcggggactcggcgccgggcggcgggcagcacgggctgttcgggccgggcgcgggcggcctgcaccacgcgcactcggacgcgcagggccacctcctcttcccgggcctgccagagcagcacgggccgcacggctcgcagaatgtgctcaacgggcagatgcgcctcgggctgcccggcgaggtgttcgggcgctcggagcaataccgccaggtggccagcccgcggaccgacccctactcggcggcgcaactccacaaccagtacggccccatgaatatgaacatgggtatgaacatggcagcagccgcggcccaccaccaccaccaccaccaccaccaccccggtgcctttttccgctatatgcggcagcagtgcatcaagcaggagctaatctgcaagtggatcgaccccgagcaactgagcaatcccaagaagagctgcaacaaaactttcagcaccatgcacgagctggtgacacacgtctcggtggagcacgtcggcggcccggagcagagcaaccacgtctgcttctgggaggagtgtccgcgcgagggcaagcccttcaaggccaaatacaaactggtcaaccacatccgcgtgcacacaggcgagaaacccttcccctgccccttcccgggctgtggcaaagtcttcgcgcgctccgagaacctcaagatccacaaaaggacccacacaggtaaccgcgggctgggacagggaccaggcgcggaggggagacacgcacaggctgagactcaggctgtgggtgccgacgctgggcgcagaccgccagccggggacctgggatgggaggtgtttttgcgtgtacgaaagagccagcagcttgtttctgttggacgatgacaatattattgggctaggtttttccatgtgcggaaatcgagttttgaatgattagcctcacatcaaatgtatgcttgggtcatgcaattgcttcgtttgctcagccccggttaataatttccgttttaagtagaaagcacaaaataaaactgctcgctaattcggtgcccgggaagcgagcctagagaggattttgccagcttgtctgaatgtgcttttctgctcggagtgtatgtctgtctgagtggtttgtgtgttttcccacttcttttactcggggtccaaacgcccttcccgggactgtttcccatgaaatgagtctggtgtgagccgaagctgtaatgcgtttctcatttttaaagtgtttttaaagcccgtctcggggtgggtcgcgggggctttactgtggtttcgcagcagtttgtgaaattctctaatgggcaccacagagtttgcgattcccaacttggacccaggtcagctagagccccaggtcagctagagccccaggcagcgcggccccgcggggggatcgcgtgagaagagagagccgcaaaagaacgcgcctcccgcctcatagattattcatctatgaccaggtctcagccaaaatcgtgccagacgatttcctaaaagaaagccaaatgttttagcaacttcccccgtcaatatttactccgaagtggggatgcgccagcggcctattgttctcttccgggaagggagggagccgaggtgcgagacaagcttttaacaaggtttaaaatttgagaaatttatttgcatgaaatgctcgctttcgagtcctgtgtctgagcggatgtctttaagaaacaatttaggtgctaatggaatttaacgttaaacggtcccctttccaagtggaacgacgtttgagttctcgcacctctaaatgactccaagcatttggaattctggcaacaggatgcagagacagccagaaaattaaacggggaggttttgaaaggctttgctgactcccccaaccctcgcccaccagcttgtgcctctccgcagtcactagatgctgccttatctctaatatttaccttttcttcaacttatttttttaaagacgggaggtgagactagaattgtggttaattcaatttgcagaattttggatgaaaaatactggctcagtcactctccacagcccggcccccaaacaacacgtagcaactccaaatgtaattgcttactggccctggcgagaaaccgacagcagcccagcagcctgtgtgattttgataatgccccaaatattttgtcataataacagcttctccgtggcgagagcaacttgttagaagctgcaaatccaagaagccctctagaaaggcaggcagggctaggagcttccccacattcctgagaaatttgaggagatggacgtcagcctggaagaaagtaaaatacgaaataaatgagcaggactgtcgggcgggaaggcggttaatttgatcttagttctgccgcagaggggatcggactggtttgagggacccagccccctcaggtccttctccctcgccgcggcccagccccctcgcagcctgagtgggggctctgcaggctctgggtgtctgcagccagcgccgatgtttgccgtccacaggggagaagccgttccagtgtgagtttgagggctgcgaccggcgcttcgccaacagcagcgacaggaagaagcacatgcacgtccacacctccgataagccctatctctgcaagatgtgcgacaagtcctacacgcaccccagctcgctgcggaagcacatgaaggtaccaccgcggcggccgggaggagggcgaggcaggccgaggcgccggtgcagcactggcccggaccacctcagccggcctgggagggtccccaggggccagggcggcggggggaacatttctgggggtgctctcccccaggggcccggccccacagcagctgcactcacacccagtcccctctggtcccccctcccggcttttgtcttgcaggtccatgagtcctccccgcagggctctgaatcctccccggccgccagctccggctatgagtcgtccacgcccccggggctggtgtcccccagcgccgagccccagagcagctccaacctgtccccagcggcggcggcagcggcggcggcggctgcggcggcggcggccgcggtgtccgcggtgcaccggggcggaggctcgggcagtggcggcgcgggaggcggctcaggcggcggcagcggcagtggcgggggcggcggcggggcgggcggcgggggcggcggcagctctggcgggggcagcgggacagccgggggtcacagcggcctctcctccaacttcaatgaatggtacgtgtgacgggtcggggcctctctccctctccctgtccccaccccagcgcagcagccctccccgcagctagcagcgagggcaccttgtgatcatgttgttaaaattatgaatctgatttttatgatgatgaaaattttaccagcagaaggattttttaaagttttttttttttttttaataataatctaggcatgaagagcaaaaatatcccttccggagtctttgaagctgaaaatataaaacaaataaaaaataaaaaaataaaaacccacaaaaatgttgaaccaaacctccctgctaatctccatgcccacgttctttcccaccctgttcccagtcttctgacaaactgtgtacatagcggactcctcctttctcctccgaggtggttttaaaggctttttggtgtatagaagtttgtccatttgtaaaactccggattgcgttcctccccgccttccgccccttcccttccctaaagtgatgggctttctcttttctctttttagtttacccggtttctttttaagtaatgtggaagaaaatggtttattttgtattgtggtattgaatattgtgttcctttttatgaggcaacctgattgtaaacttcatgtaactatagactggaaaaaatgagccgtgccaaagtctcccttctgtttcttcagcacattgacccatagcacacacatacacaccaccaccaacaacgcttgtgaatgtatttttctgttagctgggtttacatgtgatgttttagtgcttttgcaagttcaatttgttagttcctgtatgaaagattgtgggggaaaaataaacgtcgtgccgttagctttttccgtaataacacccttccttctgtaaatacccgttaccatatttatccatttgtaattaaattatggtattaacttgctacagaggaaacaatatttataaagaatgtttcttaactataaatatgtacaattgtgggcataaactgtttcagattttttatttgaaggttttaagtggtttgatcatttcttgtgatgttttgagagtaatgcatacagaaatataataaaatgtgttgaaactgc

SEQ ID NO: 581 - DNA, 2962 bp, Homo sapiens
aagactcaaacttagaaacttgaattagatgtggtattcaaatccttagctgccgcgaagacacagacagcccccgtaagaacccacgaagcaggcgaagttcattgttctcaacattctagctgctcttgctgcatttgctctggaattcttgtagagatattacttgtccttccaggctgttctttctgtagctcccttgttttctttttgtgatcatgttgcagatggctgggcagtgctcccaaaatgaatattttgacagtttgttgcatgcttgcataccttgtcaacttcgatgttcttctaatactcctcctctaacatgtcagcgttattgtaatgcaagtaagtaatattgcttgaacgattattcattggtgtgaactattctgtctatatggactgcttattcagagaatcaacataatgggcatgatggtgagttttcttgaatcaaaaagagaaaggaagcaaggcagtgattttaatgtttatggaaacaaagtaattatttggaactgaacttgatatgattcagcactattagcaacatagattttttttaaaaatcagctcttctaattaagtgatatttagaatttaaaagtcaatgttcattaattaaggtgattgaatggaaataatccatacttgattattttgctatcaaaacaatccataattcattattttagcaaaataatcaagtatgacagccgggtgcggtggatggctcacacctgtaatcccagcactttgggaggccgaggtgggtgaatcacctgaggtcggcagtttgaggccagcctggccaacctggtgaaaccctgtctctactaaaaatacaaaaaattagctgggcatggtggcacaggtctgtaatcccagctactcgggaggctgaggcaggagaattgtttgaacttgggaggtggaggttgcagtgagccgagatcgcgccactgcactctagcctgggcaacagagcaagactttgtctcaaaataaataaataaataataacaataaagtatgtgaatattatgttatcagctcattatctgtctgatgttcttttcataaaggtgtgaccaattcagtgaaaggaacgaatgcgattctctggacctgtttgggactgagcttaataatttctttggcagttttcgtgctaatgtttttgctaaggaagataaactctgaaccattaaaggacgagtttaaaaacacaggttggtttgatggtgaatctttgaaatctatttccaggggatggctattgtgagtttcagttccttttctttttttagcgttgactatttcacttcgttacagccctttcgaatgtgttagaacattgttacattaaatgaacttggtagaggtgagccatcttcattctgattttgacaccttggcagattttctacaatgtcagtcttctccaggattcttccactgttaattactctattgaaagtactaaggctttcttgggaaacatcagtctctttgactaaagttagcacatcgattaaatgccacattatcagaaactcctagccaggtctgctactgtcaggaaaagcatatttgtcaagatctatggtcatgtttttatacaaatataggtgttctttgcttgagtgaacattttactactgaaaaatgttagaaatgaataaccagttgctcctgaattatttgaggaatcatctaaaaaataattatttttaagcaatagagaaccagtcccagaaaaatgaatgttctacttaagtgcctcttaagataaaaatacttctgcagcacctttgctcatgattggattcccaagcatgtacagccactgccctatttctgtatgcatttatttatttatttatttatttatttatttatttatttagagatggagtctcgctctgtggcccaggctggagtgcagtggcgtgatctcaactcactgcagcctctgcctcttgggttcaaacaattctcccatctcagcctcctgagtaactgggactataggtatgtgccatcacctccgactaatttttgtactttttggtagagacagggtttcatcatgttggccaggatggtctcaagctcctgaccacaagtgatctgcccgcctcagcttcccaaagtgctgggattacaggcgtgagccacagggcccagcacatactcattcttttttactgaaaagatctgtttcaagctgggtgtggtggcatggagctgtagtcccgactgctctgtaggctaacgtgggaggattgcttgagcccaggagtttgaatgcagcctgggcaacacagtaagaccccacctctaaaaaatgaaaaaatctctctcacattgctttgagtcccgatgtgtactgctaagactctcatgaccacattctctgtgaagtttgggttaatgtttccgtttctacataattaggatcaggtctcctgggcatggctaacattgacctggaaaagagcaggactggtgatgaaattattcttccgagaggcctcgagtacacggtggaagaatgcacctgtgaagactgcatcaagagcaaaccgaaggtcgactctgaccattgctttccactcccagctatggaggaaggcgcaaccattcttgtcaccacgaaaacgaatgactattgcaagagcctgccagctgctttgagtgctacggagatagagaaatcaatttctgctaggtaattaaccatttcgactcgagcagtgccactttaaaaatcttttgtcagaatagatgatgtgtcagatctctttaggatgactgtatttttcagttgccgatacagctttttgtcctctaactgtggaaactctttatgttagatatatttctctaggttactgttgggagcttaatggtagaaacttccttggtttcatgattaaactcttttttttcctga

SEQ ID NO: 582 - DNA, 20447 bp, Homo sapiens
ccgggactgtccagtgggagcaggcgccccggccagcgcagacctggaggcgcacgggcgccgcaccgcacgattcggctcggggtagagcggagccgcagccccacgcgcagcccaggacccactcgccaccgccgcttcctcagcacccatggggaccaggagactttaaaggagtttggggtttcgggagcagggaaatcacgggtagggagaagcggctttctttgccttggaaacggtttttcttcatccgattgtttggatcctgtgctgggtaggagggagaggggtctttgggctaaaagtgaacctctctacacacacacgctcccacccacacccacacacatacactgcactggctttctccatccttcccctgcctctttgttaggttattttagacagagcagcctcgccctggcgcagtcccattggccctgatggggacaaggcaagagaagtaaggggcagagtgcacctgcctgtgagggcaggtgtgcccgggtgcttgggcgtacgtgcaacggcgagcgtgcaagcgtggagctgaaattgtgtacgaatgtgtggggtctaagtgtgccagtgtgtcgtcgcgaaggtttgtcattgtgggtgtatgtgacatacaccagtataccaggctgccagtgtctggactcccaagtgtccaaaatgttgctggtgtcaagtgaatgcctgagaatgtgtctgattgtcattgtgcgagccgctgtaaggggaggaaggcaacctagtgcaaaactgggaggtgggctggagagggtggggacagaaatgggagcttgctcccagctcactggccttaggctcccttctccctttcagcccacccctcggtccttcctgggtgtccgtctcccacactgccacagccagcactctcctccccaccgggaccccgcaagctctccagccagcctgggtgttttcttctgggagttggaccgagttcccggaaggggtcggaggctgtgtggtggcgtctgctctcgcctgacctgtggcggcttctccgcccctcgtacccctggggaggcacggaggactcggctggaaagggtgactccggtgagggcacgtaagctagccggcaggtcccaggggcactgcacgtcttggggagggacaccgaaaggggcagcccggactctgacggtgtctctgcctctctgtgcctccgcagatccccgctcctggccctcgcctcgccacctcattgatgggcaaccaactggaccgcatcacccacctcaactacagcgagttgcccacaggggacccgtcggggattgaaaaggacgaactgcgggtcggggttgcctacttcttctcggatgatgaggaagacctggacgaacgcgggcagcccgacaagtttggcgtgaaggcccccccgggttgcaccccctgcccggagagccccagccgccaccaccaccacctgctgcaccagctggtcctcaacgagactcagttttccgcctttcggggccaggaatgcatcttttccaaagtgagcggtggccctcagggcgccgacctaagcgtctacgcggtcaccgcgctgccagcgctctgcgaacccggcgacctgctggagctgctgtggctgcagcccgcgccggagccgcccgcgcccgccccgcactgggccgtctacgtgggcggcgggcagatcatccacctgcaccaaggcgagatccgccaggacagcctgtatgaggcgggcgcggccaacgtgggccgggtggtgaatagctggtaccgctaccgcccgctggtggccgagctggtggtgcagaacgcctgcggccacctgggcctcaagagcgaggagatctgctggacgaactcggagagcttcgccgcctggtgccgctttggcaagcgggagttcaaggcgggaggggaggtgccggcaggcacgcagcccccgcagcagcagtactatctcaaggtgcacctgggagagaacaaggtccacaccgccaggtttcacagcctggaagacctcatccgcgagaagcgccgtatcgacgccagcggccgcctgcgagtgctccaggagctcgccgacctcgtggacgacaaggagtagccgcctaggggctgccggcccctctgcctcccccgcacctcgctcccttcccttccccgcacccggacttcgcagtcagcggttctcaacctctgccccgccccgccacgcgcgtccgccgccggtggcccgggcccgggctgcacccccgcatccccaagccagcggcaggaagtctcaggaactgccccagggccgaaagggcgccgctgcgagcgcctggctgacagccacagcggtggtgacggtgctgggagaccccgcgtgcgctttccccttgagatgtaaaccgggaacggggaaggggctgaggggagaaaggacatggccttccccgcgagtccatggccagtgactgtggcccgactcgaaaacaaccctcttctcaaaagggaccatcaccgccccgagcgtgcgcacacagaccggtcggaggcgagaactggtctctacagggcacagttcagctcctctgtggatgcgtccccagatcgcaggatttccaagaaatcgagcctgtcccttgtgcacttgggaataattccccaagacagcacttcgggattccgggttatcctgaggctgcccgggacttttccagctctccagccccaggtctcctgacattgtgttccaggctgcgggctaagccagacagtgtttgcctccggttctttccaccgtgggaagcgaacgccacccccacccgcctttgcctgcgagtctccctcgctggcagaagggaagccggcccggtcccgggaggaagatggcgctgcgaattcggtgaggacagccggccccgcccccgacaaggagctcgctcgttcacctggtgtctgggaacttgaatgtgtgaagggcgcttattgttctgaacccttgattgctccctcctcgggctgcatttcaaaaatagtcatatttttaaaggagttggaggagagggagggggaggacatggcaccattccagaaaccagcattgttacaacaccatagccagtatatttagtttggcttttcctaacatagaaatcttcaaagctggggaagtggaaataaagttttaaaaatgagagagcagttttccaactatgtcaacaaagcctatcgtgttgatgtttttattgaccattttagcaacaggctaataaaatttcaaattgaaatttttattttcatggctttaatccatgatagtttaaatactgggggccattaagagtggatgtagctaagagcttagctaacattgccttttcactctatttttctcagatattgtaagcattctgtttttcaatattgtagttaattttttggctttcaacagcagccctagtaatggtggagttgttaattaatgtgtatattgtactgaatttctgtcagttaaggggttcactgctttggtggaaattggtggaaattgctagcaggttccacgatgtttatttttttctccatgttgtatatcattaccatttcacatacgcgtttctatttttcttcctctcctcctgatctccttaaaaatgaatctagagttggtggctttttccccctcctctttggccagttccacagttcagttcttcctgaaaacagggatgatgaacttgtaggatcaggacaaatgtgtgtttttcaaaaacttaaggctgggtgtgaaacaccttctgtggacaaggatttgtaaacttctctcctccctccagctgcggccccagcctaactgatagttacttgattcagtgtgctagacacttaaatagcatctatgtctctttcaagggaatttgtcaaataatgctgtttagctaattgttgcaagcaattgcatattaacagctgtgattttgttggacagcaagtattatggccaaagccagtttcttggcatttcaaaaataatgcaataaaaactagttgaggttagctgaggctggaaatgcctttttcatggtaaatgattcacttctatatttttctttctttttctttttttttctttggttttcatcctggattcatcccctgatcttaaatcaaaacgtcagatcaatgaactatgaactaaagtatttttcttaagcctattgagtgatttattttttaaaaaatgtttaaatgcatatgcttttctttcagcacaaacaacagcaaaaacttttgtaataactaacttacctttgcatgtatgaagaactgagtcatttatttccctaacttactcctctttcaagtaacaggtggcagatcataaaatgaattctttattgtatctacacactccacattctttactgtgtcctactactgtatcttggctccctgctgtattaaacaccatcttaagcacttgttcctgcaggactccttcttgacattttgtctcccccttcaaagtcactcaaagagtgggacttcatcaaaagaaatgaattagtctctatcacaccgaatactaagatttatttcctctgatggtacatagatttctctctcactaagagggtcactctcatagaggaatgtcttgtcagttttatacttgctgaggctagactgacaataaaaatgagctgggcagttaaattagcatttgttactatattggcctataaaggatcaggttgatgataatacctctaaaaatatgcaataataaaacaatagttatgaaagaaacttgaaaggtttgcaaggtttctcctatccctgttaaaattatcatttattatctctttgtcagtgttagtaaggtaacccatgacagaataatttgagtgatagttcatcatgcagaggatatgatcaagatattacctaatggttttatcctgaaaaaggtgtatacttttagggcactgttaacaatgcgagtgaaaccaagatggtgcaagttccctttgcagatggcgtgggcacacttgatttttattatgagtgaatgtaatctttctgtattttaccagagttacagcaattacctgaaaagtttcctaacattttaataatgttagggatttcgttttggttttagttgtcctcaagagacaacaggttcacagtaatttccatgatgttgggtgtggctaagctggggattggttctgttccccctgctcccgtgtagagaaaagctatatttatactgcattctttctcaactttcaggtaaaacaaactatgatttaaaaaaagaaaaaagaaaagacaggtacttttacttcaaagagtgctttgctacatttttatttaaaccaaaaatcaaataaaataaggaggggggctgggtatactttaaacaaaaccagtcctgaaatgctgttattctcaaagtacattccaaaaaaaaaaaaaaaaaaaaactatagaatttacgtatgttacatttttaagtatgagttaaattgatataaagtgttcctcaatatttaataatgtaagctgttgtcatgacagtattttttaaaaataataacgtatattatagttacgaaacacttgtgccagattagaacatcaagcacagaagcagctgtatgatttacctgtttttttgaaactttaatgtttaccttcccctatgtttaatttttctgtggtgaacacttttgttagaacatggcttttttatttttcttggaaaaatatgctattagtatttacaaaataattaattacctgaataagcagtatatactaaaagtcttcaaacattactttattgattacttatgttttgtggtgcgctttcaacatccctaagagttaaatgtcttagtcatctaatacatggaacagggtcaaacttcaatgaaattaatacttattgcacaatcataatatagcaacctaattttcttttatttataggcatatctttaaagctttcttctcttttttgaacaaatgaagagaatccagttagtttttgcctttcagaggtgatttgccacgtgcacaaagggtctgtaggtgaaaagacaggcttttgggtttcttgaaacatcaaaaactgaatttagagaatggttatctaacactcaagtcaatgttttttttgaaattactagctattggtataatatacatatatgtacatgtatacatatacatacacacatatgtacatttacacatatgtaagtatacactcatatacatatatacacatgtatatatacttgtgtacacatacatttttgcctatagctagcaattatttcattcagatacacacacacacacacacacacacaggctacttaaaatagagagtgacttgagatatacaaaaacaggaagaaaagccctggaggtcatatagctaatgtataactgcacagcaagcagctatgtctaaagctaacaataaaaagaaaatgtgggagttgtgcaattagttttattctcattttttggaagaatatgttcctggtttctctaactaaaaggaaaaaattcaaaggaaagttgtaaatattaggaagtaactgaaaaataagaagcaagataaagtggggaggctatgagatcatataatgagctaataaacttttcaacaggggacacctgttctcccttctaactgaagacactaaagagaagctaagatcctatctttcaatcatttagtaattcataaaatcccattatttcataactcaaagtttacctttgaggttgtatgtttacctcatttgaactcgaaatagaagaggtttaagtatttgaataagttgggaaaaaaaggaaaaatagtcttccctgcccttgtcactgatggtgacactacttgtaattactgtattttttggcagaacactcagatgaacagattcctatgctgtggacttttatcattctttttgatggctgatagtagaaagcacacagtaggtactccataaatgtaagactatggcagctgtctagtacaagtgcttctcactgattcttggttaccaggaaaaccagaaagcccgtcacttgccttgcctgcaaaggcgagcctaaagaaatttctctaaccaaaattggcaggttctttccaccacaaaaggctcttggaaatataacttatggggcttaaggctaatttgagttgaagggtatttgtaatatttgatttgcttttagcagagaaaacaataaaagaatccaggaaaagtagaaaatgttctcttgtcatttggtcagaaagggaaaagcgaagggaaaagcaaaatagttccaactgtaactttcacaacttcatctctcattcacctcaaggagagatttttctcgcatgaaatcacaagattattccttcagaaggaagcttattgtagctcttgctaaaaattttctttggtatatgggaatagatttactagatgtacacttaactctgggaaaattagatttgatggagtttggtcatgggtgtttttctaaatacacattactcatttatatattaaaataattgctatgcctcttggcttttataatccagttcttaatatgaacatgagttctgaactttattttgtccaaaggatagatacttatgaaatactaggtatgaatagagtcagtgtcctaaatttcaagcacaaaatgaatgcttcaaaagttactttgagcatcatttaatgtttcaaaaaattgaaaaagatcatataaggctattgcttatatgtatcctaaggaaattcttgccatcaatgggtgatacagacattaatgttctatttgagagcttctttattataagtacactgacatttactttagcaaataagttattattctaaattcagttattttccctgtgacagccctgtgacataccagctctttgctcacttccaagtccactgtagatttcagattctgcaagggggtgagcagatctagggagatcatacccatgatgactttgtaaaacatctctcaactcccaacagcacacgcactttatttcttcccacctttcacttctcagtgcaagtgtctgcccagggggtctgagctagagggaggcaaggctcagaggtaggattaccagatttagcaaataaaaatacaggatgctcagttacatttgaatttcagataaattattgttgattttaggattatagttttaggataaatatgttccctgcaatatttaggttgtttgtactaaaacttatctgtttatctgaaattcaaatgtaagtgcatgtccagtatattatctgtcaacccttctcaaggataattttatcaactctaagaagcaatagagccccctgactttttggagctggcgaactaaggacacaccccctacccacaacattgaggtcctgtgagattttccatgtgtcttttaaggccagagtcaaattcagtcccaggaatgagcacatagtgcaggagaagcctcagaagagttcacagcccccatggtcgttgagagagagttggttgtgtgtatgtgtaggtgcgggtgggtaggtgtttcttgtactctcttgattctattttataacagacaccatcctttacctggggatatgacgaatactttcctaggtatagtcaggaatactgtatactactgttttttatcccacctatttatcccaatctggattgtcactttacacctggctatttctatagcttcctcacctgtctctacccctctagctcctctatccaaacacctgtgcctatagtgatgtatctaaccacagaatcatcactcccaagtaaagcctgagctccttagtggggcagtcagcatattccatggtctggcccctatcttcaccgacttgcatttccttcaactctcagcttatacttgggtcgcacaggactttttgtagaacacgtagttttcattcatacttccatggctttctatgttgtccccttaacctgattaccattctaaattccagaacagcaaactcttattcatctatgctttatgccgagctccatgctagcccctcaggtggctttagtcattttcttttgtagctcccattgtagtttgttagcacccccagactctctcttcaactacaaataccaatttatgtctgtctcttcctaggtctactggggaaggctctgtgacttgctcttttttgctgctggaaagtctaacacttgcagtaggtgctaaattagagtctattcactcaatggaggaactggggaaggtatgtgaggaataccgcccagcatctatctaggaggtaaaccacggtaggaatgggctaacggtgtgtatcaacttatacgagattctccttaagaatcatacagtagaaatttagtttctgtttagaaaataagctggaatgatgtgaaccttcactgtggtatattatactgcaagtgatgggagattagctatacagagtttaaaaggtttctctgtcctgggtataatggtacaaacatttcttcttgaatgaactttatgagtttcattactatggaaatatagatttttctcctcttggtcatttaatttctgcccaggtgaggtagttgtgggtgttgcaaatttcaaaggcacctgaggtttgatttgcaagaattaaagatgagactagacatttcttgaatagaccactgtagtgaatgggctgtagactgcccgagatgttcagtcagcggagaaagagtctactgaaaacctaagtattgtttaccttttggaaagtaaaatctctcccaatcttactaagcaaattcatctacattcacctacagcatgtatggggtcggggggtgggggcagaaaatcaccttgcctgaccttccagtagggggagcagaagaaaaacagcctcctttgattgacggttggacctccaggctggttgaacagctagaataatttgaaatgcaattgagcactgagaatgtaactagattaatgtcttatgaaatatatatgcttttatattgatgtgttccttggaactcctaggaggagcaccccttacttttatagggacttattattctcttagcacctctggacatttaatttagtttaatctggttctggacatggttaaggttgcctgtatctaagacaagctactttaatttgggattttaaaccacaatatcctgttgagaaaaaaagtgtcaaaattctagagagcttctttagagtgaaatattattactaatttgggattcgaaatccaggtaaatagaggttctggtaaaatattgcttatgccctgagagcaatttccagagtagacagtggaggagatttttcattatgcagcctcactattctgatttcagaaatcagtgccccttgcatgtgtctgctttatttgtgtataattttataagacaggatctatgaaagaaaatgagaggagaggtagttactccatcctttataggccaacaaaacaaaggctctaaatccagattaattctgcgtatgttacttccttacagcctttaaggactttccataactcataagataaaacccagactccctggcagcacgcaagctctgctccagtctgtccggtactcccctcctccaacctcaacacccagcctctgaagcttcatcccctgatcttcacagtgcattctcactgggagccatctgtactggaccacctacctttccccaaaagcctagtagttgtatgcctttgctcaagctgtttcacttgtgtggagcattcttctcctctacttggcacatgtaaaagtcctcctcatccagagtcctggtgagaatgctgttcacttaccagctgttctgtgaagcttctccttttcctacaacaccccctacaaaaacagctaaaactggccaaattcatcctctcccatttgaacttctggtgtagcactttctccaaacatttaatgatcatgccgtccatttaatattacagttttcagcccctaaactatgtcaaacatagtctgtttaagttaatgagaacctgattgccttctgaaataagtttgaggaaggtgtcttggcactttgatctttgattggttagtaactagtatctggtctatagtaggtcctcgatcaatactgacttaattctctgaatctaatttaattcaaaaacaactattctacagcaagaacagtaagttgtattttgaaattaatgtcctagtgggagataaactccttaaacatgtgttgggtccctaataaaggcaagcattttttttttaatttcacgtggatacaaagcatagtctagatttcaagaacgagacaggacaaaggagacaggcccactattagctataatccattatagcctggaatataggtaattacccaggtataattttttaaaaaataccataggagttcaaaggaagaatcacttgaaggtatacatcagcttcaaaaaacagtcattgactggcatggcatatttggatgatgtttctgagataattacacatttttgttaattttttattattaggtagaaatatagataaatatactttcttgttatttaaatataatagactatcttctgtcattgtatattaaatactattttagagtgagtttggtcttatgaagtctgtagaagtacagtttaaatgtgtttaagcgaagtccttttgatgttgaactaccaagatcagcagattattagcattagatttaacaattaattcacctcccagtgtatacttgtagacatggtctttgattgatagattgattggatgcctaagattcagttcacagggttgggacaggttctttaatcggtaactgtgaaaatgcaagagcttcttggagtggggctggacccaaagccgtgatgacctgagaggatagtctcacccaaggagagaggccgagctgatagacaggaagacaggttcataggccagtgctgaggagctaggggagctataaagagaaagaacaagcaggatgttggagctatgaggacaactatcagatgcagtgtgcagaatgttgcaggaccaagacccttttccaaagtagaaataataattgaggtgcaacagttgctaaaagggaattaacaactctaaaaaaatggtattggctcacaatctatataaatatttcaattttaaagcatattgtgtttaatttaaaatggccttctgaaggaaaaagcaaaacagaaaacctgttaactttgacagtattctttcaatataaataattgaatttctttgaagaaaaacaaatctgagcctcttgtccaaagaaatcttgaatttgctcatgtgtttccaatggcctttggcacatagcattggctttctaaatgcctctaataactacagtaaatgtctctatgaaattcagcacatcatacaaatgaaatgttccttcttgtgtgcaattcccatttactttaagaaggagaaattccagattatatacaaagattgataagtttgccaaaatatccaggtatataaccatcagcttctggactgcaattccttaatgttaatgaattccaaagaaaaacagctgactttatgcatttattttaataaggctgtgaaaacagtccatttacagtgtaaaaaccccttgtcttttaaaaatgctagacggaatcttttaataaattaaatttatctgcctgtcaaattgacaagaaccttcaaggagtattgctgatgttgtagttctacttttccaataggattacatctggaatttaataagggctgcttagaggaagaatctatccatcagggtaattttaagtaacaaatatttatataatatcttaagtctccaaccttatagggccacaatgattttgtttcctttgaaaaaaccttttattacttacaatagtgtcctgaatatcatatttgcttataaagatgaaataacgcaaggaggcaactaagtctacaacatcagaagaataattattgacatttgctcagaaatgtatagcttacatagtcaattgtcctcatgaccaaccttgtgtctgtcaggtcttactgttccctgcatacaaatagggacactgaggcttggaaggggaaaacacccaactcagtatcacttatcttgcatttagtacacccagcactttaactcaggggttctgatccaaaacgttaacatctgtctgtcctttgtaagattttcctggaataatcaaatgtctccctccacctttttcttatagaacaaaacccatttaatgttttcagtgaatgcctggggtatttatatcaaagttctagtagtggccagttaatgaagatgagctcttaatttttcacaatgatctaccttagagaggtaggtatcagggtattcaaaaaggcaaatccattcaaactctggaccaattgtataacacacactaaccacctatacttgatgtccaacctcctggaatgaaagtctcaagtacatgtccaaatgtcaaaatggaatcaagcctcaattttcagattcttttgtttttcatcctcaactttagaaacagaggtgcatctgttggataatagtcaaggcgtctgtgtcggtaaccaggggtccaaggtaattctcaaaggacttttcatttattcatcaataaatactatgctattgatcatgtgttgggaaaaatgtctttcaaaaataagttgaacaagaacaaacgtcaatgcatagcatgcttttaataagaagttaaatattctggataaaaagtgtatttgcaattttaatcaaaatttttccagcaacaacctgcaatagttgtacaaaataataactgtttagtgactggccaggcctaacagcagggtaatgacatgagacaggccaggcactaatctggatgaaggacctatttacacatgtaaagatccctatttaacttagctggaagagcattaccatgagatgctgcagtaaaacaagttacccatgaccattctcattaaaacatatctggtatccatttctaaattagattagttattcctcatgaaccatgaactcactggagatcaaaatagacccaaataaatgaaacccactcagtaaatagtctcagagaaagatggtatatgggaaaggacattggacttgaaaaacacgtggctacacatccaactctttgcttcttggacaagtcactgccctgagcctctatccctcagccttttaacaggagactatgaaccctaactcacaatgttaggatgaagctgactaaatgtctataaatctgtccacccacaatcctttgtacataaaaggcaatcagcagacattagctgaattaagttaaaatactaagtgaattttcttttatcactgagattgcaggtttcccaatttttgaatgtgttttatttgtctttataggtgataaatctttggagagaatgggtcttctcttacttattttttaacccccttagctgaatttcagacatgaagtagttcaaacacttcttgataaaagtcaaagggcaactaaaattttatccaaatagaggtgctctgaggacaatgaaaatgggtgtttcttagaatgaatatatgaactacttgctgtggactcaataattttaccctccccaaatccatatgttgaaatcctaacccccaaagtgatgatattaggagatggggcccttgggaggtgttaggtcatgagggtggacccctcatgaattggaatagtacccctataaaaagacacttaagaccttgctttttctctctattagccatgtgaggatacaatgagaatatagcaatctgtaactattaaaagggccctcaccagaacttgatcatgctgacactgtgatctcagattttcagcctccagaactgtgaggataagtcactcagttcatggtattttaacccaaatggactatgacactattctattaaaggaagtacaaatacttcctcctaatattttattcaatgactgcatctaagctgcactgaaagtctaaaaatagtacccacagctgtgttcccatggccagaggattctccaggcattatcctcctacccttcactgagaactattgcactctcgtctatgttcactgcttttaaggacttcccaatgcttacagttaacttctctgccctttcaactgaaaactctattgcaaggtttatctctgttgtatattggaggaaggtcttacacgcatgattctttattataaaagttatgtttttatttgtgtctttactcagacttttaaaagtgagaggaaaattgtataaatattgtatccctcagtctgtagaggcatcagttcctcatagactctgtctcccctttggagcctctgcctattttattagcacagcagttctcaaccttcttggtcttagggcctttaaattactggggaggccatagagtttttttctatggaaattatatttgtcaacatttgccacgatagaaataatactagattttaaaatattaacactttttaaaattccaaatcacaaaactattacctgtcacatagtgatgctttttgtaaaaggaactatatattccaaagagaagagtgagaagagtggcattgtttcacacttttgcaaattttttaaatgactgttttaatagaagacaactggattcttatgtctgcctttgcattcaaactgttctcatataacacatcctgtaacctttgtcaaacccctgtaaacacttgtataagaattagaggagaaaagccaaaatggtagaattgtgaaaatggttttgagcttgtgcatcctgtaaaagagtctccgggatcccacaggattcaggaccacactttgagaaccactgcaatgagatcttgcctagctttccaagtagcttccaactagcttctcctggtgttcatactcaggacgtccatctgccaaatcaccacatcagtgaaatacacatgtaactggcatgaagtaatacaatcaaaactatcctgtttttttgaatcccacatttattcatgaaggtagtttctcccctgtcactgggtaaagtcaggccagttcattaatgtttctcttctctcttaggtaacagaaagttctatggtgctccaagttgcagaaacaaaatctcaagtggagcttgaaaagcctatacccttcaaagagtcaatttacaacttcattaaaagtcctgggacttgcctctctcccagtgggaacagctttgcctgtcttttactttttgacctatgttgataactctagaccccactcctctagagcatgagcatgtgtaggggttgggggaggggggatgtggagaggatggtggaggaaggctagtaaagcagtcaggaaatatatgacttcattggcacttttattaaataaaaacattgtgtttttcttgtgcctagcagaattttagagttggatctttgtctcatggatgctcttaggagacccaccaaccaccaactccttgtattgcaactggaccccctcgacctgggtgaatgtactcttttcagcaaccatatcctccctcctgttgccaggtaaggtgagaagcaattcctctgcctagaagctctgccgggtgaaatatcaggagatcccacccaagctttctcttgcgtgtagcctatatccagcacgggagcataggctaatcctgcagttggccagcctcttgtcctctggatatcctgggatggaatcctaatgaaggaaactccagtggtttactgaagccctttgtgctaggcctgaggtgagatagaattgctccatcctatgcccaggaggcctgcgtggactcacagtgcaccaccatcctcagaaatcctctctccctgtaggctgtggtctgaatctttgtgtcttcccaaaattcatatgttgaaatcctaacgccccaggtgatgatattagaagatggggcctttcaggagttgactaaaacttcagggaaaagccctcacaaatgggattagttcccttataaaataggtccaaggaaacttgctcacttctaacaccatgtgaggacacagtgagaaggcaccatctataagccagaaagcagtccctcaccagacatagatctgctggcaccttgatcttggacttctcaccctccagaactgggagaaataagtgtatattgtttataagctacacagtttatgatattatagcagcccaaacagacattgtatttcctcaatgttggtttaagagttgtctgaaccagtttcttgttatcatactgtggatgtttctagctctcactgtagcattccacctcttttctgtctcagtgacttagtcaaagcatctagttgaacactctgttatttaaagaaaccagcattcactggctgttcccagctccaggaactcaggtggattcataatttgttctgtttccttgctcttaggaaaagtactgacagctcataattggttgtatttcttaggatatttgcatttaaactagaagcaatgctttcttttcttggtataatttgtcttacatttttgaaagtaatagctattcattaaattacatttgaaaatgcaggaagaaagaaaaaattgtctataattctactactcatataaaaccactattcacatatgtgtactttcctctattaacctttcaaagcatgcctcaattttaattgtattcacacaaatacaattttatgccatacattttacttattaatatgctattagcatcaccaatgtcaatataaactccttgtaaacatcaatttaatggttgcaaagtattacatcaactggatatgccatggcttatttaatcactgtatttattgttaaatatttgcattgtttacattgtttagtattgaaaaccacgctgcaataaatatctttggatagattcttttttctttgttttgggttatttccttggaatatatttctggatatggagtgactgagtaaatgaacatgaaagattttaggatacacacatacacatttatgtgcatatacacacactgttttgcaaaaagctaacatatgcctatgttcatggcctgtcacaatcattgatacgtgaaatctcacattctttattgattgatttctttttatttacgatcttaatttccatcctgctcatcctcatcataggaccccagtctaatatgcttaatatatatctctttatttgtacatggtcatattagcatgaatttttattttgtgtttacgtactataaatgcacacaaatgatgttgtgctatggatctcatattgtttctttttttttcacctagcactaggtttttaagatctatttacatcatagatccgtctaagactactgggtgctgcctgatttgcttctatgcatccattatgctatacttctcttaactagcagacttctgtggattgcatctagctctgcactacaacaaatagtgctgctataattttccccagtccttgccacctcctgggtaagagagaatgctaggtcatcagacatacatacacctttctgaactaagtactgccttattgctttccagagtgattcctccagtctgtgttctcagcagctgtgcatatgagtctctgtaaccacaattcccatccatacttggcattatccatcttcctaattttcccactctggcagttgcaaagtgatatctcatggttgttttcatttgtatttccctaaataccagggagtttgagcatcttttcatatgttggttagtcatttgcgtttctctaatctgatttgcctgtttatatctttgtccatttatctgatagggttttcattttttctcattattatcataaatattaataatgtattttatatttttgatagaattttatattcttgagaaaatcttgtggttttgtttaatagattgattcatagatttctttgttatatctaaggtaaatgtacatattgtaagttggtgataaatttattttttgataaatgctattaatttttatgtattgattttattccagtagtcttggacctttctttttgtttctcaactttgtcagttcaatcatattttttaaaaaaataaagtctgcacgttggaggctgaggtgggtggatcacaaggtcaagacattgagaccatcctggctaacacggtgaaaccccatctctactaaaactacaaaaaattagccgggcatggtggcatgtgcctgtactcccagctattcgggaggctgaggcaggagaatcacttgaatccaggagacggaggttgcagtgagccaagatcacaccactgcactccagcctgggtgacagagcaagactccatctcaaaataaattaaataaataaataaataaaatctgttttttcccctagaaattgagggaagctctttagaaactgggaaaattagctctttgccttaataaggcaaatggcttattagccctttgtttgtgaatgtgttacaattacttttgcctatattttggtgattttgccataccattatgaaatagaatgtatcagttttttattttgtatctcgctacaaaggccctttttaaagaaattatattgtgttttattctagtaggtttatattttcattaattcagatttaaatatttaatttatttgcagtttattctgttataagaagtgaggtatagatccaaatttattattgtaatggctacacagttgaataagccctctttccctattgatttgaaatgtcctatttatcatattctacattttttcatctatatgtgggtctatttcttaattttatattatttgtcattggtctatgttttaatgctttaggtttatgccataaaaaatactgtagctttagttattattttaatagccaataggactgatcatccctcaggacctccttttcagaattttcctgcatatttttacttatttattttatttcattttatttgttttgctacactgactagaacatccagtataagattaaatagaaaccatgttaacaagtactttcatatttttcctgatattaaagaaagagcttctaaagtttcaacattatgtataatgtttactgtagatttttggtaggaactctttattaagctaaggaagttctttttatttctactctgcactacacaccaaccacaaagtaaaattgaaaagactgacaataccaagtgctgctgaggatgtgaagtccccggatctcacatacacgattaat

SEQ ID NO: 583 - DNA, 101373 bp, Homo sapiens
gtgaaggcggggaaggtgaacctgtggccgtcggcagatctgcagatctgccggactgcgggtcggggcgtggcaggggcctagtccccgccccggccgtcagcctgtcgcctctggctcgggccgggcgacgagaccctccctcagcacctgcagtgcagccagagccggtgcggcggccgcgacttccccgacgcggggcgctgagaagcagtgagtgcctgtgtgtacctgccggccgggaatataggacttgtcgcatctcagcccttccctcccggagcgggggcgagaggtcgaggcggggaggcgaaggggcggtgggccgcgagggagaaggagcgatggggtggacgtccttcaaggccggggaacacgcggggctttccaggccgcgggggacggtggcgggtgtcggggcgcggtggcaacgctggagttcccgggtccaccggcgcggtcagccctggtgacccaagccaggggctggggagcaatctgagaccattgcggctgggctgtggggctccccagtcccggcaggtcctggcgccgctgtacatagaaaccgttgccacggcgggaggatgccgtttcttttcggtctccgactgcagggggcggtcggccctgtggatgcaggaaagagggtgcctcggtgggagagacccagcttttcgcgttagtaggcccgagcagtttgaactggaggtattactaagctggctacgaaatatgggaggtggatgtggatcaggatgatggagaaattaaatccagctaggatcgaaggttttcccaattagaaacaaagactgcaaacagaggtggaagagttctaaagtattgtataacttgttttttggaacttgagatggacattcagtagtcttgagaaggtgtatcctacagaaagaaagaaaaaaagagaatccttttttttcaaaaaggattctcagagagacttggtccaaaggtagtgagttctctcacttgattgttcagttatagatccacctcctcgttgtactctttctccccttctcactactgcacttgattagtcaaaaaaaaaaaaaaaagattctcagagaaatgttaaaatgatgttcagaatgaaattcatttgattaggtaagagatggctctatcatttcatgtgtttttaatcacattttattgaaatcataaaatctcaggggttgcaaaataccttcaattcaaggtaatctattttaatcccattagatgcttagatctctcccaccaaagatcccttgctctttggaaaaatccttctaaggcaacccattctattctgggcagcatcaataatttacgagttcttcatcttgctttcctgtaacttctacccttgaggttatccttgtcctgggagccattcatcaataggccctgaaggtatggtgtgaaagccacatctaatttctcagctagatctcatccggaagcctaagaactgtcatctatatcatatacctaagtcaaagccggcaggaatttggagaagtggacagtgtcatccttttctgcagaggtctgatatatgaccagactcccagagggctgaaagaaatacttctatgaattagacccattgctacttcttgtttttaaaatcattgcccaagtacagtgggttttctttaacctttgacagtgacccacaataagaaatatagtttactttgtaacctcgtgcatttatatacacacataatttccatttatatagacatgaagtaaaagtttgtataaagcaatatttactttaatgttatatgtcaggtagtctattttttattctattccatctcattataaaacaatgttaattgcaactcactaaatttatttatgggttgctacctgcagtttgaaaatcactggtacagtggttaagtatgtgggctctgtagttagcctattgagactcgtatccttagttcacatgtcgacttgctcatttgtaaaataggagtaattattaatatcctttatgagagaggttttgaagattaggtgagataagctatggcacatggtaatttagctccataaatgttaactgttattactaatgtcacttaaaacctacccggtacagtaattgagggattaaatgaagtaatatatgtaaagtacttagaatggtgcctagcacacattaagaactatatatttgttgctattattattatcattagcattagcagcagtatctttaaagtgatgttctccaagacctccttattcccaattcaattaaatgcagcgaatgtttctgaaggggtataggcactacttattatgttagtcctggagctgtgaggataaataaagtaagttctttcacaaactagaagggaagacaaataaacataattcaaatttgtgctaagagagaggtatgtacagggcacggcacggtggctcacgcctgtgatcccagcactttgggaggccaaggcaggcagatcacttgaggtccgtagttcaagaccagcctggccaacatggtgaaaccccatctctactaaaaatacaaaaattagttgggcgtggtggcccacacctgtaatcccagctactcaagaggctgaagcaggagaatcgcttgaacccaggaggaggaggtggcagtaagccaagattgtgtcactgcactccagcctgggtgacagagcaagactccaactcaaaaaaaaaaaaaaaaaggagaggtatgtacagagtgcccttagaacacagttcattgtgtagtagggagaagaagtaggcagggagtgggaaaaggattgtgttaaggcaagttacagaaaggatgttattatttatgtttatggtgaatcacaaagaatgattgggatgttaacagctaaactagcagaaggtcattcaaaattaacattaaaaaatcttaaaaagcaatttgggcaccacaaccttctctgtcattgtattccagctttgcttaagtgaagattaagtgaggtaatctgtgtatggcacacagtaatttaactccataaatgtcaattgttgttatcagggacagagaattcaaaattagttgacttcctccatggaaaaaaacctctaccttctttttctacagaagtacctagaagggctgggcgtgatggctcacacctgtaatcccagcactttggaaggccaaagtgggaggatcacttgagtccaggagttcgagaccagcctggggaaaatggcaaaaccccatctctacaaaaaaatctaagagaaattagctgggagtggtggcacgtgcctgtagtcccagctactcaggagtctgaggtgggaggatcaccgagtccagaaggtcaggctgcagtgacccacgattgcaccactgcatttcagcctgggtgacagagtgacaccatctcaaaaacaaaaacaaacaaaacactccacctccttttatacagaagtacctatgtggcaggccaggtctcactaacacagacctccataacaatgatttcggtactgactgagtggttaagttaaatattaaaagccagtgcccttatacaaaggctgggatgtaacaaaagcccaccaagagttttgcctaggcctttcctgggccttaaagcatgacaaaatagaaaaggaatttttaatgacccacttaggattaaacaagttttactgtgggtctgaagaaactccccagacctccacaaacaagtttatggagggtctgaaggaactccccaaacctctgtgatttagcaggagacaagataagggtaattgccccagcacctggacccatttaaattaagtaaatttactgagaccccagaggaaggtcttcagcactcagactttagatatagattaaaagaagttaatcacttatgtctttagatgaatgcacgcttacacatggacatatggcttagaaggtatataagctctggaaaactttgtaattttgagttggtctggtgataatttccaggccttctccctgtagccagttgcagaagtaaataacgtcttcctcctcggttcatctgcatctcgttattgggccacaaaactagcaggccaaccctcagtttggtccaggaacacctaggtgggacaggcacaatggctcatgcccataatcccagcactctgggaggctgaagcaggaggattgcttgaggccagaagttagagaccagcctgggcaacatagggagactctgtctctacaaaaaatttttaaaaattcaaaaaaatacaaagaagtacctacatggttaccactatccaaattgagtattatttatacattagattaataacttttaaatattgtatttcagctatgaccaccaaagattatccatcattgtggggctttggaacaacaaaaacattcaaaattcccattgaacatctagatttcaaatacattgaaaaatgttcagatgttaaacatctggaaaaaattctttgcgtgctcaggtaagcattttaaaatcattacatgttttagtatgacagttttaattatcttgttgttaccttctaaaggtaaaagctacattagaaatatctgtttttgcccatgcatggtaggtcccaaaatagtggttttgatcctatggttagtttggagagttccacctaggtctactgccagcatgagacgcaggctaattaatatccaggagggtatttttcttgccttctctacattttctaggagaaggtaaagtagctgtgaaagcagccattaggatgggctgtgatggctcacgcctgcaaccccagcactttgggaggctgaagcaggtggatcatttgagctcaggagttcaagaccagcctgagcaacagggtgaaatcctatctctacaaaaaatacgaaaattaccttggcctgtagtcccagctactcagaaggctgaggtgggaggattgcttgggccttggaggctatagtgatccctggttgtgccactgcactccagcctgggtgacagagtctcaaaaaataaaaaaataaaaaataataataaaaaaaataaaaaaagctattaggaggtaagcttatctcaccagcctaggctggtggcactttcccacttcatatcacctgacaacaagggagggtgacccaccgcacactgatcacatggagggtggtggggaggcctgacggtaataccagaaggcagggaattaggaccttctcaggatagagctccattctagtgactgtccaactgaatatacatcaaatgtggttgttaaaaatgcacatttgagggccctattcccagcgattctgcttcaaaaaatctggggtagggccagggaacatgtgtttttaacaatggagctggctgattgatatgtaggtgttcaaggaacccacttgaagaaacactgtcctgagtaccaccaacctgtgacacctcttttggatttcttttctttctttctttctttttttttttttttaagactggatctcactatgttgtccagactgatgtcaaactcctggacttgagcaatcctcctgctttggcctcccaaagtgctggggcctctttgggcctcttgagctattttcatttggataccagagttctattgcagaagacacttgtggagcatgaactgctttccaggacatctagaattcctattaccctgtggtggttctttatttcctctatccctattccttatcactgggttcttccctttttctctttcatcacctttagcttcctttcttccctgttggtccacagccagatgctgatgtgataacatcatcatttttaaaatggaaagtgaaaaatcaataatatcaattgttttcccttttttagcagaatattatcatgtatacttggtcaaggacggataaataaaaatgaaaagtttattggatgaaacagttggaaagctacagttataataatgttggttccaagaaattttatgaatagcctaattcagtgataatatattgaacttggaattgttttttaaaatttaatttggaaatgaaatttatttatatttttctagaaatgtaagagtgaacagacctaagaaagaatgggaaaggactgattttccttaaaataaaaggaacagatgtctccatttaactctctaaggaaggaattctgttccttgagtggttggatttcagggtgttttgtttaagctgtttatctgccattttcttcctacctctttgaaataaaaaaatttatgaacagaaactccttgttgaaaaggaagtccaaattctctttctgctagtctctaatattgaatttatgagcttaatatcatgtacaaaatgaacatatgaacatatatatgttgaagagaaaatattgtttttgttagattaaaattttgtttctttggttgatattaaactgaaatttatatgatacatgagatttgaaacttagaaaaagtaaatgataaaatttttttttatttttattttttgagatgcagtctcactctgtcacccaggctggagtgcagtggtgcgatctcggttcactgcaacctctgcctcccaggttcaagtgattctcctgcctcagcctcctgcatagctgggattacaggtgcctgccaccacgcccggctaatttttgtacttttagtagagagtccatttcgccatgttggccaggctgttctcgaacacctgacctcaagtgatccacctgccttggcctcccaaagtgctgggaatacaggcctgagccacagtgcccaacctgataaaaatttaatatagttaactattcattgatatgtttattgacttcatcataagctatatatttaattaaaaatcaaactatgagtctgcaaaccagatgctatcaagcaaattaccatccatgatccataattctttttatatttttaactcagacaaatatgtaagattcagtaagttttaatgtttcaaatgttttccaaaaaattatcagaagctcccagttataaaatagttggagaatccattcaccccaaatgaactacctgtttgtgtgtgaggtagcaatcttctgtgacactattacccttaattcatatgaattccctcttcacatgaagagtacagacaacaaacagggacagatgagtctcattattcattgactcttggtgttttcatagtgtgttaaatgcctgatttcaattttacagcaacaaaaaataccaatatttattctgaaaggtaattgtatgttccaagcagccgatattaacaacttccatcacgactctaggaataattcgcagttctgaaccatgttttagaaaaacatttccagcaggtctgtgcaggattttttcctattccatcattggtaataattgcacttcttgcagcaggaacttgaaattcttctgttgcaaactgtaagactgctgtgaaaggtgtactttcaggaacagagtactttgtacgccagccgcgggtcagacctcagagtgatcttaaaggaaacctttgacatggtggcgccgggaggaacccagaacccacgccaactccgcggagcaaccccacttcctccacggtgccggggaccacaccgccccactcacccttatccagtttttaaagtgtgtgatgaaaattggttactttggagttcctttttttcttcttttaatcattccatagattaacgggtaaaaatggagactatgcgggttaaggaaagagactgggaagcagcccttgagatctccacagaacctcagggttccatggaacccagcctgcaaaccgctggtctagatgatcctaaataaggtgctaactctaaaacttatttatttctttttaagatctggtgaggaaggatattatcctgaacttacagaattttgtgaaaagcatcttcaagccttggcccctgaaagcagagctttgaggaaagataaaccagcagcaacagcagccagttttacagctgaagaatgggaaaaaattgatggtgatataaaggtatatagtaataccaattttccatagatattgttgagacattctatatatgtttacttcacttatcggaaatcctaggcttcttgtttgtccgtaaagggcttttagtgtcaattaggcaggattggttgctttttacacccaggggaacattgcgaattcgcgtgtgtgtgcgtccgtacatgtgtatatttaaattgattaaataatattctgtcctattaaaaaacctataatttaatcatcttcaataaatagtgctgtataaacatgtttatttgtaattttttttcttttttttttgagatggagtcttgctttgttgcccaggctggagtgcagtggcacgatcttggctcactgcaacctctgcctcccaggttcaagtgattctcctgcctcagcctcccgagcagctgggattacaggtgcatgccaccatgcctggctaatttttgtatttttagtagagatggggtttcaccatattggccagacttctcgaactcctgacctcaggtgatccacccacctcggcctcccaaagtgctgggattacaggtgtgagccaccatgcctggcctatttgtaatttttttgcacctccctgattatttcctcaggataaattattataattcaaattgcttggtcagatgtggttgctcacaccacctgtaatcccagcactttgggaggctgaggcagaaggatcacttcaggccaggagtttgagaccagcctgggcaacataggtagagctgtctctacaaaaatataaaaattagctggacgtggtggcatgtgtctgtaatcccagccattcaggaggctgagacaggaggatcgctttatcctgagagaccgaggctgccgtgagctgtgatggtgtcattgcactccggcctgggtgacagagtgagaccctgtctaaaaacaaaaagcaagagaaagagaaaaagaatttaaattgtttgatcaaaggatttgaatatttttaagccttttcaaacatatgttctcagaaaagttgtaccttcatacaccacccccaacagtgtataagaatgcccaagccaggtgcagtggtgtgtgcctatagtcccagttactcagggaggattgcttgaacccaagagttcaaggccagcctagacaatacagagagacctggtttctttattaaaaaaaacaaaaacaaacaaacaaaatgcccatttttaggtactctttgctggatactgtaatcatttttagtcaattaaatagttgaaaaaatggtagtaccatagtcccttcttatctttggggcatactttccaagacccccagtagatgcctaaaactgcaaatagtactgaagcctaaatataccatgctttttcctctatatgcatatctatgataaagtttaacttataaattaggcacactaagagattaacaataaaaaacagaacaattataacagcatactgttgtaagagttatgtgaatatgagctctctttctctcaaaatatcttactgtattgtactcacctatttttggatggcagttgactgtgggtaactgaaaccacagaaagcaaaattacagataaggggaggactattgtagtatattttttgattgctagaaaagttgagttatttttcatgaatctgtcacttaaatttcttcttaaatatttacagatttcttttaatcagctttattgagataaaatttacattccatataaattaccaactttatagtgtacatttcactgagttttgacaaacgtatatgatacagaacatttccatcaccactaaaagttttctcttgcccatttgtggtcagtgtagaccccactgcctggcctttggcaaccactgaactgtcagcatagttttgccttttctagacttgcatataaatgtaatcatacagtatgttgtcattcctgtgtgtcttctttcacttatataatgcttttgagattcatctgtgttgttgcatgtgtccatagtttgctcctctgagttgctaagtagtatgaaattgtatgaatatcccacagtttgtttacccacttacctttgataagacccgcagtggatgcctaaaacctagataatactgagccctaaatatactatgttttgactgccaaaatgttttccaaagtggctgtaccattgtgcaatcctgacagcaatatataaaatttccacctgctttacatcctggtcagcacatagtattgtccgttttgttagttttagccatcctaccaggtatctcattgtggttttaatttgcgtatctctagtgactaatgatattgagtgtcttttcatgtaacttctattgtgaggtgtctttacatcctttgcccgttaaaaaaaaattgccttgtgttcttattgagttgccaaataattgttctttatcagatacgttgcttttttgcccaggctggagtgcagtggcaccatcacagctcgctgcagccttgacctcccagactcaagcgatgctcccacttcagccttcagagtagctgggaccacaggtgtgtaccaccacacctggctatttttttttttttaattgtttgtagagacagggcttcactatgttgtccaggctagtcttgaactcctgggctgctttggcccctcaaagtactgggattacagcatgagccaccatgcccagccatctttttttttttgttgttgagacagagctttgctcttgttgcccaggctggagtgcaatgacacagtctcagctcattgcaacctccaactcccaggttcaagcagttctcctgcctcagccttctgagtagctgggattacaggcatgcgccaccacgcccagctaatgtcgtatttttagtagagacaaggtttctccatgttggtcaggctggtctcgaactcccaacctcatgtgatctgcccatctcggcctcccaaagtgcggggattacaggtgtgagccaccacgcccggcctcttttcatttttttttaacagtatctttggaagagtgaaagttttaacttttgatgaaatcttttttttattgtttgggcttttgtgttttatctaagaaatctttgtttaatccaggacatctaatttttctcctaggaagtttatagttttaattcttatatctaggtctataatcagttttaatttttgtattggtgtttgaacaaaaagtgttcaagcaccatttaataaaatattatctttaaatttcttggtaccattgtcaaaaatcagttgaccaaagctgggtgtggtggcgcatgcctacagtcccagtttctctggaggctgagacaaggggatcacttgagcccaggagttttaggctatcatgcactattaccaagcctgtgaatagctgcttaactctaggctggacaacacagcaagacctcatctctaaaaaatcttttttaaaaaatcaactgggctgagcacagtggctcacgcctataatccagcactttgggaggctgaggcgggtggatcacttgaggtcgggagttcaagaccagactggccaacgtggcaaaaccccatctctactaaataccaaaaattagctaagcatggttgcgtgtgcctatagtcccagctactcaggaggctgaggcacaagaattgcttgaacctaggaggcagaggttgcagttagctgagatggtgtcactgaactccagtctggatgacagagcaagactgtctcaaaaaaaaagaatcagttgatcttatgtgtgggtctatttctgactctttcaattctgtttcattattttattttttatatttatttatttattttgtactccttgaggagcaaggctaccccctaggcagcctgcccacagtagcctgtttcattattttaaatgtccatctttactccattaccttcttgtcttgattacaatagttttacagtaactcttgaaatcttactgtaataagaggctggaaaaaaaaaagagactggaggtagtacaagtcttccacctttgttctttttaaaagttgttttggctattctaggtcttttgcttattacaaaataacttgcttgtgtttgaattgggattgtgttgaatttatggatcaattttggaagaactgacatcttaatattgaggtttcggatccatgaacattgtatatttcttcattcatttaagtcttcaattttttttacagcaatgtcttatagttttcagtatgtagttcttgcatatttttgctaaacttattcctaagcattatatgtagctcatgctattataaatgttaatatttttataatttcaattttttgctcatcctgtcatctcagttatgaaattttgtttttttattatagtgaaatacatattacataaaatttattatcttaaccagttttgagtgtacagttcagtagtgttaagcatattcacatggttgtgcaaccactcttcagaactttttcatcctgcaaaacaaatgctatactcattaaacaacaactccccattttccccactcccctgtcccctagcaaccaccattctattgctgttcctataagtttgactactttagatacctaattttaatttcaatttttaattatacaagtttgtatttatctaattgctttttcatattgacttcatatcctgcaattttgttaaattcatggattagttctaggaatgtttttgtagattcattggattttctacctgcaggatcatgccatctgtgaaaaataagagatgtgcttcttttccagtctgccatttatttatttatttatttatttatttatttatttatttatttatttattttttacttgctttattgaactggctagaacctccagttcagcagaagtggtaagagcagatcctcgcctatttcccagtcttacagggaaatcgttctgactttcactgtgaaatataacgttagctttaaattttgtgtagatgccctttatcaagttgaagttttcttctgttccttgtttgatgagaatttttatcatgaatgggttttgaattttgtgaaatgctttttctgcatttattgagatgaacagatgattttctttgtagtctgttaataaggtaaattatgtagattgttttcaaatattataccaaccttacattccaggataaactctacttggtcatgatatatcttttacaaatatattcctggatttgatttgctaaaattttgcgaaggatttttgtgtctatgatcatgagagatattggtcaatagttttattttcctgtaatatcactgtctggttttggtagcagggtaatgctggcctcataagaggagttgggaagtattgtctcctcttctgttttctaaaaaagttggtatatgattggtattatttctttcttaaatgttttcaattcattgttgacactgtataggcctggagttttctttgtaggaaagattttaactgtgaattcaatttttcaaatagatacaaggctgtttaggttatctttagagctctctttctgtacggcttcctcctttctgatatttttttcccccgaatcctcacagtcttggcctccctaacgtccaaactttgtctgctgaattcagcaagaccacagggttctgtctgggtacttttcctgtgctgcagcctggaaactgcagtgagttggagcaaatgtagggcttacctcatttgttcacccttctttcaagaatcactgtcctgtgccacctgttgtctagtgtctgaccaccatcactccatatatcttacccagttttctagaatttaggtaagagagtaaatctagttcctgactccgtcaggccagaagaaatccctttattgatttttctttttttttttctgagacggagtctcgctctatcgcccgggctagagcgcagtagcacaatcttggctcactgcaatctctgcctctccagttcaagtgattctcccgcctcagcctcccgagaagctgggattacaggcacgtgccaccgcgcccagctaatttttgcattttttctattaatgtgtttctcattgttttgtaagagttctgtactgtatattgtaaattttcctctagcttgttgtttaccttttaaatgttgtgtgtggtgttttttatttttttaaatttttatgctatcctcttaattttattctttaagaacttttcattggcttttatagttaggaaggttttctctccaccagatacatatttacttatattttctcagagtttcttcagtttcattttgcttaagaaattatttttgggctgggcacgagtggctcatgcctgtaatcccagcactttgggaggccgaggcaggcggatcacctgaggtcaggagttcgagaccaccctggccaacatggtgaaaccctgtctctactaaaaatacaaacaatcagccaggtgtggtggtgcatgcctgtaatcccagctacttaggaggctgaggcatgagaatcacttgaacccaggaggtggaggttgtagtgagcaaagatggcaccactgtactccagcctgggagacagagctagactctgcctaaaaaaaagaaatatatgtgtgtgtgtgtgtgtgtgtgtgtgtgtgtgtatgtgtgtgtgtatgtatgtgtatatatatgtgtgtatacacatatatacctcgcagatgctagagaaccagttttttggtttactttattttatttatatttttctggggttaaaaacaattttaaaacatctaaaaacaatgttgaggtatatgtattctgtaacttagaatgctgctttttaaactttcagccttctcattttattggcttgagctcaaaaatatggtaattaatctaccagtcaaaaatagcactttatgtccagactttttggctttgttttcaggatgcagacagcttgattttagttgaagagcctaggtttttccccattgtgtgtctttgctcttcttgaccacttctttttttttttttttttttttttttttgagatggggtcttgctctgtcacccaggctggagtgcagtggcacaatcatagctcactgcagccttgaactcttgggctcaagtgatcctcctgattctcccaagtagctgggattacaggcattcaccaccacactcagctaatttttttgtagagacaggggtcttgctgtattgtccaggctggtctagaactcttgttggccactttgcaagttagtctccttctcacttgcctttctttcatactttgtttgccacttgtccccttttctccattctttctcgctcccttcctcctctataagtcttcctcttatcttttaccattcttaccttattgcttttctttttcttctcatatttctcctctttgcccctttccaccctccctgccttctatacagatagaacagataatatagttgttgggtttttttgctgtatcccagtgcttttaagagtgtctaacaaatattagaaccctcaatacatcttttctgaataataagtaatacagtttcacagataataaatctcttactcaattttttttctggcacctgtgacaatttaataaatgttaagaacctactatatgtcagacactgaatcacaaagatgaaattaagacataggccctgccctcaaggaatttacagtataagaagagagactaacaatagatgatttttaaatctttatgctaatgtattatggaggagaagcacttttagcccaactaggaagttctgggaaatcttgctgaaaagaatgatgaataaggtattgcaagataaataaaagtaggaagggcaacaacaatgtatatatacttaacaagactgaactgtagacttaaaaatggttaagatggccaattttattatgttatacatatttaccacaatttaaaataaaaggtaggaagtatgttccagatagtgaggatggcatggatcacattgtctaaaaaattgactcataggaaactatgataaatatagctgactcttgaacaacacaaggagttaggggcgctggctccctacacagtcaaaaatctacttacaacttttgactcccccaaaacttaactattgatagtctatcgttgactgaaagccttaccaataacatgaacagttgattgacatatattttgtatgttatatagattatatactgtattcttacaataaagtaagctagagaaaagaaaatgttattaggaaaatcataaggaagagaatatatatttacaatgtattaagtggaagtggatcatcataaaggtctttatcctcgtcatcatcacattaaataggttgaggaggaggaggaagcataggaggtgttggttttgctgtctcaagggtagcagagatggaagaggtggaggagatgaaaggagaggcaggtgcacttggtgtaactttatagaaatcaatcataatttctgtctgacttttgctttttcatttccctaaaaatgttactatatggtaccaatccttcttccaccgtttgctttagttttagtccccgtatcacagagggtagatgttgtgaaagaagtcaaaaacagtcttgtgtaatcggagcccttctgccagattgtctaatgttagtttattttctggcattgcttcttctatgtcttctcattgtctggcactggttcagaagcacttaccttcatgaagtcatcttctgttaattactgtggtatggtgttagcacttgaatttctccaacttccatatcttgaaacacttcactcccaactttttttggcatattcataatctcttttatgatttccttgatttactctattgtaaatcctatgaaatcccggacaacatctggacagtttttttctagcagggatttattatttcatggcttttttttttttttttcttagagatgggatcttgccatgttgccagggctggaacgtaatggctattcacaggcagggtcatagcacacagtacagcctataactcttgggctcaagcgatcctcctgcctcagcctcctgagtaagtggggctacaggtgcatgtgccaccactcctggcttaatggctttttctataataatgatggcatcttcaatggtgtagtccttctagacgttcatgatgttctatcagggttctcttctgtagtgttgacaatcctttccatagagaagggcgtgcagtgaagttcttttttttttttttttttgagatagagtcttggtctgtcgcccagcctggagtgcagtggctcgatcttggctcactgcaagctctgcctcccaagttcacaccattctcctgcctcagcctcccgagtagctgggactacaggcgcccaccaccatgcctgactaattttttttgtatttttagtagagatggggtttcaccatgttagccaggatggtctcaatctcctgacctcgtgatccgtctgcctcagcttccaaagttctgggattacaggcataagccaccgcacccagctagcacgcagtaaagttcttaaagatctttgtgaccccctgatctagaggttgaattagagacgttgtgtttaggggtaagtagaccacttgaccccttcggtcttgaactcatgggattctggatggcctgggacattgtccaacatcagaagaactttaaaaggcagtcccttagtggcaaggtacatcctgacttcaggaacaaagcattgatggaaccaatacagaaaaagtgttcttgaaccaatacagaaaaaggccttcttgttgtacagccaaaagactggcagctgatatctatcttttcccctcaaggcttgagggttaacagctttacaaataaggtcagtcctgatcataaacccaactgagtttgcacaaaatagttgagtttccctatcccttcctgccttaaatcctggtgcttgcttctgttccttactaataaatatcctttgtggcatttttttccccaagaatacagcacttttgtctgcattaaaaacctgctcagacagatattctttctctttattgattttctcaatggcgcctggaaacttgtctgctgccttttggttgggagaaggtgcttttcctgttctcttgacattttaaaagccaaacctttttctaaaattcaaaccatcctttgctggcgttcaattcttcagctttataggtccatcatcttccttttgctttaagttgtcatataatgactttgctttttctggaatcatattagagtctataggaatgtctttctttttttttttctttctttcttttttttttgagactgagtcttgctctgtcgcccaggctggggtgcagtggtgcaatctcggctcgctacaacctccgcctcctgggttcaagtaattctcctgcctcagcctccccagtagctgggattacaggtgcccaccaccacacctggctaattttgtatttttagtagagacggggtttcaccatgttggccaggctggtctggaactcctgacctcaagtgatctgcccgcttcggcctcccgaagtgctgggattacaggcgtgagccaccacgcccagccaggaatgtctttattacatcaattttgcacccacatgaaggctgcattttcaataaaagataaaaaggcatttcacaagaagtgcaaagtctttgcacctgatggtgtagccgcagtgatgcaatgatggcctcataaatttccctctcctctcctctcctctcctctcctctcctcttctctctcctccctctccccttccccatacccctccctctccctctcctcctccccctccctctctccttttccctcctcctttcctctccctctcctctccttctttttttcgtttctttcttttttttcaatggtccttactctggattcatttattttgaaatggtgggcaactgcaatggtagcttatgccagatcttaatctctggcacatatcaagcaattcagctttttcttgtaatatcatgtgttctctctgcttcttgggagcacttccagcatcactagtgacactttatatgggtcccatggtgttatttaaggtttacagtattacactaaacatcataaaaatatgtgagaactgtgagagatcactttttatggcaagatgcagtttactagagacaaactgctcctgcagagatgactagtgtcacaaggcattttaagcagatacttgtaactcttaagcttaccacaatagcaacaggaggtggctgtgaaattattacgtattatagtgtctcctacagtcagttttatgcagctatgatttaatactgcatcttcatgtctttttttttttacatttctctttactgtgaatggtgccatttatggtctgtaagtgtttgtgtgggtaagttttgataaattttaactttttataacttgtgtatactttatggtagtaaatgataaaacagactagtatctacatatattttatgcattcatgaaatacctaactttatcttaatttttttgatatttctaattcatctgtgagttttttcaaatcgtcacaaatctccaaaaatttttccaatatttttactgaaaaaaatccacatataagtggaccaatgcagttcaaacttatattgttcaagggtcaactatagttctttcttatgcttggttataattatttcaaactatatatttacccttttctctattctcagagttgggtatcagaaattaaaaaagaagaagataaaatgcactttcatgaaactgagacatttccagcaatgaaagataatttgcctccagttcgtggttcaaacagctgtcttcatgtaggcaaggtaggcttctttgatatctttgtgggtggtagcaggagaggattgctgctgtttattaaggggcaatctcagtttaattggagcagcctatgtgtgatgtcctctaggagaattggggagtttgttcagctggctgggaactatcggctgggaactatcacgttctttactgtctcattacttggaaatcaaaatgaaacagttttttcctttgaagtcctgcatcttgggcttatttactgcctttagtcttttttttctttttttatacaccctgtctcttccgtccagttttgatgagagcaaaaggtctgattcagtgtgtgaaaatttcagggaacaattgtatatatctagtagggctacagaggatatatcatgttacataatttaattatggatttaaaacagtaaacagatactttcagtacttataaatgtcattcctctgtttagtgcatgttttttcctcttattcccatttctctgtcgttggtccctattttgtcacatagacctctcctttttaatctgtgggctccacagagaaggggcctcttgaagttccaggcccattctatttaactttaggttgaaactggggttcctggcatccatctgaccttgtaatttctcagatgactccccaagccttttcattctaggttaactcattcttgttattctcgtcttttctttgaatcaattttattttaaaaacatccatggctcttcatcactctgctctctgataatttaccttcctggatctttttactcctcattaggaattatgcaggtaatggaggtgtacagtaatctggtgaggatgccactatctgcaatcagtgaaattgtatttattgaatagttggccaggcacggtggctcacgcctgtaatcccagcactttgggaggctgaggtggatggattgaggccaggagttcgagaccagcctggccaacatggtgaaaccccatctctactaaaaatacaaaaacattagccaggcatagtggcatgtgcctgtaatctcagcttcctgggaggctgaggcacgagaattgcttgaacccaggagatggaggttgcagcgagctgagattgtctcctctgtctcaaaaaaaaaaaaaaaaccacaaaaacaaacaaaaaaactctgggcatggtggctcacacctgtaatcccagcaccttggaaagccaaggagggtggatcacttgaggtcaggagttcaagaccagccgggccaacatggtgaaaccccatctgtactaaaaatacaaaaattagccagccatggtggtgggcccctgtaatcccagctatttggaaggctgaggcaggagaatcgcttgaacctgggaggcagaggttgcagtgagctgagatcacaccactgtactccagcctgggggaaagagggagaatccatctcaaaaaataataataacaataataatagtcccggtgtactaagactgtgccttgaaaatataacaatgaacaagcattgctgaaggagcaatggggtggatggactagtggtacagtagttcttaaagtatggtctaggaagcccttgaagtcccagagattcttccagggggtccagaaagttagtgctattttgaaaataatactaatgctttgtccttgtcactgtgttggtatttgccctgaggataaagctgctattgctttaacatgaagcaaggcaggcaccacgttgtatatacagtaaaaacaaattccaattttacttaaaaatacctttgataaaataatagaatatttactttgttagatcttgaacttccaggacatgtcattttagtattttgtgacaaagtgagaagtatgcagaaagcacttccctgcatagtcaaatatgatggttatgatatgatgcatagccacgtcttcctggaatgctgtttttacttgaaataatggttgacaaactgtcattattcagacttaggattttggcaaaaattttgttggaagtgaatgaaggaggcctgtcgctttaagaaaaacaactcacagtatttgttgctagtaagaaaatctgacctttcaagtgcaaattaggtccaggcacaggcgggcagtggctcatgcctgtaattccagcactttgggaggccaaggcgggtggatcacttgagcccaggagttcgaggcctgggcaacatagcgagaccccatctctacaaaacatttttttttttattagtgtggtgtggtggcacatgcctatagttctagttctatctattcaggagactgaggtaagaggattgcttgagccctagtggtcaaggctgcagtgagccatgatgacatcactatactccagtctgggcaacagagcaagaccctgtctctaaaaacaaagtgcaaattagggcttgaggtattaaatatttagtataatataacaatatctaataatttagatattatgtgtttctcaaatatctgcttgtgacagaaaatagcccttaagggggatacttgtcaaaggacaaaattacaacaaatttcaagatctaattggcttctattaacaattcatgaatcaggatggcatctcctctaaaaatttagaaaatatgctccaatggccatggcagaacagctggtttttataaggtagcttgagcagggataaggcatacaaaaaatagactatttaataacaggttactttccttgtaagggttaaagcagaaatttggctattatctctgtctcttgatttctccagtcagataagcaacttagttttggtttggtgatatggaacttgagcactagtgactgtatttaagtctgttggggcctagtgcaggagcttagtccaaatcattgaccttctataaattttatttaacatacttgaaagtcttttttgatgatctccatgcagatattaacaaattgtgatttttaaaattgcataatgaaatctgtgaatatttggaaaatctgtataactccaatgaccaataattttgaggagtgcgagagtgtcatgatactgaaaagtttgagccccactaatgtagcatataatggattatgacagtaaatatgcagtgttatgagaatacatagaaggcacatgtcccagcctttcaaagtcagggagcattgccttcttaaaatatccaaatataatattacacattagaatttatcatgtatactgagtccatgtcttgagacttttattgctccacattctttttttatttattgaaaatcttcttcttctttattcagtcataattgataaaacttgcatgtatttatggtgtgcaatgtgacattttgatatatctacacattttgaaatgcttaccacagtcaagccaattcatgtccatttcttgatccctaaagggggatattttttgtcacaggtaggtatttgagagccacatatgaatattaaatacccctgattttgaatcaatgaccttttgaaactaagtgataccacttgtattagtttcctagggctgctgtaacaccacaggaagtggttggcataaaacaacagaaatgtattctttcacagttctaggggctagaagtacacaatcaaggtattggcagggcctttcttcctccaaaacctgtaagggaagatccttccttggctcttccagcttttggaagccccggccttccttggtttgtagcggcacaactctaagctctgttttcatttccacaccaccagcttccttctattggaacttcttctcctctttgtataaggacacagtcatactggattagggcccaccctaatgacttcatcttcatttgatgacattgcaaagaccctatttccaaataaggtctcattcacaggtaccggggttaggacttcatcatattgtttttgggagacacaattcaacccataacatcatcttagcattgagaacattgtctttatgagtaggaaatcgagttcaagcatcaaatgatactttttgagcctgtaaggactgcatagtactcatttatgtagtttatatagttcttagtattgctattagcaaacctgagcctaatgagaatgaagatatgtaatagtttaaaaacaaatcagtacctactttattattataaattctgctatacttacctttcttcagactatatagataaatattttaaagttaatattccttagtacttatctagcaaaaaattgtaccctctctgggagactgattatttgtgagcattatggctattgtttgcctttctctcattctgttctggtgcagaacctgccctctgtctttagcagtgggaatgtggctactttgggccactgttagtgcttggttaggatgggcccatgacccaagctagccaatcagtccttccttggaatttctctaactgaagatggagagaagagtcactctccttttcctctggtggagagagctgtgaggttataattccagaatgcttgtggtgatgtttcctgccacatggagaaagcaagtacccatcagggaaagtgaaatcagtaggtagagaggagcagaacctgggaggggcagggagagctggagaaagggcataggaatcccctcatccagcagcacccttgcccttccatcagtttagttatataagctgataatttcttcttttttaatgtaattattccaaatcagattactatcattgcaaacttctgactaatatagcaattattcttgtttctccaatgcctaggtttgaaaagaatgaatcagaatttagtacttttttattataagaaaatcagtaataatcatattcacacataagttttaaaattttatatgtatatacttaaaaacctatagattgtccccagaattaactataaatttaaaattctttcttttacatgctgtatattattatgttaataactgtaatactgaagttattataacttccagggtacctatttttcttatccattccatttgtatatctttattttatttttatttttttgagacagtttctctttgtcacccaggctggagtgtagttgctcgatctctgctcactgcaacctccacctcccaggttcaagcaattctcatgcttcaacctccaagtacctgggattaaaggtgtgcgccaccatgcccagctaatttttgtatttttagtagagacggggtttcaccatgttggccaggcgggtctggaactcctggcctcaagtgagctgtccacctcagcctcccaaagtgctgggattacaggcgtgagtccccgcacctggcttccatttgtatatcttaacccaatactttccattgcatttacagtaaaacctgataatcttatattaaatatgtctcataaaatatgattttattcttttaggaaaaatattctaaaagaccaactaaaaagaaaactccaagggattacgcggaatgggataagtatgttttacatgtctttatataaaatgtatcactaaaaaagttatctaccacaaaatactgcaataatttcttaaataattattataaaccttaacatgtcaagaataccaaattacttcaatagagtactgagaatatctggcctcagcacttttgatgtttttttcagtacataaaaaacttctacatcctatttttttataaagtcagccaaaaaaactaatgtattttttatacccatccaaactaaaaaggaacaaaaatttaaaattgagataagttagtcaaaattttaatttcaaagttctgaccagtttagatttgattaacgtttaagttctcactaaattgtatgttttcttaagaaggaactcagatgacttgaactattaacttactacatatttttgaatatgtatccaaaggcatacttgtacaaatataagaatatcaatgataaatttattttcttgcctgtattgtacttttttggtttttattgttctttcatttaagatttgacgtggagaaggaatgtttaaaaattgatgaagattacaaagaaaagacggtaatagacaagtcacacttgtctaaaattgagacaagaatagatacagcaggtaattggagaaaaaataataatttagtagtctttaaagtttttcaattataataaaaagtgtcaatctagaagacattgtctttgagtactgcacagattaccatgaaaagtttatggattttctcttacagttgaccactcaacaaattcacttctctcttttacccacttaatttttaaatgtagtaaggctttaaaatataaacctatttttcttactgtaattcatttgtttttaattccttttttccaatcctctttttcctccaaattcctaaaattgttttctttttgcttcaaaacaaaaagatggggcagtttattggactagcacctataaagtgaaacgaaatcaatcattaaaaaaattctgaatcctcaaaacttgtgaatgatttaaaaagaaaacatccctaagcttggggaaccttttattttcttttgtttattttatgatctttctgctttcttctgcttctgttaaaataagcattcttagatttaaacttgaaaaattctgttaaattatacgtttacatatagcagataacatttatttctaggtctaactgagaaagaaaaggattttcttgccactcgtgaaaaggagaaaggaaatgaagctttcaactcaggagattatgaagaagcagtgatgtattataccaggtgagcagatgtttgttggggtttaaacttgccttttaaaaaatgataatgttttaattgttgaaacaatataaataagcgaaagtctatgtcagaatctctcaatgtattgtacttgtgatttatcatatattcacttgtgtttctcctattttttcaataatttttctcaaacctctaagctcccactccactcctacttttgacagaagacttaacttcctatcttgcagagaaaatagaaggcatctgacaggaattcaacagaaggcccatatgatatagaagtgaataacttgggttccattgtagactgcctggatttacttctagtactttggtgctccttcctaccacagggcctttgcacatgctgggtgcaccatcaaaaatgcttttcccatggctggtctgagtacagtggtgtttacaactaattgatcacaaccagttacagatttccttgttccttctccactcccactgtttcacttgactagcctttaaaagagaaaaggaaattaagaaaaaaaatgctcttccctcgttccattatctagttaattctgatttatccttcagatcttagtcttcaccttacttctttggagaagtcttacttcaccttccaaactaggttaaatctccatctcaccccacccacctcacctcccaatttataggctcttatagcagtcttacctctcctttgtagcacttgtcagaagtataatttaagcttgtgtgatttgataataactagaatgtaagatttgtaacagcagaacccatttgtcaaggatttttacaccattgtatccccaaggcccaacaaagtacctggttcatagtagatgttcaataaatatgtatatgaacttctgaagttcttaacagcctatgaaaagtagactaagtttttaaaatgttgttacagataaactgttcttatagaatcactaatgctaccttagcactaaactctgtacaatcttttttccacctttggaaataagatagatttttttcaatgttgttggtgtatctaaagaagttttctcagattgtttaaatgaagatacgaggtaaagaggatatatgatggatcattcattcagtacagcctcccctgttcaggcaggtggatgtcagccttgataactgttctttcttttcttgtaggtttataccagagattctcttgtctattacaggttacaaagctcttttcttcttttttgaggagtcatatagttgaagaattaaagcagcatagtatgatggttaagggaattcagactaccactttctgaccttgggcagattctttttttttttttttttttttttgagacagggtctcactctgttatccaggcaagagtgcagtggtgtgatcatagctcgctgcagcctcaaactcctgggctccagggatcctcccacctcagcctcctgagaatactgggactacaggtgtgagtcaccatacctggataattttctcttgtgttttttgtagagacaggctctcatgatgttgcccaggctggtctcgaacctctggcctcaagccatgctgtcacctcggtctcccaaagtgctgagattacaggggtgagccaccatgcctggcttcaaaaaatgtgtttggtatttgatatttgatgttaacttacatcaacggttttttttaaagtgatctataggtatttatctttttctaccttcattttttattccagtaactaaagctcagattccagatctatcagtatttaaattcccataatgcctctaaagcctgagttaactttaaggctattaactggatatttaagcatctgtttaaatattgatttagtatgcttgtagaattgtattttattatttttgataatataggctgtatttgtttgctaaggttgccgtaacaaagtaccacagactgagcggcttaaacgagagaaatttcttttctcacacttctggaggctggaagtttgagatcaaggtgctagcagggttggttttttcaaggcctctctccttggcttgtaggtggccgtcttctcccagtgacttcacagtctgtccatacatgtatgtccaaatatcttcttcttataaggaaaccatttttatgggatctgggccccctctcatgacttcatttcaccttaattagctttttaaagaccctatctccaaatacagtcatgttctgagatactgtggggttaggacttcaacatacgaatgttgggggatacaattcagcccatagacaggttataattgttttatgtataactgaagctgaatttctctacattcttatgtttaccttaggcttgcttgttgccagtaactgtttcttttctaggagcatatcagcgcttcccactgtagttgcctataacaatcgagctcaagcagaaatcaaattacagaactggaatagtgcttttcaggattgtgaaaaggtcttggagttagaacctggaaacgtaaagggtaaaaaatattatagaattcttttacatttacagcaggatccattaataaagaccatttgtagatacttgtaatgtttacattaaaaatatttcagataaactcaaatttctgtatgtgaatcaccaacttcataaagttgcttttaaattgaacttgtaagttaagctcctgattatttgtactgaagtagctaataatcccagaggatttaataaaatacatatatattttaaagaagtatctcaataaacaaaaaaccaacaacaacaaaaataaaataaaagagaagtatcttggccaggcacagtggctcacacctataatcccaaaattttgggaggccgaggtgagacgattgcttgagtctaggagtttgagaccagcctgggcaacacagcaaaactctgtgtctcaaaaaaaaaactcaagcttgcatttgaacattctttttctccaaaaaaaattaagtataacttaatatagattttctggtatttataaatataataaaataataagcccacactggacctctagaaccttctcccagcttctttgtggatatttccacctaggtggctatatataattttgtttgtttgtatgtttgtttttttgagactgagtctcattctgtcacccaggctggagtgcagtggcgtgatctcggctcactgcaacctctgcctcctggattcaagtggttctcctgcctcagcctcccaagtagctgggactataggcgtgcaccaccacgcctgactaattgttgtatttttagtagagagacggggtttcaccatgttggccaggctggtcttgaactcctgacctcaggtgatccacctgcttcagcctcctaaagtgctgggattacaggcgtgagctactgctcccagcctgtttttgtttttttgagatagggtctcactctgtcacccagcctggtgtgcagtggtgcaatcttggcttactgcaacctccacttcccagtctcaagtgatcctcccacctcagcctaccaagtagctgggactacaagcacgtgccaccacacccagctaattttgtttgtatttcttgtaaagatggggtttcactgtgtcgcccaggctggtctcaaactcctgagctcaagtgatctgcccacctcgacctcccaaagtgctgggattacaggcatgagccaccaagcctggcctgctataaataatttaattttcattttaaattaataatttgaataacttaattctaaattaaatttgtccaaaactgactctttctgccaaaaacctgcactctcttttgattccctgtccctctgactgaccaccttgtcatggttcaggcctgaaatatgcaaatcagactctattctccttttctgttatcaagaaggagtcattccaagagggagtgacatacattataatagacacattatatttctttaaatttttatggattcaaataaatataaacacttttttcacatggaatgtatccctttttgcctataaacatggtggaggtggcagaagccatgggagtgctaaggggaagcctggtgcatcacctgccactgtcattgccatggattgccctccatttaccaataaagtcctgttgggcctgtgttttacgcaagctggtctctgtcacagagtatggctgggctcccagctttaggcagcagcccactgaaggttttgccaaccccataccactgctctgccaggccccgtgccaagcactttacatgtattaactctgttaattttaacaaaactctcggccaggcttagtggttcatgtctgtaatcccagcactttgggaggccgaggtgggcagatcacctgaggttaggagttcgagaccagcctggcaaacatggcaaaactccatctctactaaaaattaaaaaaaaaaaaaaaatggaggggtgcagtggctcatgcttgtaatcccagcactttgggaggctgaggtgggtggatcacttgaggccaggagttcgagaccagcctggccaatgtggcgaaactccatctctactaaaaacacaaaaaattagctgggcatggtggcaggcacctgtaatcccaacaacttgggaggctgaggcaggagaatcactggaacccaggaggcagaggttgcagtgagctgagatcacgccactgcactccagcctgggcgacagaacgagaatccatctcaaaaaaaaccataataaattttaaaaaaaattactagacatggtggtgggcacctgtagtcccagctacttgggaggccgaggcaggagaattgcttgaacctgggaggcagaggttgtactgagctgagatcacgccactgcacttcagcctaggggacaaagaaagactctgtttcaaaaaaaataaataaatacagaatatgttagcattaggtaaagctgagttaagggacacaggaactcattgtactatctctgcaacttttctgtaaatctccaatgattccaaaataaaaagttttaaaaaaggataatcattatgtcatgaatatttcttcatagaaattcccttcagaaatctgtgtagcaatagcaatagctaaattatatttaaagtgcagtgctacaattttaattaaatttataacaaaatgatttctcatttagattttcatagctcattctaacactaaaattcaaattggtcaaatttataattatgttttaaaatagcatattaaaatatgtcagataaaatttctaacttttcaggcaggcgcggtggctcatgcctgtaatcccagcactttgggaggttggggcaggcggatcacgaggtcaggagatcgagaccatcctggctaacacggtgaaaccccgtctctactaaaaataccaaaaaaaattagctggatgtggtggcatgagcctgtagtcccagctacttgggagactgaggcaggagaatcgcttgaacccgggaggcagaggttgcagtgagccgagattgtgccactgcactccagcatgggcaacagagcaagactctgtctcaaaaaaaaaaaaaaaaaaattctcacttttcagaattaccaaacttgattctttttcaaagtaatgacttattacacaaagttctccttatataatagttaatgatgagtctagagaggcattcattgtcagtattaaataattaccaaattatacattgaaacgtacccaaaaaatcaaatgcgaattatcaaagtgcttaatttctgacctaactgacttaatcatcaggattctctcagttccctatgctaagtcactccttctaatcattttagagattgctatacagatgtcactaatgagccacattctgagctagatgctggtcagtaatatactttttttttcttttttttttttttttttggagacagagtcttgctctgtcacccaggctggagtacagtggcacaatcttggctcactggaacctccacctcccaggctcaaacaattctcctgcctcagtctcccgagtagctgggattacagatgtgtgctaccatgccaagctaattttttttttgtatttttagtagagatgggattttgccatgttggccaggctggtcttgaactcctggcctcaagtgatctgcccacctcaggcccccaaattgttgggattacaggtgtgagccactgtgcctagccaatatactaaattttgataagggattttatgttttcaaaaagtggctaaataatactcgccataattataaaaaggaaaggattattatcagtgaaaatcattccgatattgcaatacaatgtgttgcctgtgaagggttgaggtatgaaatctcttagttcttggaaaagctggcggggcctggggctgccagagggccagagggttgttatagaggggacagctggctgatgtagcctcttttatgtacctcagtgtcatctcctatgtgtgtatcaacatgaaaaagggtgtagttgagctttgggtaattacatcctaaagtattctgtgctgctcatatcttccacttgccaaatatgttgtaaccataatgccacatattaaaaaacataacttttatattggtaaattttcagctcttctgcgtcgtgctactacatataaacatcaaaacaagctccgggaagctacagaagatttgagtaaagtactagatgttgagcctgataatgatttggccaaggtaagtatagaatgtgatttctcacctaattctgtagttggctgtttctgtatttattttaaagtggtatcaatcttgccaaacaaattatgttgaagatcaggtcacagctttaaaaggtaggtatattccagacaccccaaaacgttaacatctatttcaagtggaagaaagcagaatcttaaaattttttttcaaaactataaaccttcctctgaaagacaaatatcaatttttctttttcctatagtgttgtaggcaatgtttttctctgagccatgtggagtggtatagaaggtaccttcctaggtaggattaggggtgaactctgtggccattgaagagtgtttctctttgtaatgagcatggtagcatttgctacctgactgagcagactgactcagttatacacttaggggatctgtattcacgcctaaagagtagaggtaagtgtcaagaactgagattttcccctgcttacaaatgaacaaggtggcctaccagaggatacaagatatcctgagtcaaacacgaaaagactttgtcactccaagcagatgagcttcacgttcatgtcagttccccttgctcccaagtcccacaggggtgacatagagtggcccagatggatgttgcacactcaatggatttatgtgatggctgacaaatcaaaaatttaggaaaccagctgagtgcagtggctcacgtctgtaatcccagctctttgggaggctgaggcaggcaaatcacctgaggtcaggagttcaagaccagcctggccaacactgcactccaactggggcaacagagtgagactccatctcaaacaaacaaaaatttaggaaacctgcttcttttatgatgggatataagcaaacctgcccaatctctgctccatagggaagcatcacctttattacactggagagccaacacacctgccctctccgctgcagatgaatactatttctgtttgccaaggttgttctcagtacaaacatccttagagatgtccagaaagaaggtggtttagtgcctctgctggcagtatagtcagaaataagagaaacccatggaaaaattgttactaagtttccacatacacctattgggttacctatcccactgtctctgagtggcagctaatgttcctagaatatcagctgctttgtcaagtcaacattttaggtttaggtttagggcctggcttagtatttcctttttgtaatggttatgtttatttatttttgagacagggccttgctctgatgcctcaactgtagtgtggtgggaacatggctcactgcagcctccacctcctaggctcaagcaatcctgccatctcagcctcctgtgtagctgagaccacaggtgcacgccacctcccaaagtgctaggattacaggcatgagccattgtgcctggtttcaaatgcatttttatcttaaccatatgcaaagattaactcaaaatggatcatatactttttgatgtaagatataaaatataaaagttctagaagaaaacataggagaaaatctttatgaccttagacaaatatttcttatgtaagacatgaaaagtacaatccataaaagaaaaagttgatatattggacttcatcaaaatttaaaacatatacttttcaaagacactattagaagaataaaagacaagccacagctgggcacggtggctcacacctgtaatccaagcacttcaggaggctgaggcaggcagatcacttgatcccaggagtttaagaccagcctgggcaagacagctgaacttcatctccacaaaaaatttaaaaagttagccagacatggtggtgtgggcctgtagtcctagctactcgggaggcaggggtgggaggataatttgagcccgggaggtcaaggctgcagtgagctgtgattgcaccactgtactccagccggggcagcagagggaaaccctgtctcagaaacaacaacaccaacaacaacaaaacaaaacaaacaaaaaagccacagaccacagactgggagaaaatatttgaaaatcgtatatccaacaaaggatgatatatctatttttcatcagagtcagcataaaatatttcagaattttcagcattactctaaaacagtaatgtgggctgggtgtggtagctcacgcctgtaatcccagaacttcaggaggctgaggtgagaggattgcttgatcccaccgtttgagactagactgggcaacatagtgagacctcatctctatattttaaataaacaaacagcgtatgtagcatgatttcatttgtgtaaaactgtacatctctgtgggtatatatgcatagaaacatctagaaagatgattatcaaaatgttaatagtagtatctgaatggcaagattttaggtgattttttctttattttttatacttgttacaccgctttttgtgtgtgtgtgttttttttttacagtggacatctatgattacaatcaaaggccaccaaaaaaaagccttgtcttagttgtattcatttttcaacatctttatgtttttaacctgaaagaatggttatatttattattagaggaaaatattttctttaatatggtaattatgttgcagaaaaccttgtcagaggttgaaagagatctgaaaaattctgaagctgcatctgagactcaaaccaaagggaaaaggatggttattcaggaaatagaaaactccgaagatgaagaaggaaaaagcggaagaaaacatgaagatggcggtggagataagagtaaaatattttttctatttaggttatgtaaaaagctgccttttaatatgatgagctggctcaatttttctattcgtacagaaattcgtaatctatcagtttttctagctttgccttgtaaattcacaagccagtttcgctcatctttttcttaatacagcttggtagaatctctcaaacccattttccttcttaacctgtcacctttttctagtgctcagtttaattcctggtcatcacctttaaatgtaaatggctgtgtttatttgacacagaccatttgccagttaactttaaatatctctctttgataattgttttgtatatatctacttgattgcaaacaaatgtgttggtttcaaaacaggtatgggtagccccatttatatgccaaaaatgaacgtattactagaaaattgctatgtgtgtttttcaaaaatattttaaatatgcaaaagaaataagtataatttaacacttgaaacaatattttaagagaatctagactagataaagggttatcttcataatataaaacatcgaaagttatgtcaactttgaggggaaggatttgcctcctcacatgacaagggacataaaaacttttccctccgtcagctgggcgcggtggctcacacctataatcccagcattttgggaggccgaggcgggtgcatcatgaggtcaggagttcaagaccagcctggccaacatggtgaaaccctgtctctactccaaatacaaaaattagctgggtgtgatggcatgcacctgtaaccccagttactcaggaggctgaggcaggagagtggcttaaacccgggaggcggaggttgtggtgagccaagatggtgccattgcactccagcctgggcaatagagcgagactccatctcaaaaaaaaaaaaagaaaaagaaaaaaaggtttttccctccttcttgagaacacctgagcaactggcagtggcggggcagtggaggggggagatattatcaattttgaaaatcattcacaagtaaaaatcaacttgtaagtaatttgacagaatattctaattttgagagagatacaaaatgttcagttcattcaattttaaaaataaagaacgagttttaatttttttaagtgacaaaaaataatgcaatgtatacacttcagattaaaatacaatcagttaagactggataaagacaaaggaacagaaagggagggagcgagaaagaggaagacaatcagagaggtgagaaggaagagagaacataaaaaggattgaaaagggagaaattaaggtaaccagtttttcaaggattcaggcttgccttttagccagattgtaaatacgatctggcagcaaatcttcttagggtttatattgagcttttgcataattaaccatatgtcttacagttaaaggaaaccattttaaatcttatctgaagtgagatgaagtataaactatattacttcctattattttaaaattgttattttaaaattttatatatagtaaaaatgaaccttttgaatatacagttctaatacatgtacggtttcatgtaaccatcaccatagtcaggatacagaacagttctaccacccaaaaaggccttcttgctgtcctttcagtgaaacccttccctcaccccagctcttctctattcctatagctttaccttttccagaatgtcctataaatggaactggaaagtatgtcaccttttgagtctagcttccttcacttagcatgtcactgagattcattcatgtagctgcatgtatcattgtctcattcctttttactgctgagtagcattccattaatagttgtaccaaagtttatacattcggttattcaaggacattcaggttatttccagtattcactaatcatgagtaaaaactgctatacacactcatttgcaggtttttgtgtaaacatatgttttcatttcccctgagtaaatagctaagagtgggactgctgggtcatacggcaagtatatgtttaactttattggaagttgcctgactgttttccagagtggctataccattttgcattgccattagtaacatatgagagttctagatgcttctcgtccttgccagcatttggtattgatttttttcccctttttacccattctattaggtgtatagtggtttctcatcagttttaatttgcattttcctgatgagaatctttttatgtgctcatttaccatctctatattactttttgtgaagtgtctcttcaaattattccaccaattttcaaaaattgggttgttgttttcctactgttaagtcctgagaattctttttataatcttgatgcaaagtcttaaaatttttttgtctgtagcttttttcattcttttaacagtcttttacagagcaaaggtttttcattttgtagaagtacaatttatccagtttttttaatggactgtgcttttaatgttatatcgatgaacactttgcctaagtcaaagtcatgaagattttcttgtaagtttttctttttcagagatagggtcttgctctgttgttcgggctagagtgcagaggtgtgatcatggctcactacagctatgatcactctttattattttcttccttctgcttgtttttatgttcatttgcttctctttttcttttcttctttttgagatggagtctcgccatttcgcccaggctggattcaagctcctgggccaaagattctcccacctcaggctcccgagtaaatgggactataggcacaccaccgcactcagcttgctcctctttttctaagatagtttctcaagacagaagcttggaatatttatttgagaatttctcctccaaatataagcagtggatgctataagtttctttctgatagaaagaatataatttttaagccaggcacagtggcatgcactcatagtcccagggagctcaggaggctgagggttgcttaaggccagaagttcaatcccagcctgggcaacataacgagaccccatctttttttagaaaaataatataatagaaattttaagaccagtaagttcccttttatcagaaaagtcaattgagatgaagtagaataaatagccggaaactcagacataatcttttcatcttaaaatgaaatgaaatcaattgaactagtttacattcacctctagttacattgaactagttacattcaaacaagttacatatcaaacagtcattgtttgatagagtgtgaaaagaggtgctggagccttggacacaagagaagcaaccccagtcacttttaggaaaatcatgttaaagcccagaggaaagttatcaagttggaatctttacatgtggttctccatctcatcacattccgggaaagaattcccagtcattatggggtatgttccaggaccatggaaaaaggcagcaatttgtgttttttaaccttgtctggtaatgctgtccctttatgatctccactcgggttggccaggcccagttcatcccgactggggtataacataactgatgaatttaatttaacaactgacaattattgagcacctactctgtgtcaggtgctgagataagacaattgataggctttctttgcctctccttctaagggccagtattaacaaattgcctattggccaggatgattacacctggggatttgagttcatgggctttttcctggaagctccctatctgtttgccttctctagtagagatcatttagaaggaagaagtggccattaccatacagctgtagctgtcaaagagtttggtatttattccatctatctccttacagagacgcaatcagaggaaagtgagcatctaccctcccttgcagtgctgttggtgttgctacttaaaaatgaaagctaagaaaattaaagtcactcacaaacagaagaataaatatagatcagtatttctcttgtgctagaactggcaggatcaggagagtggaagtcagggatttccaggagttcaaacaatcaacaaaatcataaaggtgaataattttgattatgtgaaaatgaaaaacgtgtatgttaggcgccataaaaaaaactaaaagacaaatgacaaactaggaaagatggcaaagggttgataaccttataatatgaaaagtttctacaaaacaataagaaaaagatgaggtgctagtacaaaactgggcgaagcatacagacaaatcactaatgaagaaatagaaatgatcagtaatctttgtattactcataaaaatgaaaatcaaatattctttttctttcctatcaaattggctgagatagaaaaaatagtaccctttgttgtcaaaagtgaggtaagataagcattaaaaatattttaatataatgcatatatagtaaaatccatccttttcaaattcagtgaattttagtatattcatgaagttgtacaactatcaccacgatctaatttcagaacatttttatcatccccaaaagaaattctatacccattggcagttactgcccattttacccttcccctggcccctggcaaccactagtctacttttgtttgtatggatttgcctatcttgagtatttcatacaaatggaatcatagtatgtagacttttgtatctgtctttcacttaatgttttcaaggttcatctatgttgcatcttgcattagtacttcattcctttttatgtagaaataatattccattgtgtagataataccagattttctttattcaccagttgatggacctttgggttgtttccactttttggctattatgaataatgctgtcatgaacgctcatgtacagatttttgtttgaacagatgttttagattttcttgtgcattattttggagtggaattgctggatgatatactaactctgtgtttaactttgaggaaatgcagactgttttccaaagtagctatcccattttacattcccacctgcaataagggttccaatttctttacatatttgccagcacttgttattgtctgcctttttggctatagccatcttaatgggcatgtagtggtaactccttacggttttaatttgcattttcctaagaactaattatgttgactgtctcttcaatccctatgggctatttctatatcctctttggagaaatgtctattcaagttctttgccttttttttgttgttgttgttgagatggattttcactcttgttgcccaggctggagtgcaatggcatgatcttggctcactacaacctccgcctcccaggttcaagcaattctcctgcctcagcctcccaagtagctgggattacaggctcccaccaccatgcccagctaattttttgtatttttagtagagatggagtttcatcatgttggccaggctggtcttgaacccctgacctcaggtgatccacctgccttggcctcccaaagtgctgggattacagatgtgagccactgcgctcagcctctttgcccatttttaattgggttatttatctttttactgttgagttgtaagcattttttatatattctagatactagacccttattaaatatgatttgcaaatacttttcccattctgtgggctatcttttaagttttttgataatttcctttgatgcagaagttttttgttttttttttagggtgcagcaactcattttgacttttttttttattatactttaagttctagggtatatgtgcacaacgtgcaggtttgttacatatgtatacatgtgccatgttggtgtgctgcacccattaacttgtcatttacattaggtatatctcctaatgctatccctcccctcactccaaccccatgacaggccccggtgtgtgatgttcctcttcctgtgtccaagtgttctcattgttcaattcccacctatgagtgagaacatgcagtgtttggttttctgtccttgtgatagtttgctgagaatgatggtttccagcttcatccatgtccctacaaaggacatgaactcatccttttttatagctgcatagtattccatggggtatatgtgccacattttcttaatccagtctatcattgatggacatttgggttggttccaagtctttgctattgtgaatagtgccacaataaacatacgtgtgcatgtgtctttatagcagcatgatttataatcctttgagtatatccccagtaatgggatggctgggtcaaatggtatttctagttctagatccttgaggaatcgccacactgtcttccacaatggttgaactagtttacagtcccaccaacagtgtaaaagcgtttctatttctccacatcctctccagcacctgttgtttcctgactttttaatgattgccattctaactggtgtgagatggtatctcattgtggttttgatttgcatttctctgatggccagtgatgatgagcattttttcatatgtctgttggctgcataaatgtcttcttttgaaaagtgtctgttcatatcctttgcccactttttgatggggttgtttgtttttttcttgtaaatttgtttgagttctttgtagattctggatattagccccttgtcagatgagtagattgcaaaaattgtctcccattttgtaggttgcctgttcactctgttggtagtttcttttgctggatgcacaagttttaaatttttatatgaagtccaattttttttttcagagccccccttaagaaagatttttttcagattttttttcttttgttgcttgtacttttgatatcatatataagaatccattgtcaaatccaaggtttaaaaacttactcctgtgttttatttctttttccttccttccttccttccttcctttttttagacaaggtcttactctgttgcccagactgaaatgcagagtggcacaatcatagctcactgcagcctctaactcctgggctcaagtgatcctcctacctcagcctcccaggtagcctggactacaggcacatggcagcatccctgcctaattttttcatttttattttttgtagagacaggggtctcacttcgttactcagggtggtcttgaacccctgggctcaagacattctcccacctcagcctcccaaagtgctgggattacaggcatgagccactatgcctgggcaactcctgtgtttttctaagatttttatgattttagctcttgtatttaggttattgggttattgatccattttaattcttatatacagtgtgaggtaaatgtgtgtggtattacatatgtgtgtgtgtatatccatatatatatgttttttggtcatagttcctgatttatacaactcccgtagcccttgttacagacttttgtcataatgctggctatctgaggcttcaggaaacaatctctccagatctcctttcaccttccccaaggcaggactctaatcttactctgcctttctgattgtgggtcagaagaccctccccagagagggtcctgccacatactctgagggaaggaatgctgacttcaaaaattttccttccgatagctgaacacagggaggttcctggaaggtgcctggccaccctaggcacctcttcctctgtaacccttgcagtatcctttgtaataagccattaaacatgttgtctggagttcagtgagctgctccagcaaattaattgaactcaaagagtaggggtcatgggaaccctaacttgaaacctgttggtgagaagttctggaggcccagacttgtaactggtgtctggagtaggagacagccttggggactaagccctcatcctgtggaatctgacactatctccaggtatatagcatcagaacttaactggaagatgctcagccagtatctgctgcttggtgcctggggataaaccctcacacatttggtcacagaagtcttctatgttgatgattattgtggtggtgtaagagtagaggaaaaacagtttgtgagagtttttccaaaagagcgtccaacttagttttgttttctgttttgtttttatttgtttttagtatgtggaaatccagttgtcacatcaccatttgtttaaaaaaaaaaacaaaaaacaaaacaaaaaaacctgttcttttcctactgaatagacttggcacccttgtcaagaatcaactggccaggccgggcgcggtggctcatgcctgtaatcccagcactttgggaggccgaggcgggcggatcacgaggtcaggagatcgagaccatcctggctaacacggtgaaaccccgtctctactaaaaatacaaaaaattagccgggcgtggtagcgggcgcctgtagtcccagctactcgggaggctgaggcaggagaatggcgtgaacccgggaggcggagcttgcagtgagccgagatcgcgccactgcactccagcctgggcgacagagcgagactccgtctcaaaaaaaaaaaaaaaaaaaaaaaaaaaaagaatcaactggccatagatgtatgggtttacttatcaactctcagttcctttccactggtctatgtgtctttccttatgccaataccacactgttttgattactctagcttttagtaagttttgaaatccagaagagtgagactgggtgcagtggctcatgcctgtaatactagcactttgggaggctgaggccagaagttcaaggctatattgagcctaccactgcactccagccttggcgtttgtgctggttaatactgagtgttaacttgattggattgaaggatacaaagtattgatcctgggtgtgtctgtgagggtattgctgaaagagattaacattaagtctggtgggcacaatctaatcagctgccagcaaatataagcaggcagaaaaacatgaaaggagagactggcctagcctcccagcagcctacatctttctcccgtgctgggtgcttcctgccctcgaacattagactccaatttcttcagtttcgagacttggactagctctccttgctcctcaagcttgcagacagcctattgtgggaccttgtgattgtgaaagttaatactgaataagcttatatatatatatatctcctattagttctgtccctctagagaaacctgactagtatagattttagtacccggagtggttccagaggaacagactattaaggatgcagttctttcgttggttttggggtttctggagttggctacttaatatgattagacccaaaaatgctaaggactctacttctaatagtatggagaatactgatagtccttggtgtgaactgtttagagagttatgcaaaataaatgcatttgacacttctgattcatcactcatgagaggcaaggagtttagtaactctatacatagtacctttgaccatatgtggagaaccaaggaacataatgaagctggttggttgctcctaagttcagtggacaaagtagtgaaagaaaatgaactcagggattctgtctctcagcttcagaagcagatactgagcctcaaatctgccaagattgccctgagtgagagtcttatctcctgtagagaaagagctgaaattgtggaaaaacagacacaagctctcatcatgcgagtggctgacctgcaacaaaaggtgcgtgcacagccttgccaggtgtctaccgttaaaataagggcattgattagaaaagaatgggaccctacaacttggaatggggatgtgtaggaggaccttgatgaaactggggacactgaatttgtaaactctgatgaacctttcttttgccagaaggaacagattccccatacccagtagtggcaacatcccctccctgatccatgctgccatcagcctttccacctttgtctgaggagataaatcctgcactgcctgacgcaacagtgatggcctcccgagacagttgccaggcaagataatgttgattctcctcagaagccacccccaacaaccttgtttgcttctagacctataactagactaaagtcctgccagggacctctggccagcccctagaggtgaggttgagagtgtgacccataaggaggtgcgctacactcaaaaataactgtttgagttctctaatttatataaacagaaatctggagaacaggcatgggaatggatattaagggtgtgggataatggtggaaagaacatagagttggatcaggctgaatttattgatttgggcccatgaagtagggactctgcttttaatgttgcagcttggagagttaaaaaaaaaaaaggttataatagattatttgcttggttagctgaattatggattaaaagatggcccactgtgagccagctggaaatgcctgatctcctttgggttaatatagaggaagggatccaaaggcttagggagattgggatggtgaactggattagtcactttagactgactcatcccagctgggagggtccagaagatatacccttgatgaatgccttgtaaaatagatttgtgaggggagcacctgcatctttgaagagccgtgtaattgctcttctctgtatgtcagacctaacagtggcaactgcagtcactcacctacaaaatttaaatacaatgggaataattggatcctgaggtggcaggagccaagtggtggcactcaaccatcaaaagcaaggtggacgtagctaccataatggacagtagaggcaaagcagcaatcagaatagtctgactcatgtagagctctggcattggctaattaatcacgatgttcctagaagtgaaattgataggaagcctactgcattcctacttaatttatacaagcagaaaacttctaggtcaaatggacaaaagactaatttgaattataaaaacagagaatcatggcttttcaattaatttccagacttgagccagtttgcagacccagaaccccttgaatgaagtggagtctgggtccccttgaggaaggaccccactacagtaccaacaatttatgcagtgaatctttctcccatccttccccaaggagacctctggccttttaccagggtaacttgcactggggaaagggaaatgacatttcagggactactggacactgcctctgagctgatactgattccaggagacccaaaacatcattgcggtcctccaggtaaagtatggacttagggagttcaggtaattaatggagttttagctcaggacttacagcgggttcagtgggtccccggactcatcctgtggtcatttccccagtgccagaatgcataattggcatagacatacttagcagctggcagaacccccacattagctccctgactggtagggtgaaggctgttatggtgggaaaggccaaatggaagccactagagctgcctctacctagaaaaatattaaatcataaataatatcgcatccctggagggactgcagagattagtgccaccatcaaggacttaaaagatgtagggatagggctggctgggcatggtggttcatgcctgtaatcccagcactttgggaggccgaggcgggcagatcacgaggtcaagagatcgagaccatcctgggcaacatggtgaaaccccgtctctactaaaaatacaaaaaaaaattagctggacatggtggtgcatgcctgtagtcccagctactcaggaggctgaggcaggagaactgcttgaacctgggaggcagaggttgcagtgagccgagatcatgccactgcactccagcctggcgacagagtgagactctgtctcaaaaaaaaaaaaaaaaaaaaaaaaaaaaaaaaaaaaaagaaagatgcaggggtggtgagtcccatcacattcccattcaacttccccatttggcctgtgcagaagaccgatggatcttggagcataacagtggattattgtaagcttaaccaagtggtgactccaattgcagctgctgtaccagatatggtttcattgcttgagcaaattaacacatctcctggtacctggtatgcagccactgacttggcaaatgtctttttctccattcctgtccataaggcccaccagaagcaatctgccgtcagctggcaaggttaccaatatacctttactgtcctacctcaggggtatatcaactctgcggctttgtgtcatagtcttattcggaaagaccttgattgctttttgctttggcaagatatcacactggtacattatattgatgacgttatgctgactggacctagcgagcaagaagtagcaaacacactggacttattggtgagacatttgcatgcaagaggatgggaaataaatccaactaaaattcagggaccttctacctcagtaaaatttcctgggttccggtggtatggggcctgtcgagatattccttctaaggtgaagcaagatattccttctaaggtgaaggaagatattccttctaaggtgaaggggcctttggcccctcctacaaccaagaaagagacacaatgcctggtgtcacaaggcctatttggattttcgaggcaacacattcttcatttgggtgtgttactccagcccatttatcgagtgacctgaaaggcggctgattttgagcagggtccagaacaggagaaggctctgccacaggtccaagctgctgtgcaagctgctctgccacttgggccatatgacctagcagatccaatggtgcttgaggtgtcagtggcagatagggatgccgtttggagcctttggcaggcccccatagatgaatcacagtggaggcctctaggattttggagcaaggccctgccatcttctgcagataactgctttcctcttgagacagctcttggcctgttactgggctttggtggaaactgaacatttgactatgggtcatcaagtcaccatgcaacctgaactgcctatcatgaactgagtgctttctgacccatctagccataaggtaggttgtgcacagcagccttccatcatcaaatggaagtggtctatatgtgatcaggctcaagcaggttctgaaggcacaaataagttacatgaggaggtggctcaaatgcccatggtctccactcctgccaccttgccttctctcccccagcctgcaccgatggcctcctggggagtttcctgtgatcagttgacagactaagagaagactagggcctggttcactgatggttctacacgatatgcaggcatcacccaaaagtggacagctacagcactacagcccctttccaggacatccctgaaggacagcagtgaagggaaatcttcccagtgggcagaacttcaagcagtgcacctggtggtacactttgcatagaaggagaaatggccagatgtgtgattatacactgattcatgggttgtagccaatggtttggctggatggtcagggacttggaagaagcacccaatgcttctgccaggactaccatccatggactcatggaatgccttatccgccatcatgttattccacacggcattgcctttgaccaaggcactcactttatggctaaagaagtgtggcagtgggctcatactcatggaattcactggtcttaccatattctccatcatcctgaagcagctgaattgatagaatggtagaatggccttttgaagtcacaattacaaaatcaactaggtgacaatactttgcagggctggggcaaagttctccagaaggccgtgtatactctgaatcagtgtccaatatatggtactcttccccccatagccaggattcatgggtccaggaatcaaggggtggaagtggaagtggtaccactcaccatcacccctagcaatccactagcaaaattattgcttcctgttcttgtgacattacgttctgctggcctagaggtcttagttccagagggaggaatgctgccacaaggagacacaacaatgatcctgttaaactggaagttaagattgccacctggacactttgtgctcctcctacctttaagtcaactggctaagaatggagtcacagtgttggctgggtgattgacccggactctcaagacaaaatcagtctactccacaatggaggtaagtaagagtatgcatggaatgcaggagatccatgagggcgtgtcttagtattaccatgccctctgattaaggtcaatgggaaattacaatagcccaacccagccaggactacaaatggcccagacccttcaggaatgaaagtttggatcactccatcaggaaaaaaaaccacgacctgccgaggtgcttgctgaaggcaaagggaatatagaatgggtagtagaagaaggtagtcatcaataccagctatgaccacgtgaccagctgcagaaacggggactgtaattgtcatgagtattttctccttttgttaaaaacatgtttgtgcatgtatacatttgtactaagaaatgtcttcattttatttcctttttcctttatcatgtgacataagatttattgacttcatatcagcatttaagtattaactttatattatagtatttgggttggggattggtgcatttctggttgtacaaaggatagttgtattatgttaggtgtaattatgaccttattattgtctttatttgaagattatgtataatctcaggaaatgtatatgggttcaaattgacaaggggtggttgaaatggttaatactgagtgtcaacttgattggattgaaggatacaaagtattgatcctgggtgtgtctgtgagggtgttgccaaaggagattaacatttgagtcagtgggctggggaaggcagatccacccttaatctggtgggcacactctaatcagctgccagcgaatataaagcagacagaaaaacatgaaaaggagagactggcctagcctcccagcctacatctttctcctgtgctgggtgattcctgcccttgaacatcacactccaagttcttcattgttgagacttggactggctctccttgcacctcaagcttgtagacagcctattgtgggaccttgtgatcatgtaagttaatactgaataaactcccctttatatacatatatatatatatattcctactatatatataatcctactaatatatatattatatatcctattaattctgtccctctagagagaaccctgactaatatatcattagagtgagaccctgtctcaaaaaaaaaaaaagaagaagaaaagagagtcctttgattttgctctattttttcaggatctttttggctattctgaactccttacaatattgtatgaatttaaggattgtcttttccatttctgcaaaaagttttgataggattgtgttgcatctgtagattgctttgagtagtattaacattttaaccttaataacaataagtcttcctatgattacaggatatatttccatttattcaagtcttttaaaaaatttcttaaagcaatacttttatctccttggttaaatttattcctaggtattttattcttttggatgctattataaatataattgtttccttgatttcctttttgctctgttcattgctagtgtatagaaacactgattttggcttgttgatcttataccctacaacttagctaaatttgtttattgctctagttttttttggtgggggtggtgaagggggtggattctttttttttaatataaataggatcatataattatgaatagagatacttttactttctttccaatttggatgccttttatttcattttagtgcctaattgatcagtctacaacttttagtacagtgttgaatagccgtggtgaaaatgggcatccttgtcttgttgctgatgtttaagggaaagctttcattacttttatctttgaatatgatgttggctctgggtttttcataaatatactttattatgttgaggaatttcacttctattcctagttttctgagttttttttttttttaaatcatgaaagcatgttggattttgtcatgccttttcagcatcaattgtgggatcatgtatgcaattctttactttttctgttaatgaggtgtgttggcattgattgattttctaatgctgaactacctttgtattcctgggataaatcccacttggccatggtgtataatccattcagtatgctgttgaatctgttcgctagtattttgctgaggatttttggtctatcaactactcacactaccctacttgaggctacactgttggccattcattcctttgatagttgttattgttgactcctttcttcccaaactactcttggtgtttctgaggcagtatgcgctcctgtttttttctctcatttctaggcatttctgtgcctacactgtagatttttcctctcttcatcctttaagtgttagtatatctcagggatccttatgagcctttgagtgatcccatccacatccaaacttttatttttattttttgtagagatggagtcttgctatgttgcccaggcttgcttcaaactagtggcctcaagcaatcctcctgcctcagcctgccagagtgctaggattataggggtgagccaccttgccagttccacacccaaacttttttttttttttgagatggagttttgccctgtcgcccagggtggagtgcaatggtgtgatcttggctcactgcaacctccacctcccggggtccaaatgattctcctgcctcagccttttgagtagctgggattacaggcacctgataccatgcccagctaatttttgtatttttagtagagacagggttcaccatgttggccagggtggtctcgaactcctgaccttgtgatctgcctgcctcagcttcctaaagtgctgggattacaggcatgagccaccgtgcccggccccaaacttttatatattagtaactcccaagtcactgtctctggataaggccacttctctgatctacatgtagagccaccctctgaacatctccattgcattgtcccacgggtatcccaacacccaacagaactcacaagtctttcatgtttgggcctctgtttacctgtccagagactatcaaagttgttcagagccatttcaatcttaaggtaagaatgctttgcattcagttcaaatctgggttatggctgggcacagtggctcatgcctgcaatcccaggactttggaaggccaaggagagaggactgcttgagaccaggactttgagaccatcctggacaacatagcaaggcctcatctgtataaaaaattttaaacattagccaggcatggtggctggctctcacctgtagtcccagctgctctggaagctaaggggaggattgcctgccccagaggttgaggctgcagtgagctatgatggcaccattgcactccaccctgggcaatagagcaagaccctgtgtcaaaataaatacaaacaaataataaaaataaaaacaagtccgagttatgctggcttctagctctgtgtactagagcgcattccttagcttcttgtttctctgttgcctcatttgtaaagtgggaatgataatacttggtattaggattaatgtgatccatatcaagttctaaatgaactgcagctctttagtgatagcattggtcagacccgaggggatactgtgcaaaggggtggaaagtaataccaagctgaccattgtttctgccgaccctgacttttgtgctttcacccagtttctggtggagaacctgattgacagaaaccagattaaaactggagccttactctaataaccctactgggtttaatctgcagatttatctttatagcaaaatctttttattgttttaataattaagatccctttggctggtgatccaaattggatgttattctgctgtatagaaaacagtatttattaatgtgtttttatacttgatgcttgtcttaaggtgatcatccactgattttcacttaaataattgtgcttttctattccctctgtctctgtgcttaaaatcttggctttaccattcatgaaaaagaatggaaaatatatccattaagaatcagataagaattcgttaaaagagaaagcttggaaatctctatatttaagtactttttaacggtgctgtgaaatgattaattgctttgttttaaatattgctaagacaccataaattaaatatttacacatcctttttatatttaaaaatagattcaacaattattaaagctattaatacctgaactcctaatcaaaatcaaagaaatttttagtttgaataaggcaatgggatggaaaatttgctgtgtttttaaggctccctttaagtttaaaaactaggtgcctaatttgtgacttttttgctaaattcacttttaaaatgacttaaaaatcacttacgctttatttttctttcaaatctttttctcctaatcttttaaaataaggaaaggtgcctccgtgttgggtattataattgtattcaagtttttgcaactccattcaaaaaagtacgtattttgtaagctcacctggacaggtggacttgatgaaggggatggctctgagatgccggttttcagccacaggcccttcagcgcttaaacagttagagacagggtacgtttctggccgaaacccgggagccgagtcctcaggaagccgcagggggcctcgagggagcggactgggccgactggctctagaggtccggcagcacaggctccgcccgcaggggcggtgcccgagccggcttccctagagcccgccctccgcgtcctgcacccccgcggcctccgcggcctccgcggcaactgctcccggtgatgcaaaccctcacttcccgcatccacttcctcacagagcccgcggagccggcgggagccgcgcgcgccgcccagccgtgcgtcatgggcaacatccagaagaagctgactggcaaagccgaaggcggcaagcggccggcaaggggcgcgccgcagcggggccagaccccggaggccggcgcggacaagcggagcccacggcgggcctctgcggcggcggcggcgggcggcggcgccaccgggcatccgggcggcgggcagggcgcggagaaccctgccggcctgaagagccagggcaacgagctgttccgaagcgggcagttcgccgaggcggccggcaagtactcggcggcaatcgcgctcctggagccagcaggtaggtgcgccgcgccccgccgcttcctgggcccctcgcgctgcggttcacccgacctccggggcccccgtgggagaggcgctgccgcctcctgaatgacaggcgccggcatcgctgcattcctcccaggtgactaagagcgccgtgccacctgacctcagtgagcagcacctgggaatgccggcatgttcccggccaggcacgtttgcctccgtccccgccgggttttcccttggtggctgttgcgggtagcagctccgtggagttctgcatgatcagtctgcaggactgcagtgccaccccaccggagacctcggccgtcttgtaattctggtgaactgtgatcttgctaatggattttaactgtatttaattaaatgtgatttttaggaagtgaaattgcagatgatctaagtatcttatattcaaatagagcagcatgttacctaaaagaaggaaactgcagtggctgcattcaagattgtaacaggtaaactgcacgttttcaggtttgtcaagagattgttataatttcattatggtgaatgcaatatccaagatcctaaattttctgcctaaggatctaatttcttaagagctttatggtatgttaattgattgatgcataaaaatcataaattatcttacgtatatgaagagagttatagaagattgtgcaaacttttttcatttccactgctaccgccctaattcgtgctcttttcatatcactcctagactactggagaagcctgataactaattccaatccactgcggcatcagaataactttcctgaaacattattttgttcagattgtttccaacaggcctttaatggctcagtattggcttcgaaataactgtaaacttctctgtcactacactgcctccaagcaagtttctccttccgtttggtctactggaccacttgcttactctcgcccaccttgttctctgagcccttgcccatgttgcccctaatggtggtaatgccctttgcacatcttatcttctgaagttcttgctcagctgccccttctctctaccttcttgagtgccctagacttcctggtcatctgcaggcctgtaacacctacactgacactcggtcacacctctaagtcctgttatccactgaagggggtttaaacacatcgaggttaggaaccatgtcttttcttttttaatagacaaataatcactgtacatatttatggggtaccgagtgatgcttcgatatatatgatgtggccaggcacagtggctcatggccaggcacagtggctcacgcctgtaatcccagcattttggcaggccaaggtgggtggattgcttgaggtcagtttgagaccgtcctggccaacatgatgaaagctagtctctactaaaaatacaaaaattagctgggcctggtggcatacccttgtagtctcagctactcgggaggctgaagcaggaaaattgcttgaacctgggaggcagatgttgcagtgagcagagatgccaccactgcagtccagcctgggcaacagacaagagactctgtaaactttactcatatatatatatatatatatatatatatatatatatatatatatatatatatatatatatatgaaactatgtatcattgttaactatagtcatcctacagtgctatagaacactagaacatgtgcctcctatctagctgtaattttatatcctttaacaaatctctgcctgtccccctcttccccctaccctttccatcctctggtgtcctctgaggaaccctgtcttatacagcttcgtacccctcgaagcataatagtcacccgtggtactcaataagttacctgcctggatggtaaatagctacataaataaaacattgttttccaccatgaagtaataagaagccctttggcaagaagctactattagtacatctaaaaaagaagaagtcatgtcctagtttgactaacacagctctggcttactcctgttgtctcatataacactctcagaaactctagtttgaacagtaaattatgtggacactgtttataaggtgagtaatgtattattgttttcattggctgtatcagtttattttgtttttttgttttgttttgtttttgagacagagtctcgctctgttgcccaggcgccatctcggctcactgcaagctccgcctcctgggttcaccccattctcctgcctcagcctggagagtagctgggactgcaggcgcccgccaccatgcccggctaattttttgtatttttagtagagacggggtttcacagtgttagccagaatggccttgatctcctgacctcgtgatccacccgcctcggcctcccaaagtgctgggattacaggcgtgagccaccgcgcccggcccagtttattgatatgggtaaagcttgctagtatctgtgcctaagtttaaaaagaaggccttgaggcacttgaatttttttgccagttttacatatttaaatttgaagtgaataatacttatattctctttggcctgacatcagaccgcatcctcagttgtgctggctcacactcgctaatcattacatttttcaggattttgtgagctggttgatgtcaagttgatattttgaaatctgccatggtgggataccatttaataccatgaaatgagcaaatgccacaaatctgggcttcccacccctccttttttctttacccagagagccagttgttaagggcttttaccagtgctcctaacagaccagaccatgtgaatttgttggataccaagcccgtggtgatttgcagccaacatcctttcagctcaactgtctgtttctaatccattacccttcagacttgttttaggcctttccacagtgagggaggtcaggacactttagttaaaacttgagacccctaacattagagctgctgcaaaagagtggatttgtgttgtccttatctgagatcctctaaggtgattaacatttactggctaaaattggctgtgtttcagtgtagacagaggagaaagtcaagtatgggactccagccatggtgtccagggtggctagagtaggggcttgtccaaggggagggcaggagatggctcaccagagagggaagtgggcgtcggtttaggtaggttgtgctaaccttaagagctgttttctaggcaaggaacctggccttgctggttggtgctgacctccgtagagaccgacctactcagatgttttctttgatagctggcctaccagtcccagtgtaagagaaatggagatgaggcccagcagggggtgattttacactaaagcagtgattctcaatcttgttttaatgccagagaagccactctgtgcttttgtgaacatcttttcagctcaagtgactatattcaaacagattgcatacatgttaaagggagtttttgtgttttcattttgttttgttttagtttttcagttaattatctttgctctttggagagttccatgagttctttttttttttttttttttttttgagactgagtcttgctctgtccccgaggctggagtgcagtggcgcaatctcagctcattgcaacctctgcctcccaggttcaagtgattctcctgcctcagcctcccgagttgctgggattacaggcactcaccaccgcacctggctaatttttcatattttttgtagagaaggggtttcaccatgctgcaggccaggctggtcttgaattcctgacctcaagtgatccacctggtttggcctcccaaagtgctgggattacagggatgagccactgtgcctggcccaaaagttcttatcaccagataagtggtatcaggagtcaaacactgagaaagaaaaacaggcaaaatttaaaataagaggagaaaattttacctatgaaaataatttttaaatgtattttgggaaaaactaccatttgattttaaatgtcttacctctgaggagcattggttgttttccaggggtgtgtttggagagtggccatttggagtgcagagttggggttgggggggtgttgaagatcttgaaggtctctaagcctggcctctcccctcaccacagcatctccatgactcttttagacctccaggtgaaacatgaaaaggggttatgatgcttcagtttgaaagccatcattttacaacttttaaaatactcataattgtttataagctaaaatacttcacttttctcatctatcagaacctttttggtttatctaaaccacaccaaaaatcttttggtgactttccattgaggacatttcaacagactaaatacaaatgaatgttgcctagtaattctctcctttttcgtttttcttttcttttctttttttttgagacagagtctcactctatcacccaggttggagtgcaatggcatgatctctgctcactgcagcctctgcctcctgggttcaagcgattcttgtacctcagcctcccaagtagctgggattacaggtgtgcaccacctaacccagctaatttttgtattttttttttagtagaaacagggttttgccatgttggccaggctagtcttgaactcctggcctcaagtggtctgccaaccttggcctcccaaagttctgggattacatacaggcttgagccaccgtgcctggccagttctctgctttttcttatctttgctactctcacagtcttgaaattggaagattttttagggtcttaactgtgttaccttgaatagatagcctcttttgtaagctctgcttcaaaagttctctgtgcttatttttatacatgggtggtttttttccttaatggaatttccattcataagttcatattcattttcaggattgtagttaaagaaataaatttactgggcagaaagtgctaaaaattaatacagcatctcatcagttttagatcccaagcttggcttaaggccatcttgaatagataaatggcaccttggtcattggaagtcttctgtgaagtgaaggtagtcacatggttgtgactctgctcatagagttaatattacctaaacattaaactaagctaaatttaaggcagtggtacaggtgacagatcctgatgcccacagatctattttctagtgttgaaatatgtttacttgattttaattttatattttaaataacatttactgttttaaaaaaccacttacctattatagaaaacttaagaaaaaactagcacagcacaaagactatcattaaaatcactcacaatcctaacacctaggcagagtgaaattggttattttttcagagaagtgaagcagattaggtttaacagcatttctagagtaacttctatgatatgccagaagggctcccacaagtgcagctgagtatctgtatgatgtggtctgagtggcaaatgactcaagagttccttcatttgcagtgtttgtatgtgtactgcggtaggcagagtgtaggcttttgagggctcacagagaagtttgctgagtgcctctcatgacccaggtgatctaggactgggaatatagtggtgctcaggacaggcaatgccaattgccttcctgaagctcacattagaaagaactgacctgtgggcatgtcactcctcatgtttctgtttcttcacccacataatgaacatattaatatttacctgacaggtttgttgtgagattagatggggaagtctacagtgactagcacatagcagatactctgtcaatgtttcctcattgctgaatcattgtagacaggaatagacagcagatttctaagagtatcggaaaaacagcaagttaaagaaagcagcccttgctcatgctttcctggaaagttaaatacttgttatattaactgtttatagcatgagttgaaagaataaatccaccatcttcaatgtggacagtctggtgcagatgttagttaggttatatagaaaggaggctcttcataggatctctgcatggaggacttctttgcagcttctgttgattttgttaaaaccaagagtactatagttttcattcataaatacagatttgtgattccttaaccaaaggctctgcgctgccttttgacttaacatattttcagtttaccatgggattattgggacataaccatattgtaaatcgaggattatatgtacagtttttttattgttttacttcagaatataatgaagtacgttaaatgctgaagtagctttaaacacttcaaacaaaaccaaaaaacacaaccatgagatacatctttagtgatattggaaacacttcatagactaaaacgtgcaagatgaaaattcataacttagaagaaatcattgtaggtttagttccttgattcccctttggtctgtttttgaagcccttttgcagcaagtgaatcataatgaactaataagttttagagtgccgattttcaaaatgtgatgcaacttttatggttctgtactttattattaaatacataggtgcaaataagaattttcattttaatctgtcaacgacaatctgttgaaaccctgctgtgtgccttgtgccatgctgctctgttaggggactggggaggccaggacatgctgccagggagctcccggctcagtgggaaagagtaaatgcagagtgctttgctactggtttaaaagaaaggaacacaaatatgattgctttcttactctgggtttgcctttctggcatgttgcctggttcccaagacgaagtctcggatgtgtacatatttgagagttcagtactgcagtatctattcagtgaagtataaacgaaagagcatttttcaaaacaaatggtatgtaatatttttgtcttctttagggctctggaacttcatccattctctatgaaacctcttctgaggcgggcgatggcctatgaaactctagagcagtatgggaaagcttatgtggattataaaacagtgttgcagatagactgtggactccagctagcaaatgacagtgttaacaggtaattaatctgaggcagctacctaaaatctagttgttttatactgtttttcccttcccctccttcaagaacatgtcaaaatatagatgtgttatcagttacttttatcacctgaatgattgccttcttttattccattacatcaaatggttctctcccttaacttaatttctgactctcccttaattaattctgacttgtcctctaatgcctttgtatttgttttctgatccatttattactgttcaatcagtatttttttttggtcttagtaacacaggatataactcatatgtgctgcttaaatatatgtggtgataagagggtatttacatagatatcataaaatcagtactagtagctgggtgcggtggctgatgcctgtaatcctagcactttgggaggccaaggcgggtggatcacttgaggtcaggagttcgagaccagcctggccaacatggcgaaaccccatctcaactaaaaatacaaaaattagccaggtgtggtggcgggcgcctgtaatcccagctactcaggaggctgaggcaggagaattgtttgaacccaggctgcggagattgcggtgagctgagatcataccactgcactccagcctggacaacggagcaagattccaactccaaaaaaaaaaattaaaataaaataaataaatcagtactagctatagaataagatccaaaaatgtggtgaaaactgctatgttgaatcctctcctcccacaggatttgcaggtgttcattggcaccatatctgtcagtggaaacatatctcttgtttctcctgaggagaatggatgtcttcatgagcctgccagatatttctgttatatgcccttgtaaatagacacttatctaggatgaatagtaatttataatggcgaaatagcaaagaatttggatctaatttatgttatgacctatttacccccagcgtgagaatgggaaggtaaaaacttccagacttcatcaattgctttccggtgaaatttgaaaattaactagttggataacatttctagttatgtatgacattttctgatcccatttgcttaaagtgtaacttctgaaatatttatatgttacactgtaccccatgctagtctagtggaccaggccttgatcctctcaaaaaagaaaaaaaggggaaaaaatgacatggtctccgtctttaaacatactagaatatagttgggtagaaacagtgtacagcagtttatctccaggctcggggaaggggatcacagagaggccaggccacctgtgtctgtatgggctgaacttgttgcagagagagcacttgaagggggctttgaaggatgctgagagaacatgaagagaccttaaacaaaattgtagaaaatgagaatggtaattcaaggtaagttttaaaatcagaccttaccttcccatgtggtcccagccctgctggaaagatacataggcagaagtgacaaccgttctcttggtagtcacagggaacctgtctgatcccagcctgcctagaagaaagggacatacatccataatctgtgatggggtgagatgagacgtcttgaacctctggcacccacagcctccttgaccttgagcttccttggccttgaccaggcggtctcacctggcgctgcacagccaccccacggtgcgccatctgctgcctccttttatgtgcctgcaggccctttctcctttttgtctttgaattccttctcatctatcaggagaggacttgcctcctctaggaaactacttgccctgatccactgtctccctaccccataggtgcaccttaggttccctttctcagtgcccccataacactgggccctcttttattacccagcttctatattgttttcacgtttgctgtctccctgtgtaaaattcttttcctgtagctgtagccggtgttccctgaggtcagaaattgtgttttttcatctttgtcgctgcactgcctcctgtgtctgcctccagtagacgtcctcaataaaaatgagtgcattttcaaacagagaacacagagttcactcctgtgctttggggcattgtttgttgcttttaattcgccccatcctcggcttagtagttttcaaggtagagctggagaaagtaagatcttctcacagtgttagaggttatcatgaaatggaaagtggggagacaccggaagtatctggcagagaggagggcctgatgaaaaggtattttaggaagtctaattaatagtaggctgaatggttgaagggagaaatgggtctgagagaacatgattactgacatttctgaccttttgcattatagtttttctaaaaaattgaggtagaattcatgtacataaaattaactaagatgtgcaatgcagtggcattttgtacacttaccatcttgggcagtcatcacttctttctagttccaaaacatttccaccaccccaaaaggaagccctgtacccagtaagcagccactccccattttcctttccccccagcccctggcaaccacaatctgtgttctgtctctacgggtttatctgttctgatgttttatctaaatggaatcatatatggccttttgtgttgggcttctttcacttagcataatgtcttcagggttcatccacggcatagcatggatcagtacttcattgctttttatggctaacattccattatatgcatgtatatatcatatcacatcttgtttatccattcaccagttgatgaacatttgggtcattttcaccttttggctattgtgaacagtgctgctgtgaccattcatggacaaatttttgtttgcatacttgctttcagttccttttcgtatatgcctaggagtagaattgctgggtaattctatgtttaactttttgaagattgtattatatttgttatatgtactcaggaaggttcatttaaagtaattgacttttaagactgagtcattttttttaattgaatggttcttgttgatattttgttgatgaggaggctttggttttgccatatatatttttatatacaatatctgtttaaaatttttcactatttcttatttgtgaatcccacatttatgcttgcttttccatctattccaattcattatggaaaattaaacagcagaagcttttttttttttttaaatttaaacatctgtatttattttgtttctgtcttccattaaccatatgcctctcttcctctccaggaatcttatatgttaaatttccctgcatatacttatttattccctggcaacacatcatctcttttcagctgcttcttccttcctctctgctggtaatataagttttgcttgaaaattcttttttctgaaacttctttttcttctgcaattctgggtggttatacattaatttaaatttttttttacattaaagcataagattcaattattataaccaaagatcactatggaaatttaagtttaagaaactgtagggaaattatgtgcattacatttgtctatatataaatataaaagtttttcacacaaaaagttgcgactagatttaactaacttgaatttattctgctaattgccagtaaaccaattcagtcttaggaagcagttctttttaaccagatttgttcaaaagacgtaatttttaattttatttttaaatctaattatgacattctgtatgtttaaaataatgaaaaagtgatcactgaggatattaatctaaattttatgatggccatcagtaaatgccattaataaaaaagcccttgtagtagaatctagtatcttgtattttcatctttattcatatgaaaagagaataaatggggctgggtgcggtggctcacgcctgtaatctcagcactttggtaggctgagatcacctgaggtcaggagtttgagaccagaccggccaacatggcaaaaccccgtctctactaaaaatactaaaattagctgggcgtggtggcgcgtgcctgtaatcccagctacttggggggctgaggtaggagaactgcctgaacccgggaggcagaggttgcagtgaaccgaggtcgcatcactgcactccagcctgggcgacagagtgagactccatctcaaaaacaaaacaaacaaacacacaaaagaataaactgataattatagagatgaaaaaaatacagagcaagaaagagtatcttaaacacatgtaagtgttttgagaaaaagcattattcacatgacagcgagcccttaccagtgttggcagccagtcttgtacacctgttgtcaaccacagtagttggtaatgtggttatcataatgtacagtttgggcacagaaattctaaaatacttctgatcattctcaagagtaatacattatcaatttagtaatgattttaaatattacaggagacatttcttctaggcctcctaaattttagttttattaatatatttaactttctcaaaaaatacaattttattatgtatatgttaaaattttttaacaaattaaaaatgtcttttttgttttgattaaaaaatagtctaagttgcatcatttatgacaacttgtaaatatctttttgaaaacagtttatacggacagaaaatgctcaggattgcatgttttctacaaggaagtacacatttgcatagcatttgcaaattttattcttaatctgaccttcagtaatataaaaagcaaactaaatgatcaacagagaaaattcactttctctttaggctatcaagaattttaatggagctggatggaccaaattggcgggagaagctgtcacctattcctgctgtgcctgcttctgtgccactgcaagcttggcatccggcaaaagagatgatctcaaaacaagcaggagactccagcagccatcgccagcagggcatcacaggtgggggatgcctgcactcatttcttctcaaggttaccttgagttgtgtgtgtactttcacagtaaagcagagagataagagcattaattctagaatcagacctaggtttaagtgaagtccctgttctccctattttattattattttgagacagggtcttgctctgttgcccaggctggagtgcagtggtgcgatcttggctctgcttcctgggttcaagcaattctcctgcctcagcctcctgagtagctgggattacaggcatgtaccaccacacctggctaattttagtgggtttttttttgtttgtctttagtagagacagggtttcaccatgttggccaggctggtctcaaactcctgacctcaaatgatctgcctgctttggcctcccaaagtgctggaattatgttctccctctttaaaactacatggtcttaagaagttgctacatacctcctgtgtcctactagtatacatgtaaaagcgttttttgttttgttttgttttgagacaggggcttgctctgtcacccagggtggagtccagtggcgcaatcacggttcactgcagtctcgacctcctaagctcaagcaatactcctgcctcagcctactgagtagctggaaccacaggtgcacaccaccatgccagctagttttttttttttttttttggtggagtctcactttgatgtccaggctagagtgcagtggtgtgacctcggctcactgcaacctccacctcccaggttcaagcgattctcctgcctcagcctcccgagtagctgagattacaggtgcctgccaccacgcacggctaatttttgtatttttagtagagacggagtctccctatgttgcccatgctggtctcaaattccagggctaaagtgattctcctggctcagcctcccaaagtgctgggattataggcatgagccaccatgcgtggtttaaggcaggggaatgtattaataaatgtctcacaaggaggttgtcagaaataaatggagatgtgtatataaaatagtatattctgactttgtaaacctgtagtaacctcttaaacattgttaactaagaaggccaggtgcagtgggtcactcctgtaatcccagcactttgggaggcaagtggatcacttgagcccaggagttcaagaccagccggggcaatatggcgaaaccctatctctacaaaaaaatagaagaattagccaagcgtggtggtgcatgcctatagtcccagctacttgggaggctgaggtgggaggatcccgagcccaggaaggttgaggctgcagtgagctgtgatggtgtcactgcactccagcctgggtgacagaataagatgctgtctcaaaaaaaaaaaatttaaataacatgtagctctacagtagaccctgtatgtgatgaggctaaaggaataagactgatatgtttaaaataataaagtaaagccccacaacataaatataatcatgtgctcataatggtatttcaatcaacaatggagcacatatatgacagtgatcccataagattatatactgtaactttactgtgtttttactgtaaaggtactatactcttactgtaccttttctgtgtttagatacacaaataccattgtgttacagttgcccacagtattcagtacagtaacatgctgttacaggtttgtagcctaggagcattagcttacaccatacagcctggatatatggtaggctataccatctaggtttgtgtaaccacactctatgatgtttgcacaatagcgaaattgcccaacgacaaatttcgcagaatgtatccattgttgagtgatgcatggctgtgtaatgcaggtgcttccttctgtctttattgtagttgttaaaaaatttgtattcccttagtgcctacattattactttgagtgtagtaagtaagcatttaataaatgtgacttcacccttgctttctgctttaaagccagctgaggccccatttctcccacaaagcttagaaactccatatgtgtccccaggctgtgcttcatcttgcagatgccctgaggttcctgacccatgatgtccagatggctagtgttggaccctcattttctttattgccaagaaagagcagacagggaatatctgccaagtagatgatctagcagtcctagggaaattatggagatctgtagttttctagagtccattattaatagggcctgacacaaagcatttgttcagtaaataagagctacttcttattaacaaaatgcatatatagctgtgagttagcaaaccatagcacaagtataatcagctgtgtttgaatttttctgtccatatttgtttactgattgatagtgagaatggataccaaaggtttaaagacactggaggataaaagcttgaggaaaatttttcagcaaaatcttccctaatattctatttcagggtttatataccaggattgggaaagtaccatttgaccctattgtgtcagatttttttttttttttttttttttgagacaggatcttgctctgttgcgcaggctggggtgcagtggtgcaattttggctcactgctgcctcgacctcctgggttcaggcagtcttcccacctcagtcctgagtagctgggactacaggtgtgtgccaccgtgtctggctaattttgtattttttatagagacaggatctcattatgttgcccaggctggtctcgaattcctgggctcaagtaatccttctgcctcaacctctgaaagttctgggctaacaggtgtgagtagcctaggctatgtgagatcttttgaaacatgaaacatgggcagaaatattctgtgatttgaaatagaagatgaaaagtaaactagcattttatacaatttgtgcagagggacaaataagattattgtttacattctgagtttatattataaatttagggggctgggcatggtggctcttggcagtaatcccagtagtttgggaggccatggcaggaggatcacttgaggccaagagtccaagaccagcctgtgaaacaaagcaagacccccatctctaccaaaaaaaaaaaaaaaaaattggctgggtgcggtggctcacacctgtaatcccagcacttttggaggctgaggtgggcagatcgccagagctcaggagtttgagaccagactaggcaacatggcaaaaccctgtctctactaaaaatacaaaaattagctgagcatggtagcatgcccctgtagtcccagctgcttgggaggctgaggtgaaaggatggcttgagtccagaaggcagaggttgtggtgagccgagattgcaccactgcactctagcctgggcgacagagccagaccccatctcaaaaaagaataataataataaaataataaatttatctatcagaagattttaagattacaaaatttaaaggtatattttaaattttaatttatggatttttattatatatcaaattattccataggataaacttattacctaggtttaaaactttaaattttaatattttgtgtatgtttgaaaacttggttgtaagtaacagaaaatctgttgacttaaagtgtaagggatggtcttggcttgtgtcactgaaagggcccagacaggctgtaaatcaggctcaactcattaagacttaggctgtagcaggaaacaatagaactgtagcagttttaggctttacatctgcacatatcagtgtccaaagagagagagaaaccattgattttgatggcattaagaatgaggaagtaggccgggcgtggtggctcacgcctgtaatcacagcactttgggaggccgaggcagcactttgggatcctcgaggatcacgaggtcaggagatggagaccatcctggctaacacagtgaaaccccatctctactaaaatacaaaaattagccgggcgtggtggtgggtgcctatagtcccagctacatgggaggctgaggcaggagaatggcgtgaacccggcaggtggagcttgcagtgagctgagattgcgccacccaccgcactccagcccgggcgacagagcgagactccgtctcaaaaaacaaaacaaaacaaaacaaaaaaaaacaaaagaatgaggaagtacatttccccaaggcccaggctttttaatctgttattctgttcatctgaattgggccatgtgcccatccctgagccagtctcttttatgaggaaacaccccacgcactgaatggcttagacctggggttttgatcagtgaggtcagcctcccctgaacacgtggtctgaataggagaggggtgatagctgaatgaatattgaggtcctggaaacagattctgagcagggtatcagccatgttcactgcaagataatagggatagtgtgtaattctggtaatgagcagttcagactctgattgtagataacagaaagcccaacttataatgcctcaagtaagcaaaaagctgtttatgggcacttactatagacatatccacaggtggagtggctgcagggatggctggattcaggactcagagactccagctctccatcttggcctcttccttgctctgatggccccattttcacatcatccctttttatcacaagatggaaaaatagctcctcctttgagccttaaatcccacaggaaagaaaaagatttattttacaagaaccttgcaaaacattttatcagctcttatagactcatccctgaacaattggattactatggccataggaccatgatgtgctgattaataaaatgattatcccaaaggttagggctggagtgaggtttgcttcacttaaaccaaaggagcacagaatgaaagagatatgatttcccaaggaaatttggggtgccggatagatgtccacttcaggctttaagaggagtgttcactattcacaaaataattgccaagcaaaacactgtggatatttgtatcccatttcattgactggttctgtcgtatccaagcttaaccagaggtctgaagtgctcgtgtaccactgtaaaagcgctgtgtgaggcagcatagatggagatgacagaaaacactgtgagggttgctagttcacatgtgcagccttattggagactctgcctcttgtcatatagtcacctgagccctgttagcattgtttgcttaattctctccatctctaaggtggttctggcctctgttactgtctttagaatcccagtagagaaaagatggcatgtcaagatggataacatgacagaattattacttgtatcttattttatttttttgagatggggtttcgctcttgttgcccaggctagagtgcaacggcatgatcttggctcaccacaacctctgcctcccaggttcaagcacttctcctgcctcagcctcccgagtagctaggattacaggcatgtgccactacgcccagctaattttatatttttagttaagatggagtttccatgttggtcaaggtggtcttgaactcctgacctcaggtgatccgcccgcctcggcctcccaaagtgctgagattacaggtgtgagccactgcacccggcacttgtatcttattttctaattagaaaataatagtatcataattatataattatttttacttatagcctatttgtcattttaatttgtctacaaagttttgttctagttagattttcaccctgcatgctgtgtggtcaagttaatttgcaatagaagatttacttatagttgtacttaagattttatagaggtgcttgtacagatacttcctcttctttgtttttttgtcccatagatgaaaaaacatttaaagcccttaaggaagaaggaaatcaatgtgtaaatgacaaaaactataaagacgccctcagtaaatacagcgaatgcttaaagattaacaataaggaatgtgccatatatacaaacaggcaagttctttgtaactttatatatttcttatgttaatagttttgattattaaaaatattttaagttattttattaacacaattaagtaattgccaaagttttttgtgatggttctaagaatttctatagcaagctgtcctaaccaagtgtgtctgaaagaggtgaggccgtgggagttctacagagactggaagcctgaggtgtgggcgggatgggaggtctgacatagtttgtgccaccaggttcccaaaagcgaccatggctgctttggcttgtgcaactctgattcggcatttcctggcttgccggcctcgttgcagctagctgggcctgggcattgtccagtgtgggaggagcaggaatcaatggcctttcaaaatagtgtcttggctgggcacggtggctcacgcccataatcccagcactttgggaggccgaggcgggtggatcacgaggtcaggagatcgagaccatcctggctaacacggtgaaaccccgtctctactaaaaatacaaaaaaaaattagccaggcgcagcggcaggcacctgtagtcccagctactccggaggctgaggcaggagaatggcgtgaacccgggaggcagagcttgcagtgagccgagatagcaccactgcagtctggcctgggtgaaagagcaagactctgtctcaaaaaaaaaaaaaaatactgtcttagggagaatgcccttttccttctgaagtgctgcgggaaggcaccagcgtcatttatagcgtgcagcaggaatgggcagattgttgctcaggtaccgtctttaccacgtagtaaaagatacctatatagaatatggtgatagaatattggacaaaagatgtcactaaatccaacagatgtttttctgcccttctgttcagcctctgtaggatcgggcattattggtcactcagttttctgtgaagactcctcctcctcttggctgcggaggaggaggctggcagctcattgcctggttctcgtcctctccctctccttctgtaggcttttctttccctagaattctcatagttctgagggtctagatcctttttcctttctacgtactctagaggccattccatcctctccccaggtccactcaccaccttacaatgatgtcttccaaatctctgtcttctgagctccagactgaagcgctccccatctcttctgcactcagggctggatatcatcccctacctccctcttccagtcagcaagctcagatgctcctaccttctaaatcccaaatccatcttcagtgtgaccctttctgtctccttgccaccatccccctgtcattcccttgctctgggccactgtcctctcctcctaaatgtctgcagcacccttatggtgtccttgcacagctttgttccatcatctcattctccaagctgtagccagagggactgtctaaaacatggcaaatgtgtcagcccctattaaaaacccttcatcggacttccattaagctcagtttataaagctcaacttccttccatgacttacagtgcccttcgtgatctggcctgcctgctcttccagcctcatccctgcattccagccatatggaactcttcttaattcttcaggaacaccatattctcttccactgtaggtgcaggtctgtgcactcgctgtgtccttggcctccactccccgctacctccatctgaactttctcaacccagtgcatttgcattggataattcttaacttcatactctggatttcaacttaaatgtcacttcttccaggaagtcttccctgcctgctctgcgccttgtctcagccccactgaatctgatgtagttctcagctgtgtgctcccagagtactttgcacagattttattgtgtttgcttgttttaatggtctgtctcttccacttgattgcatcctccttgagggctgtgactgtattttgtttgcggttgtatgcccagtgccataattgaatcaaatgttaagtttcaatggaaaccgcagtggtatagcaacagacatattgagctattttctgatttttcttagctgtctaaaacttacagatagccaatctttacctttcataatactgagttccattgcattatgccagagctctctgttacttgaagctgtgccagtttgaagaagcaaagcaggactgtgatcaggcacttcagctagctgatgggaacgtgaaagccttctatagacgagctctggctcataaaggactcaaggtgaggaaatcttcattttaatgcataaacttcagctctgaacaaatcaagtggttttcacaagcataaatctccagatcttgggatgggattgaggttattcttggatttaatcctagaactgtactaaccagttctaaaaccttgatagaggcctcagatttcacccctaaccataatgtgaaactagattgcttctaagattccttccagctccaaaataatgatttattctctagttttctgaggaatattgttagttatagtaggttcattttaagatagaggaaggtttggtactgaattaccgaaactagcagtaatgctgctggttcctccggcaaggattgctgttggaggttgggtggggaaggcatcagaatagaagatgggtgacccagcggaagttgggagagacacatcggagacttgaaagcttatagtgatctgggccttaagccagctgatggtcagtgtaaatctgtaaaatgccattcttctctaagaaaaccatgccattagtttagaagaaagtggatattgtatcattccacttttcttcacacagattcttctgcatggaaatcctgaggaatgaatgttcatatttatagaaaataacatcacaaggaaaaaccagaacatattggaaaatagtacttcctgaaataattttttaagctcaattttattaaggtgtaatacaatgaagttcatacattgtaattgtgcaggtcattgacttttggtatgtgcatatcctcttgtagccaatatcccaatcgagataaagaacattttcttctgaaggtggtgtgtgctaaaaaaaaataacattttcatctttctagaaagttctctgtgcccctgtacaataaatcttcctccctccacccctaccctcaggcagccattcatctgatttctatcactatagattagttttgattgttttggacattaccataaatcatatagaatggactctactgtttggcttctttcagcataacctgagatttgtttatattgtgtgggtatcaggaactgttcctttttatcaccgtgttgtatgaatatatcacaatttgtgtatatattcaccagttgatgacacttaggttgtttccagtttggggctgttaggaataaggctgctgtgacattcttgtgtacatttttaatggatggacttgtttacaaactgtacagctggaggccagatgtgactaggagtggggatagagggagatggtcagatcctgaggggcttggtaggccatgctgaggaggctggacttaattctgaaggtgatggagcctccagagcagggtaaatggtggtgtaatggatcagatttggggacctcatggaaggttgataagaggggcccaggatgaggaggaaggtaagtgagagatcaccaaggtgagaagcaggtacctgaaggaaagtaatgtccaaggaaagggagaagtatgttagctgctgtggctgctataacaaagcgccatagactgggtggcctgaacaacagaaatctattctggaggtgggaagtctcagcttgcggtgttaataggggtggtctcttcagaggcctatgtctctggcttacagttgctgtcctctccctgggtctccatgtggccttccctctgtgtgtgtgtgcccaaatcttctctttttataaagacacagtcatcttggactaggtagggcctactgattttaacttgattacctctttaaaggccctgtctccaaatatggttacattttgaggtactggaggttagaacttcaacacaggactttctgtggggacgtagttcagcccataacagaagggaaggggccaattcaagggtttatggtaaagttgacatagcagtcaaatgtctaggggaagtgatggaggggatgcctcccaggttctggctgggtggctgagggtagtggtgtgataatggggagcattcaggagcggggcagtttgggagtggggagaggattgttttgactgattgagtctgagatagttgttttaattccgtgcccatgactgaaagggaactatctaggttctgcagggagaagagcagtcatgttgcataatatagcaaatgaggaccacccaggtgcactgaatggccaccttttccagattgtagatccactctggctgcagtgcagtcagcgtgcatgtcccgccaggacccccgtgctgccctgtgacccccgccccatgctgagggagccacacagtgtccatgtgaccctaacacatgcctccccgccggccctctttttttttggttagcaacacactcacttgtaaaaaaaattcctagatggtgtatggcaccacaaattaaaagagactcctttgaaatttactcacctctttgagcttagtagatttggtaaatgaggatctgtatggctcatgagtttacagatggccaaactcttggagcacatttacctcttactggctgcctgactttctgaacctggtgagctgactaaaggtcagaagctgcaccctaatgaaagactggactttagtttgtgtgggtatcatcattaatacttcattggacttttctatttccttggaatgaattccagaaattatattatgatgcagaaaaataatcccaaatttgagtaatcctatcccactagattatgaggctggtagcttatagcttgatttgttgtccagtaatttgaggtatgtgccaggtgaatttaatttcagaattttaaaaaatgtttaagagagacagggtctcactatgttggccaggattggtgttaaacccctggcctcaagcaatcctcccactttggcctctcaaaatgctaggattacagatgtgtgccaccatgcttggcctaatttcaggatcttcaaaggctacaactgcttatagaatgtgtcagaactcacgcccaggcctgtttgcccagggtgactgcaatgaggaagtggcacaggggctcacggtggcaggtgtcctgcctttagctcccagctcaactctatgttttcctcagatcttctgtttgttttctgactttgttatttttaatggtgccagctttgaaaaatatgagctttctttaatgtacagctgttctttgtaagaaaagatcactgaacattttgcttttatttacaatttatttctcttattgagtgccaattatgtgctaggtgttaggagtatagaggtgaataaagacatggtgcctacttagggaatttacacccaatagagggtgctgcaagatccacccaaaagaggatgctgtagaggatgatacatacaattgttatgtatcaatacaaatatcaaaaagaatatcataaaataactattgcttttatggtttcagcaaaactattaatggtaaatatcacaaacacgtgattataatacatccctttttaaaggcctaatgaggttagcaacttttaatgccttctttcttgtcaaagctacattttctggtttgttgttgttattgtttgttatttgtttatttttgagacagagtcttgctctgtcactcaggctggggtgcagtggcgtgatcttggctcactgcaacctccacctccagagttcaagcaattctcctgcttcagcctcccgagtagctgggactacagatgtgcaccaccacatctggctaatttttgtatgtttagtagagacggggtttagctgtgttggtcaggctggtctcgaactcttggcctcaggtgatccacccaccttggcctcccaaagtgctgggacacactttctatgagctctgctcttccctctacactgcatggctgggttctcttcaggtcttgacttctctgacacctgtaactgtagaaaaaggaggctctcttgttagtatccatctcaacctttagttttctccatgacatcaatgacagtctgtaattatctattcatttgtttacaggtttttaattgcttcccctcataggacgtaagcttccataaatgtaaaacttaagtctgtctttctttgtcttttccgtggtcctcttagctcctggcacatggacgtgctcagagaccatctgtgaagtgaatgagcctcgccccctcttagctgcctccttgcccaattctgtctatgcccttgctgccattctgccctcttcatgcttgtctgcagtgctaacacttgtcaacatgcatttcttgttttcttatgtctcttccaaccagtcaggctgctctttaggcagagactttccggattcatgaaaatgatcctattgactcctagggtgctgagcttccatttccaaggctgtggctcacaggtctctatttccagtcctttcccttgagctccatgccatgtaatcatccaccttctggtcattgctgttgtgaccatcccattcttcatttttaaaatgggaacaatagaagttaatatttgtagggctgttgtgagggtaaagtaataattgtaaaatgcttagaatggtaagaatcagcctttattacttcctcaacttgccctcctgctccactcccttgcctttcaggtatggctccctgcctagaacgcttaggatataaatacagtgtcatttttcccccggtaaggttccagtgctggtctaggacagtggtatctggagatttgttatactttgtaaataatttacttttataaactagagcagatttaaggttatccctttaaatatgtccctcttgctctggtgtgttgctgtaggggaggggaaaggcatgtgggattacagctaggcccccgggaatgtcacataatcactagctcagcttatctgtgctcagcctcttgtgcatgctgttactgatgtgtcatgaatacttgaagaggttacacatccttgcaattctttgcctcttcacagtttggtttattcaaaacatgggtctagtctgtagtttagaacatagcttgtcacagcagactgactttggggcatctgtctttgctgctagattcagtggtcatgtcttgttaggtgccctttctttccctcaacttcttcagtgtattgtgtgactcatggaagattaaatgttgactctagccaattcgaagagtaaacaacctggaaggattttatggaacaaaagtattataataactaccatttgcatagtcctttataggtttaagccacttattatttgttcatttatttcttggtacagccttgtgaaaatttgaatagagcttttgttccccttatgttaaagatgagaagactgaagcccagaaaggttaagtaggatcttaagtttcattgctagtaggtgctaatacaaggatgagttcattctttcatttattcattcagcaagcaacaagtgcttatcatgtgttagggactgggaaggttgtggtgatacagaatttaacttgcgttttctaactccagatcctgtgctttttcttctatagtcgatgttcactgtatcatgggttatactatttcagctgcatattcaccccacaggctcactttgtaagagtggtattaatgtggaccctgcacacatactgcacagctcactacatccaccccactcccactcaggttactctaggctccttctatttatgaaagttattttctctgtcttcctacttacagaattatcagaaaagcttaattgatctcaataaagttatcctactagatccaagtattattgaggcaaagatggaactggaagaggtaactagactccttaatcttaaggataagacagcaccattcaacaaagaaaaggagagaaggaaaattgagattcaagaggtatttgtatttgattatctttgaaagtactcctttggggaccttagactggattctaaggtcatattcctgtgagttctaaaacatttttaattttgtgtttttattctgatgatcagtgacaaaattttaaccagcaacaaaatgtctcctttgcaatgataattagccattgtatttcccaacgtgggtccatggatggtactgggagtctctgcattactgcagttcttcctttctttggcctccatctgtactgctcccactccagagtacactgggaaccagcggccactgactttgctccagggtagacctggagaatcctgacgggactgattttgttacaggggccctgaaagcctcacctcatagagattatccagattgattcagacctttttagcactctgaaatatgactgcctcatcagagatctcgaactacctcaggatcaaactgcttttgtgattcagataactaaaatgtttttctctgcctaatattagggaagaatgttaggctgtgaatccctgtacattcatgaatgctaataccccatttatagtctcacatttccactaagagtaagaggctaatatgtaagagaagctaggaaggttttttttcctctttaaggagggaagaaaaaactgttttaggagaatcgagcaatgtaagttcatttctctgttaaaatttattgtgaaaaggagataaaattgacataggcatttatacaacaattgtataaagtctaaaaattaaattttgttgtcatagtttcaatgtcaaataattttttaaaacttttatgaattggatcttacaccctaaaacttctcttcctaaaaaaaattattacaaagttttcacttggaactggactacagtacagtctacttgtagttttcaattctcattctgacagacgtacttaggatgtatgtggtgattgtggttcagtgtcacaatgcatttttcttttcttcatgaaggtgaatgaaggcaaggaggagcctggaagacctgcaggggaggtctccatgggatgccttgcttctgagaagggaggcaaaagcagcaggtcaccagaagaccctgagaaacttccgatagccaagcctaataatgcctatgaatttggtcagattataaatgctctcagtaccaggaaggataaagaagcctgtgcacatcttttagccatcactgcaccaaaagatttgccgatgtttttaagtaacaaacttgaaggggatacattccttctcctcattcagtctctgaaaaataatcttattgaaaaagatccctcattggtgtatcagcatcttttatacctgagtaaagcagaaaggtttaaggtaagtggctaagtattttattagtagaaattggttttattagggtttctgtaacttaaaaatgttacttatgctaacatagttggttttttgtttttttttttttttgcttcttttagatgatgttgacactaattagcaagggccaaaaggagctaattgaacagctgtttgaggacctttcggacacaccaaacaaccattttactttagaagatatacaggccctaaaaaggcagtatgagctttaaatcaagataattgttagatttcttccatgcatgtatgtgttccaggaatgttaatgagatggtattgtaaaagagttgcatggataaaacttggcctagaaaagtttggtctgcactataaaacattttacttattttcctacatagaacatgtatattctacaatctgctttttattagttgtaaatattttcttatgtaccagaaccaaataagtatatttagaacttgttaaaaatacattttaatttatgatatacatattattttaattacttgttaaaattttgagttaagttgcatttctttgggctatgaaggagtcctcttaagtttgatagaaatgaatttcttgtaacattcttttttaaaagtggaagtcattaacagtgattattatatcacttatatcctgctaagatacacataaatcccattttgtactagtacctgtggattacagtcagttaaaatgaaatgcaacactgaagtctataacatgaaatgattattaaattgtttattaatttagagctataagaggaacttattttttctaatacggaagcattgcctaataattaagaacaaaaattgccaaaaatttctaccactttttactagattttaaaaagctactttcttttatattgcctatataagcaaaaaaccaaccactgtattaaagcaaactaagcctgcatttatatctgaattattacctccatattttaccaaacatttgaatgtcccccttcccccttttttgttttctgcttttatgactgtatttattcctttactgtaaaagaatatgaagaactcatacatgttgaaagctcctttgttgactgggtcaaagtgaaggaatttcaatctccatcagtgtactgtcatttatttctgcggtctgtagtgcgttccccctttctggagcattttcttattcacttagaagtgaagatgaaagttagtatcatgtttactatttccatattcattattattttatctaatcttttatagttacagaatattttaactcatcttgggtaaatatctttcaaactgtgccatttttctttgaaactgctttctttgttcataagtgaaaaatctgtaatgggactttagtcttcaaacaaaatttctcctttttaatgttattgaatttttataaaagtaaatggtggattgttagaaatgtatcctatgtatggagtttacttacagaaatgggaccactcttttcctatacatagcaacttgaaattaactttagagacaaaagggaactttctcttttggtgcctgacacagtgacattaataactgtaggtgattttgttgagctttgtgataggcactgtgtgtcatttatcacacattgtctaatttaatcttcataactctgctacagatgaggaaacaatggaacagaaggttgtataaattaatgaggatttacaaatgttgcaagtggtctctccagtatccaaacctgggcagtctatcttttgagttcatatactctgtgctgtgtaatggaaaatattaaatatgtgaatggactaatggttcaggtgcctattccttaacagtcacagatgagtaaaagattagtgaatgtaaattggcaattttggtatttatagtgaaaacacagagcaagaggaatgcccaggcctgcctgagagagggttaggaaaggtttctcatggggcacagttctgccacagcttgagtatgtcataggcagaggaaacgagatgcaagggcatcaacgtgcatattgaaggtgcaggttgaatgaaagtgtgaagtcacttggcatgttcagagaactgcgtgaatcttaatattactggaacatgtggcttaagagatagctggatagaacagaaaattgcatgctgcatataaaatggcagaaaatatcagaattttaattatactctggcattactcttaactaagacctggttttcttccccttctgggcatacacaagattgtacttttcagcctctttgtgattggtcggggccacgtgaccacttctgccagtagggtttaggtaaaagtgatgtgtcacttctgagccaaagtatgcaagatctggccccaaaccctccctgatcgtttccgttgctacagtgacaaggcttcatgttgcagtcagtgcagttaaaagatgactggctctgtcagcctcgttctttgaatgctggtttgaagcagggttctgccagtccacattggacacagaatgaacaagcttatgctttttttgttaagccactgagatttttattatttgtaactatatccaaacacttaacctctcagtctgcttctgtatctcttctttcttcagcctttaaatctttcctgagctttgacctgtaaagccaacttcaaactgttcacctctacacagatgtcttacagatactgtaactatacatgccctaaatggaactcgctgttccctgaaactcaggcttcacttatcccatagttccacaaaaggtaccagcattcacacactggcctaagaaacctgggcttctaaactttccttgctctcagtcctcacatctaatatttcatcctggcagacacttcattacacgaacatggcacactcacccaagactaactgcgtttgcgcaggatgtcttaccacattgttttggtgtttttgagtttacttgtctgatacaaaatatctggttcagttctgtttcccatagtgctcagcaaaatgcctggcataatagattcagtaagttattcactgaatgaatgatgtcttagtaattgtataattatatttgtgggtacatgtattacctaaagtattttagtggaatgtcagcacttgttatatctaattggtttgctgtaaattgtgcatctggaaggagagaagtctcaaaagtaattctatacagagtgtgggttatttaatcatcagagcttaactcatgccttagggaccttatgaacaaagtttctagacaaaaacatcaaagacaaaatgttagaaaaggaaaggaaagaaactaaaagcccttgaattaaaactgtgtgacaattatttactagatgtaaaaacatccaagcaaatcacagtcactctgggcttaaatttgcttatttttaaatgttaagtaaatatcatctggaatgacagatttgttgcaaaataacatgaaaatacttcctaaattgcacagtatataagagactaatgtcattactatttctggcttgtgggtaatatgaaagttccctgtgtgcagatcttgaatgcaggattccacacctcccatgtccagcctcttaatatctggcccctggagtttttaccacatgctcccatggtcaccctcagcctcctgatcttaactgaagtaacggaccatcccataggactgctccaatcagcttcccctcctcttgactcatcaccagatcccctgcctccaactgttctctccctgaaagtagtcttactcctcttttctaatgctgacccctgatcttattcctcccttttcttctaggactttcctctgagaataataccttctctttcatgtctgcaatatctcccttttcatcgctgccatcctgtcagcctataaacctacgcagctattcttcacctaaagaaaagtctcaacctttcatctttccctataccattgctttcaaaactggataactttctgtttacaagacaaaatgaaaaaatcattctccattttccccacctctcactgattccttttttgaaggaattttggcttctgcctcccatcactattgaatttaaactcctctcaacaaccttgatcaaacccagcagccttttttttttttttttttaagacggagtctcgtgctttggcccaggctggagtgcggtggcgcgatcttggctcactgcaagctccgcctcccaggttcacgccattctcctgcctgaggagaatactcccgagtagctgggactacaggcacctgccaccacccggctaattttttgtattttttagtagtgacagggtttcaccatgttagccaagatggtctcgatctcctgacctcgtgatccacctgcctcggcctcccaaagtgctgggattacaggcgtgagccaccgtgcccgaccccagcagccttttcttagtcatagaattgcgtcgcattgtagcctggagagaattgttataggtcatctcatctaaatcctttcacttatattgaagcccaaataagaacacacctaaggatattgtgtattgtgaaacgccgagaaactgtggctggtttggcccttttgctatctgggatttgagggaaaaggtgaaatttggaaggcaaagaaagcaaaccttaaggacagctatgatactgagtctagacaggctattatatttcttttttttctttttttttttttttgagacggagtctcgctccgtcacccatgctggagtgcagtggcactatctcggctcactgcaaactccgcctcccgggttctcgccattctcctgcctcagcctcccgcctgggtagctgggactacaggcgcccgccactacacccggctagttttttgtatttttagtagagacggggtttcaccgtgttagccaggatggtctcgatctcctgacctcgtaatccacccgcctcggcctcccaaagtgctgggattacaggcgtgagccaccgcacccagcgctattatatttcttaattgctcagactgagccataatctaatctaggcaaattcagagagtgcctccttcatgagcaagatcttaaaatgaaaaggcctctacaagtcgagactgcaaagtgatggatatattgagaatttgatatttgtcaggaaagcttcaaagacatggagcttctaagcttaatcttttcatttccacttcttatgcatcttagtgaaaactccctttatcctaccaagtggtggtgcctattagtagtatactgttcgctagaggcctcccaggaagtagttcagaaggcttgatttctatgttatgtgcagagatgaagcatgagttatggcacagcatgttgttaaagtgatttcaaatatattttcttatagttactttcctaacacatgggttttgctctctaggaagagaatggagcaaagtgtgtagctggaatttgttttactttcctattagcctgtaggtaccactcagaccaaaaggactccctaaaaactgatgtgcaagtcacagaattctcctgcctgacctctatcaagggatgtctgtaaggagaaatctatctctaaagtactatgaattttgtcacgtttataggttttttgcttgtttttagagacagggtctcagctctgttgcccaggttggagtgcagtgacataatcatggctcactgcagcctcaacctcctggactcaagcagtccttctgcctcatcctcctgaatagctgggtctacgggcatacaccaccatgcccggctattttttttttttttaaagtagaaacagggtctcattatgttacccaggttggtctcaaactcctggcctcaagcgatcctcctgcttcagcctccccaagtgctgggattacaggcatgagccaccgcacccagccgagtttataggttttgatgccttttgccaaaaatcaaagaggtggctgaaagtcaattgatatcagaagaatcaatgaaaagcaagagactcagcagctctccttttcctctgggaaactgcttaagagcacagaatttggcatcagatacacctgcaatcaaatcccagctctacttaggagctgtataaccttgcagtctttgggttcctcgtctgcaaaatggagtatcttcctaccatttggggttgctggtttatgtggttcatgtaaaatgccttttatttgataagcaccttatctttccttccatgtgtataactgctttcttcttttaagtataatatcatctatgtgttagaaaaatgtaagaaacctcttttcaaatagtgtggacaccttaatagttatttactggagcagaggcacacattaagatccctccaatagaagtattaatatagacagaagcagctagtcttggacctctggtgtcatctcctggaaattagtcatggtacaacagccaagaggttaccccacaacttgagctacagagaatgtttgcaatagcatctttattttccaatctgtcattgttttgagaatgaaccaatatgcaaacagttgtacgtccagagtctggtataggctaatggatgcttagtaaagtttgctgaatgaatgaatccagaggacattgccccattggtgttcttgtctccagagttcagattaggaagttcctattacagaaatgtttacaatgacactctaaatatttctcaaacagttgttcttgaaatgtttgcacagagtcacttgagaatcttacagtctagggggttggaaatctaaaaatctctcatgatgcttagggaagttagaatttatgatctacagcatagaagctgaggatgcaataattaacatctgaattgcataagcattgccagtgaatgacactatttatgatgctcttagtaagtattgtgggggataaactttttaaaagatagcccctgcttttaatgagctcatacttcatttgcaaaaaaaactgtcaataacaccaagtgcaagagactctcctaggagaaaacagcatcaatgaaatgttcaagtgttaaaggtattaaaagggccaaataggttactcaagaacatttcaggaagaggtaaaacctaagccatgttttgaaatagactcaggtcaatgagaagggagagctcagtgtgactggattactttactgtagaatttccagtaccacattgcaggaggaaggaacttggtaagaaaaattctgccactgcaggtatgcttcacagtgcaggaaagagcagacaggagacttacgaagcaacctgaattaatattctgtttttaatagtgacccaagttcgaaaatagcctaaaatttaatcttactacctgccgttagatctcttttgtatcagtttcccatctgtaaaataggaccaatttatttttatttttaaaaaggaggtcagagtgtcccttttgtatcagctgttttttgttcttttttgttgtgtttgagatgcagtcctgctctgtcacccaggctgaagtgcagtggcacgatctcggctcactggaacctctgcctcccaggttaaaataattctcctgcctcagcctcccaagtgtctgggattacaggtgtgcaccacttcgcccagctaatttttatatttttagtagagatggagtttcatcatgttgcacaggctggtcttgaactcctgacctcaagtgatccatctgcctcagcctcccaaactgctgtgctggaattacaggcatgagccactgcgcccggcaaaataaggccaattattttctgtaattaagcagcggattgggatgactatttcaataaacataactttgatcctaattcatacttgtgctaaaacaagggcaaagattttgttagggtggctacaataaaaaaaaaaaggtggacaataacaagtattggtgaggatgtggagaaattaaaaactgcatacattgctgatgggaatgtaaaatggtgcagctgctttggaaaagtttggcagtccctcaaaaacttaaacagagttgccattttgatccaataattctgcaacccctattactgaaagtagaaaacatatgttcacacaaaaacttgtacacaaatgttcacagcagttctactcataatagccaaaaagtggaagccacccaaatgtccatcaactaactaatgaatagattttttttaataaggacagagtttcgccatgctggccaggctgatcttgaattcctgacagatgatctgcctgcctcggcctcccaaagtgctgggattacaggcgtgagccaccacacctggcctctataggcttttctgtataggctttctataggctgaggcaggagaactgcttgaacccgggaggcggaagttgcagtgatctgagatcaagccactgcactccagcctgggcgacagagcaaggctccgacttaaaaaaaaaaaaaaaaaagtctatagaatctacaaaaaaactactaaaattaatatgatttacaaggtcataggattcaagatcaatatacaaaaatctattgtatttctatatactagtaatgaatgtaatcataaattgatctctttaagagatctgtacactgaaaactacaaagcatttctgaatattattcagccataaaaaagaatgaggtagtgatacatgctatcccttggatgaactttgaaagtagtaagtgaaagaagtgggacacaaaaggccacattttattattccatttatgtgaaatgtctggaatggacaaagccatagagagagtaaattagtagatgccagggactgagaggaaggggaagtgggaactgactactaatgggtaaagggttctttctggggtgatgaaaatgttctggagtcagatattagtaacagttgtacgaccttgtaaaaacactgaatcgtacactttaaaatgtgaattatgcgaactgcatctcaattgtgaaaaatgaagtggggtggggggaagcaaatcacccaaggtagtgaataacttagaggcaaactctggggttttccaatcaatcctgataaggccacctacttgagtttttcaagaacctgccaggaggaataaaaactgaggaagactgaaagactacctccaccccatgactggaaacaaagtaaagatgtcctcttacccttcctatttaacattgtactggaggttgaaaccagtgcaataaggggttaaaatgttataaaaggcatccagattggaaaagaagaagtaacctttctttatttgcagacacaattatctatgtagaaaagccaatagaggctgggtacggtggctcaaacctgtaatcccagcactttgggtggccgaggcaggcggatcatctgaggtcaggaattcaagatcagcctggccaacatggtgaaactctgtctttatttaaaaagaaaacaaacaaacaaaaaaaccccacaaaaatcagctaggtgtggtggtgcacacctgtaatcctagctactctggaggctaaggcaggagaactgcttgaacccaggaggcggaagttgcagtgatctgagatcaagccactgcactgcagcctgggcgacagagcgaggctccgacttaaaaaagaaaaaaaagtctatagaatctacaaaaaaactactaaaattaatgtgatttacaaggtcgtaggattcaagatcaatatacaaaaatctaatttctatatactcgtaatgaatgtaatcataaattgatatttttaagagatctgtacactgaaaactacaaagcattgttgaaattaaaaaactaaaagatagatatactgtattcatgaataggaagacttgatattgttaagatgccagttttcctcatattgataaataggtatcagtggtgattcagtcaaaatcccagcagactttttggtagaaatctagaaatggattctagtgtaaacacagtattcaaatcactgggaaatttggaaagattattttaaaaatagtgccatcacaaatggctttctatctggaagaaagtaaaactggacctttatattacactaaatgctaagataaattgaagatagattttataaaatatgaaaaatttaaaatctcactacaaactaccaaaagagactacaagtacaatttagaaagagaggagagcttaatcatgaccagaaggtctaaaatattacaattaaagacacacaacaggtttcatattgcagaaaaaaaatgtaaagagtatgtggaaatgctgaaatatctgcaacttttctgtaaatctaaaaatattcaaaaattaaaagtttacttaaggataaaatagaatgcacacacaatgctaataaaagtcgaatgacatatttggagaaaaatacaagagtcaaactattaacagctatagtataaaaaatatatttattttcatttttttaaatttatttttctgagacagagtcttgctctgttgcccaggctggagtgcagtggcgtgatctcagctcactgtaacctctgcctcccgggttcaagctattctcctgcctcagcctctcaagtagctgggattataggtgtgagccaccgcacccggccctattttcatttttatttattaacagagatggggttttgctatgttgcccaggctagtcttgaactcctggcctcaagcaatcctcctgcctcagcctcccaaagtgagccactacacctggccaaaatacctttcaaactgacaagaaaacaataaaaaaaaaaaaataggcaaaggatataagagccaatttagagaacaccaaactcaaataccatcttccagcccctaggccaaaaaaaaaaaacaaaaaaaaacaaaaaaaaaaacacaaaaagatgtacacatttactagccaggaaaatgtaacattagataatagataatactttacaccaaacagtttaaaagtttgtaaagctctaatacctattgttagtagaatgcagggaaaagggaactcatgtattgttagcaaattgtaaattgtgacagccttttttgggagacaatctggtaaaccttttaaaaattcaatagacatggactttaacctagccatttgatttccttgaatttatctcccatacttagaagtaccagaatataaggacgtaattattagaatttttttgcagtgttttgtattgaggaaagaaacaacaaataacaaagtgaatgctcatcaatatgagaatgtctgaataactgcagcacatctatactacagaattcttatgcagccattaaaaagaatgcgttggagttatacagttgacttggacagatttcccaaagatattactgagaaaaaatcaagaaaattaatgtatatatgcattgtgtgtgactatgaacatggagaaaactggcatcacacacattttgtcatttgcactggttatgggggaagataatgagggaaggaggcagagaagagaaggggagaacaaaacacaaaaagaaggcaaggaaaaaaggatggggaaataatttgtgcacattttaattaagctttcaatagaaagtctctagaacatcagttcatgatacctctaaggcaactgtgatttccttatctagttgaaagtattacattttctttaaacaagcaaaaaagcaacaaaaagcccccaaaagcaaaattaaaatgccttggctatattaaccctgaaaattaggtccaatggctgtcatacatgatagaatatttgtaaactaatgtatttggtataaaaccttgttaaaagttaactgtcttttcagccactgtattgcttcaaacaacttattttactgtacaatattatgaagtgactggttatcaactctgaattgagtccagaaacatcctcattccctttgctcagttgttcttctgtcccatcagaatttcctcttcatatatataaatactataagtataggaaaaataaaaggaaagacaaggtccctgccctcatgagactagagttcctttaagatttgttctcctaatatcttgaatacagaattaagaatctggaggtattaatacctggaacacatggtgttatgtatgtctatattttacctccatgcaggacaaaaagtgacagaaatatgtgatccaacgctatttaggcaaaaggctggaaagaaaaaaaaaaaaaaaagcaaaagcaagactatcttgtcaccagccagcccacacattctagaattagtcaactcttatagagcaaagagactgccttatcttactgctcatatagatgaaaatgagctgcttactaaccctgaaaacctggctctctcttgtactaaaaaacaattcaagtgcagacagccttaatagcaatttctaccaaacattcaaggaagacatcattccaatcttacatactctgatcactgaagtttgccccaggttaacatttgaagaatcaaattcactacattaacatgttaatcacaattatatggcagatgctccccccaccaaataagcagccaataaaattcaacgtattttcaaaggtaaaaactcttggcaaactaggagttagaagataatttacaaaattcaataaaggatatcctataaatatatctgtggcaaataatagctgaaatgatgaaaggtttccctttgaggttatcaacaaatcaacaatgccccctataaccaccgctattcagaagtatacactagaagtcccagccagtgcaaaaggccagaaaaataaataaatgatgcaatgatctaagagaaaaaaaccaaaacaatgggaatcccacctctaccacttagcagctgtgcaactccaggcaaattacttaatatctctgtgcctcagttacccccatctgtaatgaagatagtaatacctccttcacagagttgttctgaggaataagtattttattttgaaccaactctaatgataattaagactttagtatataatttgatatacaattaccttttgcatctttctaaattatatgacccctattcactgttcaaggtaaacctaatattactttttaatttaactttaaagttcaggggtacatgtgcaggtttgttatataagtaaacttgataagttatatttttcttttattgtttgcttttccataagttactattttaaaagtgctcggaaagtatttcacacttcaaagcactgtaaaagtgtttaatacaaacattcacaagtgataattgtacagtgatatcccaaagaatctggagataaaccattggaattaaaagagtaagattcaccagatacaaaattgttaatacaaaatcaatggcatttctctatactattagttacaaacagaaaatgaggctgggcgtggtgacttatgcctgtaatcccagcactttgggaggccgaagcaggtggatcactggaggtcaggagtttgagaccagcctggctaacataacgaaaccccttctctactaaaaatacaagaaattagctgggcgtggtggtgggacacctgtaatcccagctactcaggaggctgaggcaggagaaacacttgaacccaggaggcagaggttgcagtgagctgagatcgcaccactgcactccagtctgggcaacaagaatgaaactctttctcaaaaagaaagaaagaaaatgacattttaaaaatatacattataggataaaaaatatcaagtacctgggaatgaaatttaacaaaagatgtaaaagaattctatggggataattatagattcaatgtaatcccaatcaaaattagtgaaacacaacaaggttattctaatatgtttatggaaatataaagtgccaaggacagtcaagacaccatccaaggaaaaaacagtggcagacttgccctattagatagcaaattcagattccaagactgatgtctaaattgtccactaactcaccttggagatgtttctgaaaatgctcattcaccaggtatgtttttacatggttccttcatttcctttagatcttgggacaaatgtcttctagagacttttcctgttctgccctgtataaaacagtactgcttccccaaaatcccagtcactcttattgtgcccacctctaatttttcatagcaatcatcatctggttattttacatctcgttccattattttaagctacatgcatatgtttattatttttgtatcctccaaattctaatacaagccctctgaagccagggtgtttgtttatttggtactatgctgtatttccagcatctactttgttgaacgaataaattggtagaagtcacaaaaattctgactagcatatgatgtacagtgatccaatctgaactaaattttaaaactgcaaactttttcatatccagctattaaataatagccaccctaaataacataactctccccaagtttagaatactatttttggcattcaaaaatcaaccagtatgtaaacactggctgttaagcaatgatatctcatgctctagtgaaggaaataaatgaaacaacaaatccattaaaaggaaccatatgaaatgcagccttgagaaaagaatttttttccttagatccaagtacagactagaatctgtaagaagcgtgatgactgtgaatggaaaggcaaaacaatctatggagcaggagtttcttttgctcatgtcatgtagcaattaatagctccgatagttttcaacacatactttatcctttggtgatttgtctatatgtttacctaaataacaggctagggaaagtcttacatgtttacaaattaacacaatttccaggaaaaataagttaggagtggtggattatgtgcatttaatataaaaagctaactaattaagtgctctgaagctgggaatttgtacaatgaagtgaatctaccagttaaattggtggtctacataatcaacagtaggatatactattataatctttgtatttcttttctctcattaccagatgatttttccaacaggctttaaagtacaaagagttttaacaagatttcagtgagttaaggtttattttgaataccctggaggtatctcttgttcaaggctagcccagagttgagttccagggaaaactggcttggtcctaaattaatccaactttgaaggatacaggagacaaggaatttctgaagctagttgaaaggtccaggagacaaggaatttttgaagctagttttaaggtgagactgaagtggtactggttgggagtatcaccagaagtaggtgtagggtgaatgaatgcaccagcctcctatagggcactatttttgctgtattcctctgaagatcatttagctttccatttcatctttagccttttaaagaaatgtcaacaaggcagtcaacatattcataagattattttggccgagcatggtggttcacgccagtaatcccaggactttgggaggccgaggtgggtggatcacttgagctcaggagtttgtgaccaccctgggcaacatggcgaaacctcgtctctactaaaacacacaaaaaaattagccgggcgtggtgatgtttgcctgtaatcccagctacttgggaggctgaggcacgagaactgcttgagcccaggaggcggaggttgcagtgagctgagatcgcaccactgcactcgaggcttgggctacaaagtgagactccatctcaaaaaaaaaaaaagattattttcatgaagcattaactatataccagggaaacagaaaaaccatctatgcattttacagaagctacaagaatagaaagcatctgattacaattagcttgaatttaaatggctcatttcataatctaatgttgctagaatagaatctcttaaaatagtcttttaagatctttttacttttttccccttttcccaagttagctgatctttccacttttctgaggatttataatactgatttctcttcacaatttaatgatacatatatttactcaagttaaattcaaccaatttactcaaaaaaattatgttgatgtatacagtatctttttttctggtggaaaggcaggaattagacaggaaaaaagggtagtttctaacactgttgaaaagttcagcaaatgcttccccttgagctgagaccagaaggcagaataatcacaatggcttgcaatatttatgaatactaccacatggccaatgaatattctcattcttattaaaaaaaaacacttgtgtacacaccagaaggcagcagtacattagtatttacatttatttaacgtatgcagtttacacactcattattaaacaaaattggaatgcaaacaaatatacaaataccataagcattatcaaataaaataactggcactagtgttataagcatattaatggacctggtagggaaaagtgatggaagaagactgcagcccatggcatttttctttttaccaaaagaaaacgctcagtagcaccataatggtaatacttaaaagaaatacataagatagaacattttaactgctatcattgaggttaacctgcttttatttaagtgaattatacaggaaattaacagtacaggcagtattttggccaacttctgcttatgtcagctgaacattgtccataaacaaaagcaaaagaaaataatgctaatcatacatggaccttttgtacttggtacaagttctgcaccgtgctttgatttcatggttggagaagatatgcatgtgttaaaaactgaggttatgtaaagttattcactaaagcctgagtgtgtctttggtaggctaatactttttcagcattattaatcacattcatgtttatctatttcctgtatttttatatataatccaaggtgaccagagaagacatggaaaacaacacagcaaaatcctcaaataactaggccattaaaacccagtcgatcccaaaggcaccaagaatcaatggggtacaaacttccccttagagaaaggtggattttttgtaatacttataacctaatgggactttattttgtagttttatgtatcttatttgttgctgtcatatgcttaattacttacctttacattttttcctctaagatggcatcaacaataaacaagatagagtaccaggtatttctatttcaaagttgtgcaaaaactgccacaatcttgctcaaagtgtctaagtatccaaatggtagcaaatgagctgcattaagctttatataaccacattgcatatgaagaaaaaaaatgaaatttatgccgatataaatagaaatgttacagagtatcatatactgagagtaacctatgcagttcttttaaacttatctctttagtggtttcaataaaatatcactaaccacttatccctaaagcctcaagttttcttcatttgaatgctgtagaattgcattagtattttatattgattatataaattaagaccaatttctatctaagtatgtgcttcaagcaatgttttgtggcaaacacacaaaacatgctttgctcttcaaatttattatccttaaaataatgcacttttaaagccttcacttcatagtttggtaactaagatccacatgacacacaatgccttgctgaacacagaaaatgtatctgcattatgataatgaaacccggcttttgctggtaacctgaaacttaagtagtcacatgtagttcaaccagctccaaacacggttgtacagtggtaattattctgcagcatttatgggcctaaatttcagtctgaattgcaacttttaattccattgtctgatgtgagtggttgttatttgtttcttttagtgcatcgccaaaatataaatcaacattaggttttattccattgttaccatgttcttcagcaatatgattcaactgtgaaacttctgaacaggaagcagtttgggtaaccacagaaatgctacactgatgtggggaattttccagacggtcattttctacctcaggaagaatgttaacagtagcaaagcgggtgtgataatcactggaaccatgactacaagaagttttcatgctttctaggtcagaacaactaaattcagaaaaatgactagagtgagaatctgctacagaaggcatactgtcactgagggatggagcctcaaattcacttgagttcgtgctttgttgttctaacaactgtgcatccatgtcctctctcgtctcatttatcttcatgttaccctttttcctcagtttaccactttttgattttttccctgctgttgcttctttggaccacttggtggcactagatttaccttcaggcaagccactggatgaaccgccagcatgacttcgggtggcactgccatcatccacactactgcttccactgttgtgcctgaatttggatggctttgactcaatatctacttgcacctccatactgttgccttctctgaaatataagagtaacaaatacaaacataa

SEQ ID NO: 584 - DNA, 357154 bp, Homo sapiens
gagaggcgccggggctgccgcccggtgctcggcgcgctctcgggagccgcccgcccgctggtcccgcagccttccgggaggaagcggtgccggcagcgtccagggcgcgctctcgggcaccctcacctgccggcgcccggccgcttacccggcagggcgtgcgcagggtagggtgcgggaccggggggacctggaggcagaggggagaaccggccgtccgcgccgcagcacagccgctgggagcgcctcagaccccgcgcggggcgccggctccatggcgaccgggctcggggagccggtctatggactttccgaagacgaggtgagtggcacccccttcctgctcgggactccccggggagttcctatcccgcgccggcagggggaggggaaaggggccgtccccggggtgctcgtgcccagcgtctgcaggggagccccaaagcgggagcgccccggagcgggatccaggggagcttgggtccttccgcaccccccaccctccgcaagccgagctcattgtttgtaaataaagcggcgcgacgcccttggagctgggggttcactccgcagctcctcgctttcgggaggagagggagggggcatgcgtgcctctcttccctcttcctctccaagcagcgtctcccggggctgttgggcaactttccgcctctcgcccctgcagcccgggagtccatgatgcatgtcacgtctgggtcgcgcggctggagacccgggactgcggagaagccggatcgtttccccctggaactttctctctcatgattgtgtggatcagcaggcgctcagaagcctgtgcgtgcttatcccggcgggaatgggggacacgctgcgtgtgtccctcccctcgttttgcaaagtctacggccaggattgtggatttcggagcctcggtgggggaggtgttcaaggctggtggcaggtgctcctggaaacttggggaggaagcttgcagccctgccattttttcctcccgaggattcaaagcccggcacctccagggtgggtggggagaggaaagcttaattgatctcttttattaataaagcgactgaataagccacgcctcccaggcggtcggtttcactggaaagggctttgtttttaccttcattctctcttccgtgtctcccactccccccttttgaaacaatcctgctaaatcactgcctagtcctctctcgaccagccacgctcggctcttattggtatgttgctctgccaaaaaggggggtgggacgcttgtcgcgggcgcggcgtgacaggcaggctggatggagcaggtaggagtggtttgccatctggcggggtgcgcgctcaggtctggctcccctttcgagaggtgaattttacaacccaagaagcattactcagcagggaggtatttcctatcctggttgtgcatttcatgaaaagttgatgcctggaaattcaggcgttctcgatttctctttcttcccctccctcctttcttttcagaggttccctctttctctcgtgttgggggtggggttggaagaaaggctattatctgagacaggctcgcgttatggctccgctttctgcggctctcctaccctggcatggtgtgtgtgtgtgcctgtgtgctacgtaagtgtggaatgaaaggtattttggggtgggaagggtgtttagggtatgaatttttttcttagcggtgctaggcaaagcttgatgtatttatttgatcaaagaatgatcacagtgcaaataatgtgtgatttgtgtgtttattttgcctcgctgtgcttttgtaaaataatttcccgttttgtgtaactacctggggataggtgacagtagcattgtttcattgacccggggggcttctcctctccctcctggcttctctctttgaggagctttcccttgcatcctctacttctccatttaattagtggcagtagagggcaggccctgagttgcagagacgcagacattcctaaacaaaggggctgcttgggttgacgtattgtggggggtgggggtgaggacagctgcatttcatcctaggttcttttaaaaaatgttttaataacatgattatttgtaaaaactcccccgaaaaaacgattttaagagtgttttgggaagtgcagctggataaatgaaacacgttaatgtcactgttgtttgtgctttatttacattggcagtgagtgtcagaatctacctagagcacatcttgccacttttgtccacaggagtcactactaatcatcataactgatgtctagtgtgaaagtgaagcttggaatgtaaacagagtccgagtgtgtgttggcatgtgactggattcactcctgcatgttgctagaagggaatttggggctgtataggaaatagcaagaggtgatgaagacaccttttattatctatttattgccatgtcgctggtagtatttagttccacacacattgtatttcacaagatgagtctcagccgtcttcctttttcaactttctcctaccagtgaaaaaataagccagggcagttctgatgacttcacatttcattggtatttgtttttcatgggcagtttcatgctgtcacgttgcccttcagagaatcagggaatgccttcgtagaatattaacgacaaattgttgaatttgcacagcttgttttgtctccctgaattagtatgtgtaagaaaaaccaatggaagattttagcaggctctgaaagtagaatgcccgctgaagcaaacggcagggttgttcttccaaggcgtattaaatatgggtacacttagtttgcagacttggtgtgctgcagaatatcacatatgaagatattttgaccgctatttagaagagtgacctcataaatcttttagcaaagtagacacacatacctaccacatttcttaaaagtagattcgtattttgatttgagattgttgaaaagcatggtatgtttggagtgcacttagttatgtcccatctcataaagactgttgagctctctgcactgctgatgatgaagcattgcatgaacccagaaaacggggatgccaaagcacagggcttaggtgctgttccttgcgtcatcagcagaggtctgtccactttgtagaaggtaaggggttgagatgtgggctttgcttgtgtgaatgtatgtgctgtttaattttttctgtgtgtttcgggcggaggtttctctggtgagttataattcatatttaccctgatttaagtcatgtcactttaggtagccagattcaaaaccatcagatgaaggacttttggtgttagagggattagcagtttaacaaaacttctgattcatggcccaagatcagatttggtttggaatcagaacactttggactagtttctgcatctggcttgagtccttgtggatttcttgttttatttctttatttttggcaatctgtagtgcattttggcatagtttacttatgaatgttaccgctaactttctgaaatcttttattccattttagaaaggtatcatttattgaaaagatttttctactgaacaaaatactgggattgaatggcagcttcttatcacattagatatgacattaagtaatttcgttagtagttaaaatgaagcaaatggcatagaaatgaaggccaggctgacataggataaatggcaccttctctccttatcctgtacaaacacggatagttggctacttttgaatgcctcttctataccaatggtaaaaatccggcttaattggggccacattctagcctagtcacaatcagtggcttgcattatgtcctttgagatgtggcagatctgcttataggtgccagtcaccacggctccctgctggcttgggggtctttctactcatttacatataattatctacttcttaatcaaccattaaggttaacttttggcatggatcctgtatgcttttcagtttaagatgctgtcacttttaagatgcgccatgagagcaaagtgctaagccttgtgcacatactatgtcatttagttctcatgagaactgtgtgaggtaggctgtgatttacagatgaggaatgaaagctcaaagaggttacgtgacctgcataaggacacaaaacaagttaagttatggagccagctattttgaatagaaaggcctagtttttaacatgctgaatatcctccccttctgacaaatgccttgaaaggtcttactatctagattatttaagataatgtaagagaaataaacaccactggttgcaaactgatggctgctgggcccgatttgaccaggaaccctgcttaatgtggtctctagagtgttttaaagcttggaaatttcatgaaaatggtaaaaatctggcttaattggggccacattctaacctagttacagtcagtggctggcattatgtcctttgagatgtggcagctagttgtgctatggttgcagtcaccactactttctgttgtcttaggggtctttctacttgtttacatataattatccacttcataacaaacctttaaggctaacctttggcgtggatgccatatttctttcactttagtgtgctgtcacttttaagatatgccattatttcatgtaccacgaagaaaaaattgctgtcaagttatgacatactgtccatcttatgaagcatccttatttcagagaagttgaaatatgagaaaaaggatattttagaattgatgaattacagtgactagaaacctgggaaaactccatgccatcagtttcaatatccccaatcattcagtacttttaagtcaacgagtagtcagatttctgcttttctgtgtttgaggaaagtgctagaaaaagagaagtgctcttaaataggcattagcacagaaggaactgggggcctagatcatagccaactggatggccgtctgtaagtgattaagaatagttgttagtttttaaaaagtggcctgtgtgtattttcaagagattacttgggaaaccctatgtgccatctttgcagctgtgcaaaacggtgaggacaagattgctttcaaaaattgtggtttagattttgcttggatctcaaggtgaatgctgacaggccgttttctgaagagagagaaggcttgcccagtcatgccaagtccaagtgcctgtgtcgggcctagatgctggatggtagactgtatacccaggacatataggtaatgtttgagaaacaaatgttaaaaggacctagttttcatggtgacatttaaaatcagtttttaaaattcatgaatataacatgttgttttaaaatttgattatagggaccgggtgcagtgatcactcctgtaatcctagcattttgggaggccgaggcaggagaatcacttgagttcaggagtttgaggccaggctgggcaacgtggtgaaaccccgtctctacaaaaaatagaaaagttagccaaacatggcggcacgtgcctgtagtcccagctacttgggaggctgaggtggaaggatcacttaaacctggaggcagaggttgcagtgagccaagatcatgccactgcactctagcctgggcgacagagtgagaccctgtctccaaaaaaaaaaaaaaaaaaaaaaagactaatgaatagaatttattttcttcaatgatgtagtgtctgtggaatttgtagacattgacatttgaattttcattatatttagttttattaaatcagaatgttatgattgtttatttcattattgaacatcagtttccttaatttaaggaataaaaataattttgctcaggccagacatagtggctcacatctgtaatcccagcacgttggaggccaaggctggtggatcacttgaggtcaggagtttgagaccagcccagccaacatggtgaaaccctgtctctacaaaataaataaataaataaatgaaaaaaaaatcagctgggtgtggtggtggacacctgtaatcccagctactctggaggctgaggcaggagaatagcttgaaccctgaaggcagagattgcagtgagccgagatcgcaccactgcactccagactgggtgacagagtgagactctgtcacaataataacaggctggggcagtggctcatgcccgtaatcccagcactttgggaggccgaggctggaggatcacctgaggtcaggagtttgagaccagcctggccaacatggtgaaactccgtctttactaaaaatacaaaaattagctgggcttggtggcaggcaactgtaatcccagttactcgggaggctgaggcaggagaattgcttgaacctgggaggcagaggttgcagtgagacaagttcgggccattgtgctccagcctgggcaacaagagcaaaactaaaaataaaaaataaaaaaagaatagtaatagttttgcttaaagggtgaggacagtgacaaatggtgatcctcagatgactgtagtttctttaccattacagaatgcaattcaaatgaaaaccattgcatggtactcaggcatttcttcaatgcagtgtgtgcccacatcaccaggaagcttacttgggaaagtttgttttgggattctggagtacctcaatatatctggtatattttcccaagaaaagtgaataatcttggggggccgaggtggacagattgcttgagcccaggagtttgacaccagcctgggcaatgtggtgaaaccccacctctacaaaaaatacaaaaacttagttgcgtgttgtggcacgcacctgtggtcctggctgctggggaggctgaggtgggaggatggcttgagcctgggaggttgaggctgcagtgagccatgatcatgccactgcactccagcctgggtgacagagcaagacactgtctcagaaaacaaaggcaaacaaacaaagatcaccccaaagaagaactcccaacatattaaaagtcattgagttttgtacccttcaaatggatgaattgtgttgtgtatgaattacatctgaataaaactgtttaaaaatattaagaatgattgagtgtgacattattgcagcagtacattggagtttctgctaaattacttttgcattcatttcaaaaggaagcaactatgcccattgctaatttaataacctgtttgcttgtgcggtgtttaaaatggcatcatgaaaacatggcaatgtgtgatagattaagagccaattaaattttttattttgagttacaagatctgcattaaacagattttattgttgcccttgaatttccagtcttagatgagtagcagcagtgaaaaaaagagatcctaacttaagagttttcaagctttttgatgttgcaggtatttgaataagtgggtctgtcttactgaaatatttgttaattagcgataaagcaaactatatgttgatcttttggtagtccatgctaaggaggattagaataatatataaataatataatggtaataagtatcagggcaggaggattaaagaagggtggaagaagtgtgacaaaatgttactttctgtttttacattgtttctcttccaggtcacaactgtatttcaaatgtatttcattttcagactataggtggcaatgtttgtgctgttcactgtttaatgttactgttggctcgggtgttgcttgttgctggaatatggaaatgatagcataatttagagttgagaataaaaaaaactagatttagaaaactagaaactagatttagatttagtagagactttctaaatagtcctagttctgctgtgtggacccttctgtaactttctgttactctgagaaggagctgataattatcacaactactggtgtttgattagcagagacattcttgattcctgatgcaagaccgtggctgaagttgtagcagggcgtttggtggttggcgatgtaaagatctgggcctcttgtttcatgaataatagaatctcactatgattgtaatattttgttttgaactggagtgctgattattgtaatccctttaggtgagaaaagccttattatataagtgtatctggggtaactagcttaaatttgacactccagtcaactttttgtccctgacttcagtcctgcattgattcaaaacgcaccaagttaaatgtcaaggctctcagattcccttgctgtcatcaaattcagtgtttggtgacttcttggcaggcagacatctaccaagagattttgtattctttttatacctcctattcaccaaaagaaaagggccattcaaaagtgagtttttctttttttttttttttaagtttaaaaagctatgatgtggccacccatggtggctcatgcctataatcctagcactttgggaggccagggcaggcagatcacttcaggccaggagttcaagaccagcctgaccaacatggcaaaaccccgtttctactaaaaatacaaaaattagctgggcgtcgtggcgtgcccctgtaatcccagctacttgggaggctgaagcaggagaatcgcttgaacctgggagatggaggttgtggtgagctgagattgcaactctgcactccaccctgggtgacagagtgagactttgtctcaaaaaaaagctgtgatgtgaaacctgttctgtgaaggtggaacttggaaaggcttgtaaggatggtggtcccatgaagaggatgaacaaaccaagggaactgtcctcttgctggtttgggtgatgtcccatcacctgtcactttgtttgtttgggctgcagtggaccaatggtttcccaggcacactgaagtgacatgtagatggattgcttgagtggctccggcatgtttccatctcctgtctaccaggcagagaccgtgttccctgttttgaggggatccagaagtgcagtgacaagggcctgatttgcatctccagctcctggtcttgcctgtgttaacaattttttttttttctttccagatggagtctcactctgtcgcccaggctggagtgcagtggtgcaatctcggctcactgcaagctctgcctcccgggttcacgccattcgcctgcctcagcctcccaagtagctgggactacaggtgcccaccaccacgcccggctaatttttttgtatttttagtagagacggggtttcaccatgttaggcaggatggtctcgaactcctgaccttgtgatccacctgcctcggcctcccaaagtgctgggattacaggcatgagccaccgtgcccggccaacaatttttacattctaattaatttccagtttccaacctgactcaaggtttagctcttcgtctcttgggtgcagttttggatcatgtcttataatgtatatttaaaagtgtgttgtaaagctggaattcccattgtgggtaaatgctgagattgttgtaatactgagaagtgcacttgggaaccatggccaacactgccctagctgaccggaggttgcactgagttgtcccctttgaacatctgttatgaatgaatgttggaaaatgcaaagccaatcatttcttttacctgacctatgtgatgttaagttttagttttatgttttggcaagtgagtgttggatgtcactaatgtgaggaggccggtgagggcagactttgggtcagaggtaatgtaggagatgaagaccctttctattaatttttcttgtttaattgaagatgttcgtgttgaatgggttttatttacatgtataagttctttttttcttaatgctggaagttactttggtttttcagaaaatgcaagtaaccctaatctatttagagaattactttgcttagtaagcactcagtactatttagtaatggggaaaaaatgtgtttgtgtcccacagcgtgacaggctccacaaacttacttacgaatctcctaactaccctgagaacctgaagaatgggactttgtggagaatcttctgctttctttgctagtctctatttttccttctcagttattaagtgagttgtctttgggtgtcctcatcatgctgacttcatcttgcccagtttgttttgggtagaggaaggagtgcaaggtttaaaggaaaagcaaagcctgtacaacatggtgagaccccatgcctgtggtcccagctacttgagaggcccaggtggaaagataatttgagcaccggggttcaggaatgcgctgagtaatgattgcaccaccgcactcgagtctgggcaacagaatgagacctcatttcaaaagaaaaagaaaaagcaagactgaatcatttcactttgtattctcctccttgctctcattccttttgtgcttcatgcattgtgtgtgacaattggatgcagccgtaattattgtcagtaacttggtttttaagcttcagactgtatttcctcctcacttgttaacaccagaagataaatgaatgtggctcttggattgaactacatctacagggagctgaacttcccatgttgacgttgaattctagagtatgcttatgctgattcttgagaaattggtatgtgccgtgcctttggaattgataccttaattttcagtgaatattattggtattattattaaagagaacactttaagccaggagtaagagcttttcctccttttgagaagtgaggtacagaagagtatactgcagctgtgggagtgatgggtggggtggggcagtgttgaagaatatttaataccacgaagatgtcaccagtataatattaaatagaaaaagtaggttataagacagtggatccagtagaatcctattgtggttaagtgtttatatgtagagaaaatgactaggggctaggcacagtggctcacgcctgtaatctgaaccactttgggagatagaggtgggaggatcacttgaacccaggagttcaagaccagcctgggcaacatagtgagactctgtctctataaaacaagaaaaaagaaaaactaactagggatatattccagcatgttagtggaggttatctttgagcaaaggggattataggtaattttttattgtcttgtgttttgcttacatgtgttttctatatttctacaataaacctttttttcttaatataaaagtaagtttaaaagtgagtttaaaaatccctgaaaggcatgtacttcaagcttcaagtgaaagttatagtacttgttcagcacaaatactgatatagtgtttgttcagtggaacacttatttagggtctgccttgtgttttgtgtctaaggattaccaggtcattttcatattaggagctcaccactacgttgggagttggagagatagagcaaggactattttaaggaaaaaatgactggtaaattgtatttctttttccccacttgcagtttgcaaaatagatgtttcatttctctccactgtggacacttaaagtttgaatttccatccttctgtgcactccagttgcgtgaaagtaatttacattgctagtagtggtttgggttctctgaaattttttgtgtgtgctatggaaattgtctcctgtgatcagactcaaatccatttctccttattattgttttcttaggttttgagttagagaccttttcatgaccgtataaggtgttgaataggtttagatatcaaagtgatagctatgcatagctatactcacctgtgagcggtcagctcttcagtgtttctttcaactgacttgtaatatccagccactgttgggtgtgacctaaagtgtatctcttcccaaacagaagggaggagttgacaaacaccatgttacttttaatcagagacttgtccttgtcccccttcccccagccttttaataattctgaattcatgttgcagtcgatatgtgtttaaagtgttggtaggtttcttgtactcacaccatcctcctccactcctctcacccccaaaaagtgacagctgacagttgatggcatcttagaattgtgaggcttgagttggtctgtctcaattcgtgttttatggtggcccataaattgtgaaagataattgatagttgtcatgggaactagttatgttgttcagctatgatgtctcaattaggaaatgttcacctagacagtagggaaatgggccagctcagggatgtcttcaggaaccaggttcattgttttttctgctttcccttctacagcctggctctttccagggcttcttggtcctaggctggctgccactgacagagctatgcctttttttatttttttactttttttcaagacagtctcactctgtagcccaagcaagagtgcagtgacaccatcttggttcactgcaacctccacctcctgggtttaagcgattctcctgccccatcctcccgagtagctgggactacaggcatgtaccaccacacccagctaatttttgtatttttaatggagatggggtttcaccatgttggccaggctggtcttgagctcctgacctcaagtgatccacctgcctcggcctaccaaagtgctgggattacaggtgtgagccaccatgcccagccagagctatgccctcttttttttttttttttgtttgtttgtttataactgtgtacttgtaaaggaaagagaacggcctcctgtgccttaaatcttctgttgtgtctcagggcccacagaggctgagatctgttcatcctgcaaccagtcaccgtggcaaggaggagatagaattacctttttttcttaccttttgagccaggggtaaagtcaggcacggtgaccctgcattccacaccttggataatccatccaccttcagaaatgcccctggcttcgtgaaatgcacatgctccctttctccagggaggtgacccgaatatgcagctaagtattgcaaggatttctgggtaatattacacctgaaaggaggttttttttttttttaattatctggtgatttatgactaaataggctatgtctctcaaaacattgaacctgcaatgggcaagaaagaacaggatgactacaatgaaccttctatttggaaaaggggaaaataagacactcacagtggggtagctggctgaacaggaacagctgggagcgtttgctttggtcagccggtctggcagcttgcctctgctgaagtccgtccagggtgagaatctcgcttggtcattgtcctctgcagctgcacctggatggggtaggcactggcaaagctccttttcttgggtgctgcttggcattagtctggggcttcaggattggttgtcttggggttgaatagccacaggcttgttccagccttactgagaatgtctttggcaaaactgctcccaggaaaactcaggctctgagttttgtgtctagtcaattccatgggctggtaatggcagccagtgatctcacctagatgaggtctgtggttctgggaattcctgggtcttaacagtaagtcccacagccctgctaatccccaccacatctgccttgaggcaattttaaaatagcctagaatgaagaggcacacagttttgggtctaacagacaacaggggcagtttaacccactctgcttttgctctctggtgtatcaagaatgagcaacttccccacactgggattgtgggactctgagtacccacttcccttcactcagccattccaatttcttaaagcaatttttaaaaaatggtggtaaggccggccgcggtggctcacgcctgtaatcccagcactttgggaggctgaggcaggtggatcacgaggtcaggaggtagagaccatcctggccaatatggtgaaaccccgtctctactaaaaatacaaaaattagctgggtgtggtggcacgcacctgtaatcccagcctctcgggaggctgaggcaggagaatcgcttgaacctgagaggcggagattgcagtgagccaagatggtgccactgcactctagcctggcgacagagcgagactccatctcaaaaaggtggtaaaatacacatgacaaaatggactctcttagccacattaaagtgtatggtttggtggcattacatgcatgcacactgttggcagccatcacccctgtctagccatggaactctttcatcttgcaaaactggaaatgccttactcgtgaaccagtacctccccattcccagccattccagtttcttgtagcgcatcttctctttgatacaaaatctttgatagggttttgattgcaggcaacagcaattgaatctgatgaattcaacagagaaagaattaactgaaggaatttggggtagcactggagtacttgtcacactggagagacaggcctggacaggggtcagggaccaatgaagcctgggcatccagaatcacagctgttagtgtgttttattatttaagagtgagctcagaggtcactgttcaaagctgggcactctgtctccaactatccctcttcacatcccagactcaatagcacctttctgcatagttacttctactgaatacttcactgacagcaatgaaggattgttggtttatgtgtctgtctcgtatagattaggcacctcttcagagccacagccacatcccaatgatttatctccagtcccaagcaccgaatcagaccccttgaccgtttactccattcaagtgatgatctcaggttagataatcatgaggtcagttggtcaaagcaaaaacatctttttaaatgtctttttgaattctaatttgtttatgcaatatagattactcctcctattttcttcttctttcttttttttccttaagagatgggatctcagtatgttggccaggctggcctctaactcctgggctcagcggtttctcccaccttggtttcctaaagttcagggatgacacgtgtgagccaccgtgctcagcccctcctcctattttctagtctgtgtcattactgagaattttactctttattctctttcctcaaattctaagtgaaaagacctctcctctctaggccccaagaaaggcaaatgtgttccacggaagaaggttgcagacccatgtttgattgctttataccatatttcccccccagaggctcttaaaagggcaaagaaggtgttgaaactgccactgtcaataccagagcatctgcttgaaaccaatgtttcttttgtgactccaggatccatgctgcctggctaagaagggcagtgtcctccttgcccaggtgttaaaccacaacagacctagaaaactgagatgtcactcctcccctggagtgacagcagtgttaggaagtttggaatctgccaacccacctcatcctgtccatgaagttgtcacttggctaggtgttgatgtaaatgtgctacagaaacaaactcacctcttgtgggacatggtgactctggttagtaacaatgtattcttcaaaattgccaagacagtagattttaaatgttcttcgtatgcaaacttggtaagtatgtggggtaatgcataggttaactagcttgaattaaccattccgcagtgtgtatgtatttcgaaataacatgtacatgacaaacagatacaattttcatcaattaaaataaacatttagaaaaataacataaatcctcacaatagccctttgaggtaggtgctgtcattttataggtggggaaactgaggttcaaggaggttaaataacttgcccagggtcacagaactacttagtaagtggctgagccaggacttgaacaagcagtccggttgtagacacccggagtggaaccatcacgctgtggtgtgtccgggagtgcttcaagcaggggttggttgggggtggggttggggtggggaaggcacagctgaggcctgagtggccagactgtaaaagccaaaggaagaagtggctggatgtgaacagctttgtggacctcatcaaggagctgggactatattgtttgaggcaccttgagaaacctgttgagatctgggcttttcttattagtaagtatgttgcccagactggtctcgaacccctggcctcaggtaatcctcccatctcagccttctgagtcgctgggattacaggtgcaagtcgttgggcccggcaatctgggcttttctaaagctcaccatgcagctttggggagattggatttgagttggacaaccctaggcagttgcagagctgtccaggcagaaatggtgatgacggtgaaaatgagccaggggataaggcaggaggtatttaggaggcagattccattggatttggtcactgattgattaggtacaaaaaaagggaggtgtctagaataatccctaggtttcttcagaggactaggtagatgggaggaggggaagaagcctatctctattaaatacttagtacagtggctctaaactggggcctgtcttgcacccttccttctcccctaggggacatttggcaatgcctggagacttttttttgagacggagttttgctcttgttgcgcaggctggagtgcaatggcgtgatctcagctcactacaacctccgcctcctgggttcaagcgattctcctgcctcagcctcacgagtagctggggttacaggtgcctgccaccacacccagctaattgttgtattttttagtagaaatggggtttcaccatgttggtcaggctggtctcaaactcctgacctcaagtgatgtaccggtctcggcctcccaaagtgctgggattacaggcgtgagccactgtgcccggccgcctggagacatttttgattgtcacagcttaggagatgcctctgacatctagaaggtggaggccagagatgcagcagaacatcttacacggcacagtacagctcccacaacgatcatctcgccccaaatgctgccgaggttgagaaaccctgctgtagtgtagtatcagttttacgtggttatctaattggatccgtgagccagtcatgttagatcataaatatgatttttcctgtttttcagataaaaaactgaggcatagacaggatgggtcacttggccaaagctctgcagctagtaagtgttagagccagaatttgaacgcaagtcttccagatgtcagaatctactccttctgcttaccctgctgcttcatatctcacagtgatgccaaggaagatgcacattggactgtgggttgttttttttttttttctttctgtcatggtggctccagactagaggaggcaggaaggaaggtggttatttatagtcagctgtgcataggatcgatttttttcaatcctgaaggacttgcagcaggtagttcaaagaaacctcctttagacgttgactttcccttgcagttgtaaatatgggaacatttaccatcttttgctttaaaatatactgttataattaaggtaaaatgtaaaacttataacttaaaaactttactccctgtgcatatgaactatggcaagcttctcaaattaattactatccctttgggataaattaaaatattttgatttgctagaggtaaggagcccttttgagaattagtttgttttagttgagaatgattagagggctagaatgatatatagctctaaataggaaggtttctgattcttttggctactctccacttttactggttattttccagttctgggaagattctgcatgtatgtagcagcctcccttggctatccatggtattagagctctagggacagagttctcctagttgaactcttcataatatctcattattggtattttcaaagttatatgtgtattttaagatagtctttggatgatgttccaaagaaggctgctttgttgagattgagatagttgttttgcagttgtgatttctctttgtaaaaagaagtctttgtgtcggtcccaggtcttattttttgcttgatcacccagtacgtgggtgcacttgggctgttgggaccatctggtgagtgtgaggtctctgtacttcacctgtggagtctgttgtcctgaaaggtgccggctcaggtggtggtgctttgaggggagcttgtttgctgcaccttccagtctgctagaaaatagatgcttagaggggcatttcggggtggaatctgatcatggagtttggtgagcaaacagggcctcaagttttatgttgtgagaaataaatactgagtttatgttttaattatggcacagattaatacaaaatctggtgaaaaatggagaaaaggagagcttaaaacttagctgtttgttgctgtcatctaaatgtagttggtagccagcctagatgggaccacagcatggcactaaagcgcggctgctgcttttcagatcccatgttcatattcgcatgtgtggagcatgaaagtaccaatagaaaattttgacaaagaaattgaagggttgggccagggacggtggctcacgcctataatcccagcactttgagaggctgaggcaggcagatcacgaggtcaggaaattgagaccatcttggctaacacggtgaaaccccgtctctgctaaaaatataaaaaattagccgggccttgtgacaggcgcctgtagtcccagctactcgggagtctgaggcaggaaaatggcatgaacccgggaggcagagcttgcagttagccgagattgtgccactgcactccagcctgggcgacagagcgaaactccatctcaaaaaaaaaaaaaaaaagaaatcgaagggtcgataatttcatttatttgttcttttttttttttttttttttttttgagacagtatctcactctgttgcccaggctggagtgcagtggcgttatcacggttcactgtagccttgacctccgaagtccacacgatcctcctaccacagcctcccaagcagctgggactacaggcactcgccaccatgcctggctaattttttatttttatttttattttttgtagagacaagttcgtgctgtgttgcccaggctggtctcgaactcctgggctcaggcagtcatcctgcctcagcttcccaaattgctggatttattgtcatgagccaccacacctggccagggtcagtaagttaaaagataccttctaaactcagcccaatattgaagagtaaacataaaaatacatgttttgtctattatactattactgttactcaatgcttaactaattgtgcttatgtttttttctttgccaaaatttctcttcaaggagcaagtttttctaatattgcttttcttgggaagaacaattagtcacgagatagtacagcttttttttttttttgagacagattctcactctgtcatccaggctggagtgcagtggtgcgatctcggctcactgtaacctccacctgccgggttcaagtgattctcctgcctcagcctcccgagtagctgggactacaggcactcgccaccatgcccggctaatttttgtattttttgtagagacggggtttcaccatattgtctcgaactcctgaccttgtgatccacccgcctcggcctcccaaagtgctgggattacaggcgtgagccactgtgcccagccgtagtgcagtatttttaagcttcggtaaggtagaacccctttagagaaaaaacatcagtgagaagccatgttgccttatttttactataatgtttctttttttttttttttttttttttttttttttttgagacggagtcttgttctgttgcccaggctggagtgcagtggcgtgatctcggctcactgcaagctccgccttccgggttcatgccattctcctgcctcagcctctcaagtagctgggactacaggcacccgccaccacgcccggctaactttttatatttttagtagagacggggtttcaccgtgttagccaggatggtcttgatctcctgacttcgtgatctgcccgtctcggcttcccaaagtgctgggattacaggcgtgagccaccgcgcctgacccaatgtttcttaaaatacatccaaacataaaaagaacaaggatgtttatagctggtatatcaccatagccatcactataacaccgtaacaaacatgcaaatttgttacaaatctaattctcaaatgaataccattcaaattaatagcatgattttaatgtgacaggtgatgctattttattaaaactctatcatctgtgctcaggaagtcatggctgctagggtaagttttcctttcctaaccaattatgtgccagttggtggtaacataacaccgttttcctttgtttcctttattcaaacttctcttgtactatgtactagagcatgaaaacgtctttgacctacagttatgttagctggagacacagcagaactactgttgtcatcttgatcctgaatacaagggccgattgaagccccagaaatcatggggaagtactcgtttacataaagtggtcatgtagataatctaaaatatgcccgttagtgtattaagatcataactgcctaaagcttcctgtgccaggagtggtcttagctctcaaagaagtcatagtctggccaggcgtgatgactcatccctctcatctcagcactttgggaggcgaaaggattgcgtgaggccaggagtttgagaccagcccgggcaacatagcttgatcccgtttcttaaaaaatggaagtgatatccaggtggggaaaccttcctgctgtagtggagcctcttgagatggcacacgtattttgctcacaggtgctatcaatatatagctctggttcttcagaatataaataactatcacctgaccccaataccttatctatattgagattgttcattagatccaaaacatcttgtgcatttcttgctttttagtcatgcacagaccttgtctttactttcaaagacagtttggtactgaaaattgctctggtaaattaacacaatttatttaatccctgctctttccaatctttagcaacgtttttttcattgtcaccatcagatgaccttgctgagcttccaagtggcaattgcttttgttgtattgtttaaaggcaaacaaaaatcaattattattggctctagagtgcctggcgaggtggagctcagttctttgtgcattgcgcactatgctgctggtgtctcagctgccatgcttatggttgcattactttcctgtctagctttggtattcttgcctttaaaaatttctttttccatttgcttttcttagccagtgatgacagtaaaataaggaacgacctatttattgttttaagagatacgctggatggtgcccaggcagatgagcattgccattcaaggtggcttcttggtagactgcatttactcttaatcgggtgcctgtgggtcagtgcatttcttggtcatccttactctgtcaaagctgccttgttagccaggttactagccatactagtctcattaccttacgataacacctcattcaaatggccttaacgaagttgaacacttatcttagtcactatggttggctttgaaccttttctagaagttaagtttattccctgggaaaaaacgtgtttgccaccacacagagtgctgggtgtactgggaacccggcttcaaaggcaactactccagtagggaaggttgaggagggtattgaatgatagctcactgcttaaataagtgtttagagtcccaaggtatatgtaatggcatatgaaatgcctagtgtttaaagaatattcagaaataatcagtcatactctttaatattcatatctcatagagttagcatcaggaaggaaacttggtagattaaataaaatagcagaaattactgctggatttttgtacagtagaaatgtatgcacatttttctcccctagtagtcacttaagttgcatatccatttcctgttacatctcatgacatgttttgggtaaaccgtttttggaagcgtccatttgtgtagaagttaggtggttctgagtttaactttgtacacatttctaggcacaaggaaattaaataactggctgagtgagagtgatctcgttgaatgctgaggcttgtttgggaattgggtttattttggtgaaatgtaaatttagatccactctgtattagtttttttttttttttttttttttaacggagtctctctctttcacccaggctgaagtgcagtggcatgatctcagcttactgccaccatgccaggctaacttttgtatttttagtagagacggggtttcaaccatgttggccaggctggtcttgaacgcctgacctcgtgttccactcaccttggcctcccaaactgctaggattacaagcatgagccatcgcgcccggccaagtccgtttttacactcctataacgacatacatgagactgcgtaatttataaagaaaagaggtttaattggctcacgattctgcaggttgtacaggcttctgcttctggggaggcctcaggaaacttacagtcataagggaaggtgaagaggaagcaagcatgtcttacatggaagaatcaggaggaagaggggtggggtgccacatatttttaaataaccaagcacagactcactatcacgagagcaacactgaggggcaaaatccactcccatcatctcatctccttgtaccaggcccctcctacaacactggggattgcaattccacatgagatttgagttgggacacaaatctaaaccatataaccctcatacacatgtattgtaattcagaatttgtcattttaaaaaaaaatttttaagattagcttatcaatttaaatgtttccagccctgaactctcaaagtcaactttaatgagttttgatttttgccgagaaagatcaacagcagaagaaagagaagtataacaaaacttagctccacaggagcaaactggagaattggagtactggtttatgattttggtcagttaagcagaatgcagtcctagtttaaacaagactggataaaagtccaaattcaaataccattcttacaagtgtttgaatttaattttgtcagtgtacatacatatatctagtaccatagtgatctcaggctttgaagaatgaaaagcaaaagaaatgatttagagtcctggtccaaccactcagctatctgatatccttttgctattttcgtttaaggggttatcagggaatgagctaatttgacattttctgcttaaagcaatggttggggctgggttggggtggagagagctgctctgaggaggtggtgtggggggcctgcgaggacacacttgggttacctggtacatctgcagttcccatggaattgggtctcaaaactgagaaatggaagtgtgagctaggaagaggagtagcttaatggggactttgccacacttttagtgctcctgtagctgcacacatgttgttctttgtaatgtatgatttgtgtcccagtggaacacttgaggagtgggagctggagaaaggaatgttgtacagtgttgtgcagatgtgggtgagatgaggtgatctgggaagctggcagtcttagttggcccaggaatgccaggacctgagatgacagctgctggtggcagcggggaatgcaggtgtatctgtgtcgaggttgggaattggactttgaagggctgggacttccagaaggtaaaatgggattgcactgtttgggagaaggggtacagatttttttgtttgcttttgagataaggtctccctctgtcacccaggctggagtgcagctgtgtgatcatagctcattgcagcctcaacctcctaggctcaagcaatcctccttcctcagcctcctgagtagctgggactacagacatgtgccactacacccagtgaatttttttttcttaaagatgaggtattgctatgttgcccagactgatcttgaactcctagaattctttttttttttttttttgttttgttttgagacggagtctcgctctgttgcccaggctggagtgcagtggcatgatcttggctcattgcaaactccgcctcccaggttcaccccattctcctgcctcagcctcctgagcagctgagactacaggcgcctgccaccacgcctgactaattttttgtatttttagtagagacggggtttcaccatgttagccaggatggtcttgatctcctgaccttgtgatccacctgcctcggcctcccaaagtgctgggattacaggcatgagccaccgctcacagccgaactcctagaattcttaaacattaaggacagaaacatctctgttcttaatcatgatttgcttttagtctcagcagatggaaaaatgatttacttgcaaagtgagagagctagatgaggaaggaaagaatatgattttgtaccactcagagaaaaatgtgagcatttctctactgtcttgggttggttattttccgttgattcaaaattgctctgcaggagacataggagaggcttgagagatgtcagtgggtggccatggctcagccttgatcctgagtgggtgggaatactctgttaatggggcaaagtggaccctccaggtccttcatgctccttttggaaagaagcgttcctggccagacacagtggcttacgcctgtaatcccagcactttgggaggctgaggcaggcagatcatttgaggtcaggagttcaagatcagcctggccaacatggcaaaaccccgtctctactaaaaatataaaaattagctgggtgtgatgatgtgcacctgtagtcccagctacttcagagctgaggcacaagaatcgcttgaacctgggaggtggaggttgcagtgagccaagatcgtacccctgtgctccagcctgtgtgatagagtgagaatctgtctccaaaaaaaaaaaaaaaaaaaaaaataggaaagaaaatatatgttcccctgtggttccctgttataccctcttctcttgaatagtttatcagaagggacaaccagctcctcatgcccttcctcagcaagtgtcaacagtgtgggagtgcagttgataaagcttgattttcacaactctgcaagtagctgagctccaccagtgttagaactgaaattgaggttatctcaccaggaaccaactttcagatgttgaagccagtagaaatttagtaatgtgggaaactgataactaaaagtattccaggttctaattattttgtcagctcagttttaggaagcagtcctagggattcccctggaagaaagtttggctggatagagggcagtgattgtgaattttctagatcttttgtggactgcttctgttgttaaaaaagcagcagtctctcagcacacgaatgggaagtgttaatgctgtaactgagtaacactgatactgagtttaaaataatggtaaatatcccactgaaatttcacccccagtacagattagggccttggaatgctggatagtggattaaggacatctgaaaatctacttcataaaagcagtgagaacattggcaaaacctattaatttcaagtttttcagaaccatggaaattagttaaagatttctagcaatctgaggaatgattgttcaagaaaacactgggatctcagtaggaacagtgaaccttgtgttttaacctgctgcaatcccattcccggcccctgaccacctccttggtggccttgaaaaccagcagcctcacagccatggcagctgtgaaactcagaagtctgttaaaccactggaagggacagaacagaactggagctcttgaaggaccatcctcaaagaaatgtcacaattcgaccatttggcagcttgcttgaaagggcctttctgagggctttgtctttgtttcacccaacacaggtcagctcacattgtgcaaacagctctacctgctgagcatttgttgaaaacaatcggtggtagttgtttaatcacagctgtctgaggtggtgttgctaattgaggccaagtggctgaccaaaaaattttttatttttattttatttatttatttatttatttttttgagacagggtctctctctgtcacctagcctggagtgcagtggtgtaatcgtgactcactgcagcctcaacctcctgaatttaagtgattggtcctcccacctcagcttcccaagtaggtgggaacacagatatgtgccaccatgcccagctaatcttttaattttttttgtagagatggagtctccctatgttacccaggctcaaacagtttttttaaaatggagaagtaaatgttccttgacgacttcaaaaagctccaacatattcctgggaatctagaaggctctgagcattctgagaaggctctaccttctctgctgtggcgatcttgaggctttatgcaagcctcaaggaagactaaggtagaattataaaccattcagcagagtgttgaaggcatgccccaatacccacacccacacgccctctcacctacccacccacccacccttagtaaaggctggaaaatttattaattcaaggcatgtaaggaaatctctgtgtagttactagcgaaccactaaactaagagtcttcagtggccatacatggcaaacaaaaaacaaaacaaacagactttatagaattagttcctgaaaatcactaatcagatagcaacaaaacaaaccctgggatgggggaagaatttgatttttagaattgacacattgtattagataaaatttctagtctttgacaaaaattagaagctatctcaagaaacaggaagatatgtcccatatacaggttaaaaaaacacacacacacacacacctcggtttctgcctagtttctaggatagaaactgtccttgatgaagcgcagatgttgggcatacttaaaacttaagtcactatgaaagttatgttcaaataactataggaaagcatgtctaaagaatcacatgaaaatatgcttgtgaggttgaagccaggaggattgcttgagcccaggagtttgaggctgcagtgagccatggtcatgatcaggccactgtactccagtctgggtgacagagcaagactctgcctcttaaaaaaaatattgggtgaccaaacagagaatgggaataaagaagtagagattataaaaaaaagaaccaatagaaattctggagtcataaactctagtaactgaaatgaagaattcactggaggggcttagcaggtatgaactggcagaagaatcagtgaactggaagacaggtcatttgagatagttcagtctgaacagcaaaaataaaagaatagaaaaatgaacaaagccttagagacctgtgtaacatcatcaaccatacccataatgggagtcccagaagagggaagatgtaaagggaaaaagaaggtatactgtgaatagttgtgtgtttgttctcatgccgctaataaagacatacctgggactgagtaatttataaaggaaagaggtttaattgacttacagttccacatggctggggaggcctcacaatcatggcagaaggcgaatgaggtgcaaagtcatgtcttacatggcaccaggcaagaataggagttgtgccggggaactcccatttataaaaccatcagatctcatgagacttattcagtaccatgagaacagtatgggagaaacttcccttatgattcagttatctccaccttatcctgcccttgacatgtggggattacaattcaaggtgagatttgggtggggacacagagccaaaccatatcaagttgtatgccaacaaattaggtaacctaaatggaatttatacaaattcatgtagatgcaaatggccataactgactaaagaatttgaaaatctgaataggccaataacaggtaaagagattgaaatagcaatcaggaaaccttccaccaaaaaatactgggtcacatggtttactgggtaaattcactgggtgaattctaccgagtattattataaactctttcaaaattttataattaacctgataccaaactaaagacatcacaagaaaactatggaacaatatcccttataaatacagaggccaaaatcctcagtgcaatgctagctttcctcccattctcactacttgtattctgtcataaaaaaaggattgtacaccgtgacaaagtggaatttatcccaggaacaaaaacttggttcaccataccaaaaccactcaatgtaatctgtcatgttaatagaataaaagacaaaaaccacatgatcatctcagtaaatgcaggaaaatcatttgataatattcagtactttttcttgatgaaaactatcaactagtaatagaaggaaaattctacaatttgataaagactgtctatgaaaaactcacagttaacatcatacttcatggtgagaaattgcatgctttctcctaagattatgagtgagacaaggatagtcattctcaccacttctatgtagcattgtactggagattctatctaggacaattagtaaaaataaaatagtaatataaataaaagcattgagattgtaatggagattggaatagaactataactagaaaagtatctgtagttacagttgacatgatcttgtatatagaaaatcctaaggcgcgcgcgcgcgcgcacacacacacacacacacacacacacacacacaaatcttgaactaataattgagtttacaagcttgtacatacaagaacattgaagcatccagaaatgaaattaataaaacaattccatgatacagtagtatcaaaaagaataaaatacttgggaataagtttaataagtttatgatttgtacacaaactataaaacattcttgaaggaaagtaaagaagacctaaaaaacaaaagaaaggacattccatgttcacggattagaagacttacattgttaatacggccaatactccccagattgagctgcagatggagtgcaatacctacaaaatcccagctggcttttttttttctcagaaattaacaagtttattttaaaaatcacatggaaatgtaagggacccagaataaccaaaacaaccttgaaaaagaacaaagctggaagactcacacttctcaatttcaaagctttgctacaaatctacagttatcaagacagtgtggtactactgtgtggacagccatagagatccatggaattgaattgagagtccagaaatagacccttaactttacagtcagttgtgtttttgacaggggtgttaggacatgaatggataaagaagatgtggtatatccatacaatgggatattattcagccattaaaccactaagctcagataaatgcatggatgaaccttgaaaacgtatggtaggtgaaagaagtcagacacaaaaggccacacgtttatttgaaaattctggaataagcaaattcagagacaagaaatagatgagtgttaatatgtgctggaggctggtgggaggggagaatagggtgtgatggtagtgggtatagagtttcctttgggatgatgaaattttctgtgattagctaatggtgatagatgcatagttttggagacacattaaaatcaatgaattatacatttgagaggggcagactttatggtatatgaaatctcaataaaacgtatttaaaaacaatatacagttaagagcgcatccagatacacctaaggtattagtaaagcggtgcattaagctgaaatatctggcttgtgcaaacttggggcatttgtaccttatgtagaattccaaaatctgcttaggattttccctgtccactggactgccactggcagggtctgcttccctgttcctgggttgagggagcagcattggagcatccctcaattcctgaatgaggaagttagttaaaagggcaatgtgagctgtagggccacactcatctaacaggtgagcttaagtttccattgatggcagacctatcagatgtttcctcccattctcactacttgtattctgtcattttgctcttatcctcccaaaatcatgctaagattttttttttttttttaagacagagtctcactctgtcccaggttggagtgcagtgatgccatctcggctcactgcaacctctgcctcccgggttcaagcaattctcctgcctcagcttcctgagtagctgggattacagttgcgtgccaccatgcctggctaattttttgtattttttttttttttttttttaatagagttggggtttcaccatgtgagccaggatagtctccatctcctgaccttgtgatccgctcacctcggcctcccaaagtgctgggattacaggcgtgaggcagtgtgtctggccactaagaatttttaaaataagtgacacaatgaagaacaaggccatagagatgatcttgggtaatttgagggtatcaaaaagtatctgcctgatggatggcttgagacactaaaaatgagtaaatgattacaaagtaaggaatgataatttgttttgaagaataaaacagattcttgtctctggtggttgagggatacgactgatgctgtatattaagacaagaagatgaagcccaaatggcagggaaattgaagagaagatacaggggtatctaggcacagggttggctgtgaaagtttcaatatgtaaaagatgataggctgaaaggaagaggatggtggaaaatacaaaagaggcattgataattcaggagtgtggagtgtgagagaagcttctccataggtgaagagttggatggacagtggttgttaggtcaaaataacaataataataacctagcacatatgtcagatatctgtttgggttcatcttacgcaccattctcttgggagggagcatgctttgaacagatccaatttatgatggagttttaggaccagaaagcgtcgtagtagcagagacttctcgtcctagagagcaaaggggaagtcattttttagttagttagtttgtgttttagacagtcttgctctgtcgccttcgcctcctggatgttcaaacagttctcccgcctcagcctcctgagtagctgggattacaggcgcacaccaccatgcccgactactttttctacttttttagtaaagatggggtttctccatgttgtccaggctggtctcgaactcctgaccttgtgatccaccctcctcagccccacaaagtactgggattacaggcgtgagccaccgcatccagccttagtttgtttctgagatagagttttgctcgtttcatcacccaagctggagtgcagtggtgtgatcatagctcactgcatcctcaaacttgtggggtcaagggatcccctcacttcagcatcccaaaatgctgggattacaggtgtgagccactgcatctagctgggaagtacttttaagagtatttttttcaggctgggtgtggcgcctcatgattgtaatccaagaggtttggaaggctgaggcgggagggtcacttgagaaaaggagttcgagaccagcctgggctaacatagcaagacccccatccctacaaaattttttttttaaattagctggtggtggtggtgtgcactggtagtcccagctactcgggagtgaggcaggaagattgcttgaatccaggaaattgaggctgcagtgaaccatgattgcaccacggcactccagcgtgagtgacagggcgagacccctccagatgatagctggagatcatgttattttcttactgattttcccccggtttagcaatacaaagtgatcgttaggttggcacaaagcacgatggaaaataaccattgttggcatcaagagaaatctcacaccacttgataaatatagtgaactagattactaaagagtgatttccctggattgcttgaaccagggctcagtgaaaatgttgctgtttgctttttttgtggtcaggattttttgattaaatgagaagcctacaaatatgcaagctagaaggtgttgtattttgggattaagccagactgtagcaggatgttagtaatttgagttgcataaactaatctggggaggcagagtgagtagctgatgtcacatgaagagcaaacccttgattccattcgtaatacataatagaacaccttcgtttctaaaactgggtgcagtaaagcataaaaaaacctttagtagctgatgaaagattctgccccaggcttgagtctattaaccagaaaaactgaaacaaaattaggcaaggtggtaagttttgctttcttttagtggaatattaggatatacagcaaatggtagcaggaccacgttgggaaaagggccaaaagactttttaaaaatcctgtttgaggtttggatccattttctttcatttttggacatacctttgagtagtgggtaaactgagagctcagtgaggtgagcctgtgtctttcagcgggcgggcgggctggagttggaactcctgtttcagtggttttcagatcctgctgatctccagaatggctccagttcccccacccctaatgctttattatgaaaaatttcaagcctgcagaaaaggtaaagaatgtacagtgagcacccatataccaaccacatggattctgcaatgaacattttaatatacctgcttttttttttttttttttgagatggagtcttgctgtgtcacccaggctggagtgcagtggtatgatctcagctcactgcaaccactgcctcctggattcaagcaattcttctgcctcagccttctgagtagctgggactacaggtgcgcgccactatacccggctaattttttgtatttttagtagagatggggttttgctaacaggccagtctggtcttgaactcctgacctcaggtaatctgcccgcctcagcctcccaaagtgctgggattacaggcgtgagccaccatacccagcctcataacggctttttttttttttttttttttttttttttttgagacagggtcccactttgtcactcagtttggagtgcagtggtgtgatctctgcagccttgacctcctggactcaagtgatcctctggcctcagcttcctgagtagctggagctacaggcatgtactaccatgcccagctaatttttgtattttttatagagataggcttttgccatgttgcccaggctggcctggaattcctgagttcaagcaatctacccacctcggcctcccaaagtactggaatctctttttttggaatacgtttcaaagcatgtgatagacatcggtacagtacagtcctaaacactgagtgtgcacgtcgttaactacagtttaatatttgttttgtttctggatcttttccagggatttttttcaagattaaattccaagcgccatgatagtttctgagttagaaggatggggcaggcccaggaatcagtactttgaaaagctcccaagtgcttcttgtgatgcatcgggtttgggatcttctgccccagggagcgcttcccgattacttcatagctaatcctcacctaaaatgcagaggtgggcagttatctttaacctgaccatagagctccatttttggttttcttggaatcttttgtttaaaacagtggttctcaaccaggggcagttttgtgcctcgagagacattggacaatgtctgggatggtttggttatcacaccagggggcatctagtgatgagagatcagggatgctgccgagcatcctgtaatgcaccggacagccccacaggatggggagttatctggaccaaaatgccaatagtgctgaggctgagaaacgtatttttttttttttttttgcctaaaagaaaattgcttgctccagatgactccagacaaaccaaaataaaaataaaaagtaaaaactaaaatgacaacatgaaatgaatttttaagagccaaatgagacctttagagacaatctcatcactgcctacctggtttccgtcaaatacagatttatgctccagaaagtacctaatttattaaaataagctgatttctaaaagcttgttagatggtcagtaatctcaaactttgagtgaatttacttgaaaaggtaatgttgctggtggcctttagtttcttttaatatatcttaaatatgatatcaaagaaaaacagaacatgatgctttgggatgaatgtaatgaatgaaaagcaggattctttggcaggtaactgtgtcccaggccctgtcctgcagggtggcagggatgtgctgagctgggtgaggggggaccgctgagggcttctctcagtagttgctctgtgtagaattttctgagtgtcttgggagaatgggggcatttttcctgaaggtctcacttgactccacagtgaatggctttacctgtctcttgagtaagatgcatttctagtaatgctctgactacttagtccacgtttgactagtttttaggaaaacaatatgtacaatggaacagaaagcttacagaaataaagggcagttcttttcttgaggtgaaagtgatgtggggagccagtaggtgacaggatttgctctggcccctccgagggaggaggaagatgaaggtgaaacgtggtattggtcagtccgtttcctgcttggttgatttcagggacctgatgagacaatatggtggtgaaaacagactgctggattgcaatgggcggaactgggcttagtctctggataggtgtcagttcatttcacacctgtcattgagggaaaataatacctgtatggctgttggaagattaaatgagactatgaacgggagctgtgtggataaaatgtaccaggcactcccagtgccagaaggtgttcttgttagttctgggtgtggcgatgtgcgaagacacccgtgtctgcggggtgtgtgtgagctgcagataaccagcaggtcctgctgatgaggcaaccttcttgggagtcttggctcagttccggggtttaattacgatgtatccttgggcaagtggcttaatgtctctgattgtaatttccttcattttttcatatctaaaatgaaagaggtgcttggatattcctaagggttcatctttaggagtctgtacttctggtgtggagctttctggaaaaaggcttctgggaatctgaaatggcagtagtgatgggcgtggtaacagcagtgttcatacgcttcctcagtaattttatgtaacaaacactcacagtgtacttactgcccctgagatcttaaaaactctcactttcaactttcacgacaccctataacttaggtaactgctattatccctggtatacagatggggaaactgagcctcagagaggttggtgatttgccccaagtcatagctgggaagtggcagacctcgatgggatgcaggcaccctgccctctgggctccgatcacttggccacctccccgcatgcaccacatgggctgtggagttggaggcatttgtgggcttcaagaatgagagttggtggggagtatgtgtgaggaaccggaggggtcatttccctgggactgggattgtggaggttttgattttgcttttccctttttaaactgggtgaggtatgagcatgggaactctgtacggaatgtgtcattggagagggacagcagggacaatgaaggtagtccccagagaagtatgagaaactggcattcagtgctcatgcagaattctctttgttttaataataatacaaataataacattaatattatttttagaggcagagcctcactctgttgcccaggctggggggcagtggcacgatcatggctcactgtagccttgaactcctgggctcgagccatcctctcacctccctcagcctcctgagtagttgccatgcgtaacaccgtgccttgctaagttttaaattttttgtagagaccgggtctcactgtcttgcccaggctggtctcgaactcctggcctcaagcagtcctccaccacagcctcccagagtgctgggattaaaggtgtgagccactgcaccctgcctaggattctctgtagatggggagcccacctgggtgagatgccagacacctggctccggcatatgcacagcagtttcacacgagcgtctcttactcaggtttcagagttctggtaaaagatttaggtttgacatccaccctttgaggtttttggttctcacatgtttgataacctgaagcttgtgggtttgatatgggcagtaaagtgggattatttctgttagagatccttattccctagagactttctggtctggaaaggtgagaggctatatattcattagctggaaccaccatgtggatcatttgttggaagaactgttaggaagaagacagatattgctatagagagcagggccagatgagcgagaaggcaaatgtacttcattcctgtacctgcaggcttattagggacagatgccctcaggcggggatgtgtagcttcacttgactgctctaaataaggagcgagagggtggtgtgtgtgttaaccatcaagattaagcaagcaagaaaaagacaaaagaaagccatcatttagtaactggtggagtgagttggagcctgggagctgccccaggacaactgttatttcccttgatcttcctcaaaccctaccaggaagtgagggcaacagttccctaaagcagccccatcaagctcttaagaaagcagtttcactgggagtggggagaggtagaattgggaggtggtagagggctggggggtatgaaatgtgagggccggagtcctcagcatcggaactccagaaataaaaagttgtctgggtctttgaaagcctcctatatgataatgttacagtaacagtgttctctgctactttcaatgaataaaaaacctagggtttctcagctacagtgtgcattaagagacatttgtggtctagttttggcacttcatttctatttgggaacatgcattctgagttttagacaactagcttccaaatgaaattttggaacaccaccctttttttttttttttttttttgagatggagtcacgctctgtcgtctgggctggagtgcagtggcgcgatctcggctcactgcaagctctgcctcctgggttcacgccatgctcctgcctcagcctcccgtgtagctgggactacaggtgcctaccaccgcgcccggctaattttttatatttttagtagagacggggtttcaccgtgttagccaggaaggtctcgatctcctgacctcctgatccacccgccttggcctcccaaagtgctacgattacaggtgtgagccaccgcacccagctggaacaccacccattttttaaagcagagaatttattgttatttgcacaaaaggacgtttgaacactttaggaaatctggatgctggaattaactcggtcaaaacaaagcaaaacacacagaatctcgtatcttttcctgccctgatgctgaactgcagccttgatttatgttttgtttttccacttttgtttctgaacctatgtggtacaggctgaacccttgtccctgcttcggagcacttaccttaattattatagaaaaaaattaagagttggctgactctgtgctgaactttctggtttttttccaggcagtttctccataacaaatgcgttttgcatagaattgaaattgcctatttacctcaatgacaccatcctaatagttggtggtaactacctaatctaataatctctcattgtgtgtgatagggctatttattgtattttagagtgaaataatgcattttgtttgcattttaaaaaggaatggtacaggaaatgattgtaatccaggactaaatatacagtttgcagtctttttattctaattgctttctgatgaatatatatatatatatatatatatttttttttttttttttttcttgagatggagtcttgctcttgtcgcccagactggagtgcaatggcatgatctcagctcacttcaacccctgcctcccgggttcaagcaattctcctgcctcagcctcccaagtagctgggattacaggagcctgccacaacgcccggctaatttttgtatttttagtagagacggggtttcaccatgttggccaggctgggctcgaacttctgacctcgtgatccacccgcctctgcctcccaaagtgctgggattacaggccttctaataaatattattttacacatcgagatagtactgtttatgcattttgtatgctgcctcttaaatctataagcattttcttttcttaaaaaaaagctttgggctgggtgcattggctcatgcctgtaatcccagcactttggggggctgaggcaggtggatcacctgcggtcaggagttcaagaccagcccggccaacatggtgaaaccccgtctctgctaagaacacaaaaattagtcgggcatggtggtgcatacatgtagtcccatctacttgagcgtctgaggcaggagaattgcttgaacctgggaagcggaggttgcagtgagtggaggttgcagtgagctgagatcacaccactgcactctggcctgggtgacaagagcaagactccatctcaaaaaaaaaaaaaaaaagctttgataaatattgtacatgattgcaaagcgtcccatcgtgtggatgttcacttagttatttgatacatatttttgtgttcttgggctgtttctaatatttctgtattacaaataaggtgatgggaagcagtttcattcatcaatcattctttttaaatgtcccttcctatcagtttctgttaatcagtcaaaagcgtatacattcttagcaggaacttaaattcttagtaggaatcttaacaggttaagatttctaagggtagagagggtacctgttttgttaaccggtggcttaataccatttaataccagtaaaggctcaataaatgtttattgactgaatgaacagaaaagatcagtgatcatgaagaatggcccagttagtggtatatatacgagaagtgctgcagtggttcacagtaacatgataataactaattgtgtaatgatttggcacgaggtactgatctaaatgatttatacattgttgcatgggattttggaaggggagggagtatacctctaaattagttcatgctatgggatggaagtaagactttaaatttaggtgggctcaaaaaacagaaacaaaccaggggccgggtgcggtggctcacgcctgtaatcccagcactttgggagtctgaagcgggtggatcacgaggtcaggagatcgagaccatcctggctaacacagtgaaaccctgtctctactaaaaatacaaaaaaattagccgggcgtggtggcgggtgcctgtagttccagctactcaggaggctgaggcaggagaatggcatgaactcgggaggcagagcttgcagtcagcagaggttgcaccactgcactccagcctgggcgacagagcgagactccatctcaaaaaacaaaaaaaacaaaacaacaacaacagaaaaaaatcaaatgttcgtcagctgatgagtggataaacaaaatgtggtatatccatacaatgaatgctatgctatgctgccataaaatggagtgaaacattcatacatgttgcaatatggatgaacctgccactcaagtagctggtactacaggcatgttccaccatgcctggctaatttttgtattcttagtagagacagggtttcaccatgttggccggcctggtcttgaactcctgacctcaggtgatccacctgcctcagcccctcaaagtgctgggattacaggcgtgagccagtgcgcccggcccaaagcttttttttaagaaaagaaaatgcttatagatttaagaggcagcatacaaaatgcataaacctggaaaacattatgggaactgaacgaatccaggcacaaaagaccacatattgtgtgattccacatattccacatattgtgtgattatatggaatgtttggaacaggcaaatccacagagacggaaagtagattagtggtggcatagggctggaagaggaaggaaacaaggactaactgctaatgggtacaggattttttttcctcaagtgatgaaatattcttagattatgaggatgcttgtacgactctgtggatatactcaaaacgatttaattgtatactctaaatgggtaaattgtgtataaattatgtctaaataaaaccatgaaaaattggatgaggtttagcattgtagaaggaaagatgggggtggtggtgtgttagtttttgagggctgccatagcaaaacaccacacactgggtggcttaaacagtaaccatttattttctcacagttctggaggctagaagtccaaaatcaagatgtcagcaggtttggttttccctgaagcctctctccttggcttgcagatggccacctggccaccttctcactatatcttgtggggtttttgtgtgtgtgtgtgtgtgtgtgtgtgtgtgtgtgtgtgtttgagacagggtcttcctctgtcacctaggctggaatgcagtggtatgatcatggctcattgcagcctcaacttcctgggctcaagagatcctcccaccccagcctccagagtagctgggactacaggtgtgtgccgcaatgcccagctaagtttcgtaattttggtagagactgggtcttcctatgttgcccagcctggtcttgaattcctgggctcaagtgatcctcccacctcagccccccaacatgctaggattgcaggtgtgagccactgcgcccagcctggtcttgtctttgggcacaaatatccgctagtgtctcattgcgtgtccacatttcctcatcagctctactggattagagcccagcgtaatggcctcattttaacttaatcacttctttaaagtcccagtctccaaatacagtcccattctgaggtagtgaaggttaaggctccaatgtgaattctgggggaacatggttcaacccaatgagaacaatggttatctgttgggagtgaggactgatatgagtggagatgcatcggtaaagatgcgcggaccacagatgtgacgcagcaggtgtgcacagaggtatgggatggggtcagtgtggagggccgtgtgccaggcagcagtgtggacttggtcctctacccagcgtaggggggtcattctgggggctgaaccgagggtgacactgtaaaaccatgcttcaggaaaattcatctctgcgccctggaggatggactgaggagggaagaggctgagggaaatgagtgtgcaagataatgaggcgatcccaagggaagtaaaaggattggaggccttgcaaaagcaaagcgaacccaagcttcagaacggaggcatctgagatgatgtcacagttttgaaccttatttatagaagaaagagggtgaaatggggaattaggtaaatgaaaatataggtcccattgttggtaagatacatggagtgtcattgattcagtatttagtgtgcttttccttattttaaacagctttcatagctcacttccaaactgtatttttgcaaccaactctttttctctctctattaaaaggagaatcttttattttacactaattaacagctgattctcctaagagagttttcaggaacctaaacctcagagttagatggagacaagtgtctttgttaatcatttatgtgaggtcagattgtacaatttgtaacagattttacagctggttcctttattaagggatgggtaggattcctactaattattattttgagttttactttgtttttaaccattgaaacttgggggatgtactctttggtttgggtagattttgcttatagatattgaagtttgagttgttgaatttcatacatattttattttgacttttaatcctttaaaacatttgactctgactccattgagctctgtagaacatctgtcatccagatcttttgccagaatatagagccttgattggacaccttgccagctaatttaaagcttcccaagatgcagaatactgtgtaaaatgtcctacctgttgtgtcagaagggagaaaataagacgagattttcatatttgcttgtagatccataagaaacttgggaagaattcctaagaaactagcagtagtggttccctgcagggtgggggctctggatgtgggtgtggcaggggatgggagagactggcaggttgaggagcagggtgagagggatgtttttatgatgtacattctcatatatttattttgaactatttgaatgtattactcatgtaggaagacaaacctttactttccaaaaatattagggaaaaactttcaagtctctcatttttagcctttttgttgttctgatatttccacacaggacagacggtaacatgcccgatacattttaagtacaaacaaggctgtaagttgccttacttgactttcttcactattttctattcaaaaaagtatttttgaatccaagggaattagaggaataatcttgaaatgattatgttttgggggaaaagtatattattaatatgatagttatctaatgttgtgtaacaaattgcctccaaatttagcatatgaaaacaataagcattcattgtgtcacacattcattctttcttttcagtgaaagttaacctgtttccatctgaatagatttctcactctgtatcctgccagtaatcattttgtactgtttctgtgcctttcaatccaagagtccaacctgatgaggttctgctggtgtaattcttttaaaagcattgtggatgtcctgtgaatctcactggagttcactttttaaacattagacttctgtggagactgctgaaggacaacacccttacttcttagggcctttggtttgccagaattgttctctgagccattgccttggattttttcctgacttcttaacaaaggattttataggtgggaccttcaacactctggaaattgccttagctacattcagccatctccttaggtacattttccatctcccacattgtagcaggcaatggcgttgctaaactttccatcaggaaataacaaagatctccttttccagtttccagtaacattttcctctctacaccatcatccacagtctcctgaaaggccctccaggttctagcttttccagggctcttcaggggttttcgaactctctttttacagtctttccagttcctgcccattgccacgttccaaagtcactcacacattttaggaatttttctttttttctttttagcaagcataccaattccagttaccagaatctgttagtttttgttatgtgttgccgcagtacagattgcctcaaagcttagtggctgaaaacaaggaacattactggccaggcacagtggctcatgcctgtaatcccagcactttgagaggccgaggcgggcggatcacctgaggttgggagtttgagaccatcctgaccaacatggagaaaccccatctctactaaaaatacaaaattagctgggtgtggtggtgcatgcctgtaatcccagctactcgggaggctgaggcaggagaatctcttgaacctgggaggcggaggttacggtgagctgagatcgcaccattgcactccagcctggacagcaagagtgaaactccatctcaaaacaaacaaaccaaacaaaaatgaacatttactgccatacacacttcctgggggtcagggatcccagagtgtctccgctgtgtcagtatgtctcagggtttcctgaggctgcagtcattatgcccgctagggcttgggtgggactgaagcacctgcttccaagttgcctcactcacatacctggcaagttggtgccgttgctggcaggaagcctgcttttcttgccaggtggacttctctgaggggtgcgtgaatgccttcactacagggcagctgacttccctcaggacacatgattcaggagaccaggggaaagctgcagtgtcattttatcacataatcccagaagtaacactctgtcatttctgcaatatcctgtgggttacacgtcagcattattcattgtgagaggtgactacatgagggtgagtccaggaggcaagaattattgggggctatcatggaggtttgataacataattggtaagaaattcagatacacctcagacttgattgtggcataccagtgtgttgtaaaacttgtgagaatggcttgccttagaaagacaagtagtccatccagtgtcttattcttatgttaagttgggattgctattttgttacccttgggcctctatatacaaagcctctcatagtaatagatctaattgggttgaagtttagtattatgtatatgccctctgcttttattagtagattttactttcgtgaaaggaacatataaacttcattattgcatttttgtataaatgcagctggggacatggttttattacccaatgtccattttgtaaatatttagagaactttttttttgcatcataaatcagtataaatagaagcttggtttccattgttgccctggctatgaggaagctgagagtgaaatttgtcgttcaagtgtggcagttatgttactgactggcgtatttatattctcctttatttgatattttgctatgagatgttccagtttacttgtgggaaaaaaagccaggtgttcttgaactcaacaaatatttattgaattccacttgctggccagacagcattccatgtgccccagatatggcactggacagatagataaggtccccactcgcctacagcttccaacctggtcgtaagaaaataccttagcttttgctccataatgtggaagaattggcctcagagaaaacctaattcatatgtaccacgtttctacccattcaagttttatttcataatttttttttttttttttttttttttgagatggagtcttgctctgtcacccaggctggagtacagtggcacaatctcagttcagtgcaacctttgcctcctgggttcaagcgattctcctgcctcagcctcccgagtaggtgggattacaggtgcatgccaccatgcctgactaatcttttgtatttttagtagagatgggctttcaccatattggccagcctggtcttgaactcctgacctcaggtgatccacctgcctcagacttccaaagagctgggattacaggcgtgaaccacgatgcctggccgtatttcataattctatctttccatagaaagaattggctggggcacgtataactaatgtgagttactgatttcagaggaagcttttggaagtggttgataggcactgaatgggatggggtggtgagtggtttaaaataacacttgaacctttggattcaaatggttttaaatgcatctcagaaaagtgaaaggtgaatgggagagctacatccattgagagcaagggttcatcagctagggctgtggcttaaactaagcagatattctttcctggcagttctacaggccagaagcctaagatcaaggcgtcatgagggttggtttctctgaggctcccagacagtcatcttctccctgtgtcttcacggggtctttattctgtgtctgtgtccaaacttccttttccttttttttttttttttgagacagagtcttactctgtttcccaggctggagtgcagtggcactatctcagctcactgcaacctccatctcccaagctcaagtgactctcctgcctcagcctcctgagtagctgggattacaggtatgtgccaccacgcccggctaatttttgtaattttagtagagacggggtttcaccatgttggtcaggctggtctcgaactcctgacctcgtgatctgctcacctcgtcctcccaaagtgctgggattaccggcataagccaccatgcccagcccaaacttccttttcttagagggtgggctttatctgtggttcttagttagcctcaccttcattcttccttttggtgttacggtcttgcttactgctttgggaatggatttgttgaaactacatgtgactagtttagggacccagtaggaggttttactataagtgtaaattaacatgtgcctttgggggaccttaaaagtttttgtcattgggccatgagatctgagtgcagctggtagaacctccttgttttctttggtatgagaactcctgggcttttgttggttccttccgttttctccggtgtattaccatttcacatcacagtgatattatccagataacacccatgatttgtttttaacggagtttcactctgttgcccaggctggaatgcagcggtgcgatcttggctcactgcaaccttcacctcctggttcaagcgattctcctgcctcagcctcccaaatagctgggactgcaggtgtgcaccaccacgcctggctaatttttgtatttttagtagaggcggggattcgccatgttggccagactggacttgaattcctgacctcaattgatccacccaccttggcctcccaaagtgctgggattacaggcacgagccaatgcacctggccacacctgtgatttattttatttcatttgagatttcagactttgtcgcttgttctttctgtagaagttttttcatagaagtatgttgtttcaaaagcaaccttcaaatagtagacttagcttggatgagaatctaaaagtctttgagtccaacaaccaagcaggtcccctgtccaggaagtaccttatagctgatgtttgagtatccctgcagatgggaactcactacctcctgaagcaccttacttctacccttggaatagtaacagagattaaaatgtccttccttaatttgaggtgaaatctgccttcttgtccattttacacacactaaccttccttccaccatgcaagctgagagagagccaggttgagcctgtgtttccacaacaactcttctcagacctcctgctgccacctaccatgcacttgctcttcactggctaggttccagttgctctgtacctttcctaaagtgtggtgaccagaatttggcacagtgagggaaggttccagagccctttagtgttatcgggggcacagagcttgggctttggagtcgctcagatcttgagttgatatgcacttctttgtccttgagcaaatgattgaaccttcttggactctcagttcctcattaataaaatgaagatgaaacaagatgagatggactgtgcacatttcctgatgggggctggtatgtgctggtgcccagtgcaaagtggctgctggcagaatggtgagtcaccagtacctgctcccttcactgagtgcttcctgtgtgcctggcaccattgctcagggctttacatggacttactcatttcattttcactgcagcctagagcgtaagtaagtatttgctttatccccatcttatagatgaggcatttgattctcaaaaaggtttcatagcttgcccatgttctagcagctagtaaaaggagaagccagagttttcatttaggtgggagtcctcaacctgctttcttaactgctgtgatctgcactgtggcatgagagtttgtcttaatgtaaatgcacatgtaatagcattattcacattgcctgagactgtggaagctcctttggcaaccagatgccacaggggactcatttcatgcttttagaagacttgagccactacatgccctgggaactgtgttgcttccccactggccatcactcttgcttttgtaagggatgtcacattgagccattaagtgtcatctctggaactcatgactctgttattccacatattaggttttctttgtagctttgtgtcaactccaagccaggtaaataaatcttggaagaaccaagttacagatgtgagtaaaagaggggatggcagggggcagaagtcagggcaggccctgtgacttgccaccagcatcctcccttcgggggaggtcctttcatctgggtgctagctggaggaattggcaacgtcggagataaaggtgtagatgcaccagctgaacgtcttgctctgtttcccattttacgtataagatgggtgatggcatgctgcattcagatccccatgggtgtatttgggatttggggtgggggattgtgtgtagaaggcaggaaagattgcccagcaactctcatttgaattgagggtggaagcggttctcgggcacagtatgccaaggcccagggcgtccaagggacagagcagagatcacagatgctgaacgggtggggaaggagcactaggcagggcatttctgatgagactttgatttgggaggtacgaaagttgtatgaggaatcttgataaactgcttagagtgaatggagatgagtaggaatcaccaccattcacatactggctctgcaagccactcagcacagctctgcacctgctcttatggaggagaagacaagcagaagagaatgttctgatctagaagagttcgtgtaagagcatgaaggcaacagcacttgagatgtggtgcacatgagcaaaatttcagtttatgtggaatttaagattaacagattaaaaggtaaaattctctccctggtaccaaaaaaaaaaaaaaaatccatgtactccctctctctcttttttttttgtttttttttttggagatggagtctcgctctgtcccccaggctggagtgcagtggcatgatctcggctcactgcaagctccgcctcccaagttcacgccattctcctgcctcagccttccgagtagctgggactacaggtgcccgccaccacacctggctaatttttttttgtatttttagtagggacggagtattccctctcttgactgatgtttcagcagtatgtggacagattcttttttaaggtaaatgaccaggggcttgtaatatgagtgtcacttaggcaacaggacatttcaatgaaatggtgatggaaataggttctttttgtagattgtgagctcttgggagcatggattttgctaaatatactgatttttaaatttttttgacatctagcatggtgcatttcacataggagtttttcaagaagtactcatttcacaggcatcttgaatgatagatgtttggtaagaactgcgcaagacagtgtactaatcactcattctcattcagcctctcaagctatcatggttggttagtaataacatttcaaaattatatttgtcccttaggctagcagagaatactgtttaacaggtttttcttgaaaagtaggagtagcgagctagagttgtctctaggtggggtaaataaaacatctcccaccccacccaaattgaagctgaataccttcaattcactactgtgcgcatattcatgtttcatgctgagcagttcacttgagactttctcacggaaagaagtgcgatacagttggtggtagtcttatatttgctacgtgctcatgtgttgtctgatgatagaatgcagtggtcaaatattgcacaatttacgccagaggaggagaattcccatcaactctccaaccatcataaatactttattccacacaataaggaaattgaacttttcagaagaatgatatagaacatctaaaataggttaaacttggaggaattatactgtccattgtaaaattggagccactcttgaaaaattgctgcatgccccactgaatgctagagcaagacatgcagtcccagctccaggggcttccagagtgattgaggcagggctgtgggctgctttcctgaagcctgactcctttctttcctcattacactgccacagatggtggcagatacagcatggattggcataagtcactctctactacctgcagaataaaggcccaatttcctagtgcagcttgcaaagtccttctcatctgccaccttcctgcctttgtgatttctcctcctgggactcctgcacccccttttttttttttaatttttcttttcttttttttgagatagggtctccatctgttgcccaggctggagtgtggtggcgcgatcatagcttattgcaggcttgacctcctgggctcatatgatcctcttgccacagcctcccagatagctgggaccacaggcacatgccaccccgcctggctaattttttgtatttttttatagagacgggatttctccatgttgcccaggctggtctcgagctcccgggctcaagcgatctgcccgcctcagcctcctacagtgttgggattacagacgtgagccactgcacccagccactcctgcacccttaccttttcgccgccctggccggctggacgactgcacccatttcacccggcattcttgtgcctgactgtgctctggccatttcctgtgtctggaatacccccattctcccatgctcagccccgtggactgtgtttattcgtaatcacacctcagagcccttccccttctccatggactccacccctgctgtgtagatggccccaacatcattttgctgagtggagtgccactgcaaggcatggcatggaggagcctgactgcataggtggcggcaccttgagggccttacagacctggcagttgaaggtatgggctagaagacagatgattccaaattacggctaagaaataggtaggctgtaaggcttgattgccgtgaatgcctctagaaagagcacttaaaaaaaaaaaaaaaaaagaagggatttccctgttcatggcctatgagtttaaaaacaagcaccccatgtcattagccctttgctcaccacagagttgctgacacattagacgatctagatatgtgtctgagattttggatgcctattgattgtgtattcacttagactttggtgcttttctagatgtttcacaagttaagatgttgttaagaggttctcattgttttattcctatgttctttccttccactcccaactcactccgatgtcactcatctgggttcttctgctcctgcctgggctgcttagtatttattgagctacacactgtgcttggcacccagggccatggaggcaggcaaagaggggggacatttattcagcagcttcttactgagggtatgggtgccaggtgctcgctctgggaaggtgcaaatgaaatggatgatggctgagcctgaagaattcccagggtgaacagatggggggaagccagttcgggcagagggagtggcaaaagctgctgcttaaagtcgttgctcccaccgcgtggggagtaattggatctgtctgcagcactgaggcctggacaggaagatgggactggaatgcagaggggccttgcagggctcagtcggggccaaagggcagagaggcagggcacagagagaagctgtggccgccttggttggtcccatggaatcctcgcccattggggccatgggcattgatcgacactgtggagcttgaaatctcaccaggtggaaacatctctgccagccctgtaatcatttccatagtttcttctggttcttttcatgaacattttccaatatttttatttgagcattaataaaaggtttgcctatatacttaaatttctgccagaaagctttgacttccgtgatctagagcaagcttgtgcaaccacaagcaggtcacatgcagcccaagatggccttgaatgtgacccaacacaaattcgtaagcattcttaaaacattatgagccttttgtgtgatttttttttttttaaactcatcagctgtcattggtgttagtgtattttatgtgtggcccaagacaattcttcttcttccagtgtggcccagggaagccaaaagattggacacccctgatttagagttttaggacttaggttttgggaatgccaaatgtttacatggaaaggctcatccattaggatgagcatggttttcctcatgaactccttggtagaacctaatgttagtgtgtggctcttttcctttattattttcttctgtacagggtactttataaccaatagctgtttctgaaaatatgggaaaactatttttgaatattgaatcaattacattttcagggtagtttgataaaaggcattctgtggtcatctttatctaaaacgaatcctcctggccttagtgtgattattttattttatttattttattttattttattttattttattttattttattttattttattttattttattttattttatttatttgacagagtcttgctctgtcacccaggctggagcgcagtggcgcagtcttggctcgctgcaacctgcacctcccagattcaagcaattctcctgcctcagcctcccgagtagctgggattacaggcatgcaccacaatgcctggctaatttttgtatttttagtagagatggggttttgccatgttggccaggctgatcttgaccttagatgatccacccaccttagcctcccaaagtgctgggattacaggcatgagccaccccacctggccttagtgtgattttgtattttatgttgtgagttttgtttttaaaaaagaacatcagtaagttcagaaaccaactccatgcttatttgctgtaatgaatttttcccttacattggaaaaacacagttccatctgtcctgaaggcccataagtcacagaatgcggtgtgttggaatgtgaaatcctttcagccttgcagaatctttatcattgtgctaaattgccatgtggaagaatggcaggtggcagttagaacttagggctttctatttattctctttctattttgcattagtcagttaaggttctgatcttcagaactttgtatgaaagtcagtgcttcatacaatttcacatcaaactgtggcattgcaagaggcaaaccatttggaattcttccttaaattacaaaaagaaaaaaaaaagtgaatgcacgaagattgttttgttcgcaagacttatgacacagccctccagctctgtggcttttcattctgatgggaaggaaatgagaccattgtaaatgactgttcagaatattagtgccagctccatgccaagtgctgttaagaacatggagagagcattcgagtgtttgcctctgaatttttgcccaggccatagttcgcagttggccggcaggctgcaagggccattccaagtgggagaagcattccatccctgggacaagtaaacagaacctaaaacaaacacatgtttagttgaagtgatacagcaccaggcaaagtgttctacttttaatgagtgaaggacatcagaaacaaaggatcagagccccccacgttgcattctcaactaattatagcactaaggcaggaatccttggccctttatctggagtgagtcagagagtatatcatgccttatctaaagtctaaagttaattgagcccaaggcccttctgaatagacacacactgtaatcagatatacagatggagtgggaagaggtaaatggtttcagatgccagcctggtgtagttgcatgccggaggggacttaaaggaaacagtgagaagtattagaaaactgtagttgaccaggtatggtggcttatgcttataatcccagcactttgggagactcaggctggaggatcgcttgaacccaggagttcaagaccagcctggacaacatagctagaccccatctctacaaaaaataaaaaattagctggatgtggtagtgaacctatagtcccagcaacttgggaggcggatgtgggaggatcgcttgagcctgggaggtcaaggctacagtgagccatgatcacgccattgcactgcagcctgcgcgacagagtgagattctgtctcaaaatagcaacaaaaacaaaaaccaaaagtatagttgcagagaatggctttccctgcttagttttatccagatgactgttagaatagtggtgaagaatctgacaagtggcagaatgcagggccatgggaagggggagagttcatgcctaaggtcagctgagcagaggagacttggagaactgagaggggatccctctcctgtgtttgttgggagggacagagcctgttgcccagcctgcaggtgtgggagggaccctgcaagaagtccctttggtcaccctcttcaggccccacattgcctgatgaggttcagactcctaggcctatgaagggtaataaggcccgtctgttcctgcctttacttttcttctatcagtttctaagcactctcagcctccgggcctttgatcgtggagcgccatgatacagtggcgttgtcctgagtggttagaggtgtgaattctcgaggccgactgcctgggtttgaatccttgcttggccatcttccagctgtgtgaccactctatgcctcagtttcctcatccgtatgataggaatagtggcagtacctatttcatggtgttattgagctgtacagttgctagctgctgccatcatcattgtcatttcctcatttcttttagacccaaactctcacactttccggaattatttctggagccccccagaaggaattggtctcttttattctagattccctaagaggcacagagggatactagggtgagaagatagtggtggctcacagtcatcactctgtacttactagttttgaaaatgtatcaaattgctgacgtctctgagcaccagtttcccaatgtgttaaagaaggatggtgatacccaacccatgtcacagggtttcgtcagtaaatgctaaaccatgtggtaagcagatgttctcagtgagcaccaggtcactattattatgttacttgtcatgacgagttttacttgccaccttgtattatagttgtgatgactatcttttttctagctccacattgggacacatgaaattatagagttaaatgaactcatttgtagatacttgaaaattgtaataatctttgaatatctgtacctgtttgtgtccagattcttctggttattttgacttccttataccccagtgtccttttttttttggagacaagtttttttctcttgcacaggctgaagtgcagtggtgccgtcgtagctcactgcaaccctgaagtcctgggctcaagcaaatcccagtgccttataagcaggcttcctcaaggcctgttgtcttactcatctgtattttccttatagcatctaggtcagtgccttgcttataatgggcatttggcaaatgtttgttgaatgcatttatcattacttagtaataaatactaaactattttttaatgggaaaataggcaggtttgggttctcatgcacatgacccacatttgtcgaatgtctgctgtgtaccagccagcagctttcttcctttagtgctatttcctgttagagtgggatagtggtatttcagtccacctgatgaccatttaggccaatcacatgttaatgggaattgaatgcatgcattaaacacaacaccagcgggtgctgtccacattaaaaccaggaggtctgcttcattggttcttgactatattgaaagagttggaaatctgacctgggcatttgaggtagactctaaggggtgtaagacggccctttgttttagagacttaggattggtgtgagtgactggcagggactgctttagtgcccagacctttagtagcacagacacaatataggaaaactcttcaaggaaaaccagccccaaataagagagtaggtaatgttctgcttctcttgctttatattctgcttgctttacagaataatctgagatagctaataatcaaagtgcaggtcccccaaaatgaaagtgatcatcatagaaccagaaaagaagggataaaatactgatttcaaggactcctgaagccaatggcagctctgagtttcctggcagccaagacaaagacagaagcatgctgggatgatgcatcctcgggctcggtaaaggaagcacaggacctgcctgctgctgtgggctcagggaagtgagtactattttccctgtctggagtggggaggagcacttgtctgtggtagggtgaggaggaccacttccttgggctatcagtcattaaggccccttaacatcatggccgattctgaaattacctctgaaagttgagatttatgttagactgtagctctcaagccagttcccttagaggccagagtaatgacagtgtaatttacttgccacctgcttgagagagacaattggtggttaagggactttcccaaggtgataaattgttttagcaaacagatccagaggacagctcctttcccctggtctatgtatgccttttgaacgccaagaccttatcctaaactcaagtttcacgaataggattaaaataccctttggggacctttcttacattgagaacagaggctgggccacagcttggctaaagcattccagatctctcttctgagcaagagattttgacttgttcataaaccaggctctctctcatagtgggcaaggccttaaaaacaaacaaacctgcaaaacctgaggaaacatcttcctcctacgtacttagctgatgtaggcattaatggaaatggatattggagtgggaggctccttttagggggcagaaaagaaagaatgtttttatttttaattaaaaaaatattttcttttgagacagggtcttgctctgccatccaggctggagtgcagtggtgcgaatatggctcactgcagccttgacctccttgctcaagtgaccctctagccttggcctcccgagtagctgggatgacaggcgcacaccaccatgtctggctaatttttgtattttttgtagagatgaggtctcactggcttgcccaggctggtttcaaggtcctgggctcaagggatcctccctcctttgccttccaaagtgctgggattataggtgtgagccaccgtgcctggatgaaaaagaaataacttgattatgggttatggaagtttagcaatggcttcaaaaaatgtcagcagggaatggatgtctttttctatcagatgaaatttcagtagtcatctgatacagccaaccaggagaaggaaaactactaagtagaaagacttagataagtggagtcgaacatctctgggcttaaaaggagcatcactcctggcatattcagcgtggcccagctgtgtttctctgagggcgatgtcctcctcagggtctgtgaatggctgaactcagaacaaggcttttgcaatctgcgccttctgaatacagtttttgttctgttggtttaatttgcatttggtgtctggagtgcctggtcatggaaagagcccgttctttgttttgggtaatgagggctgaggtttccaataagtatttctcggttccgtccgtgtcgagtgtcatttgagtagcaagtgactgttgctcattgcactgggcctgcgagcctccatttgcacattagatttttgcataccctgcaattagtaaattacagaatgacatcatgaaatagaaaactgtattcccagatggaaatgctttccgtattctatgcatttttattcaaaggcagatgcatttgtaaacctctttggatggttgttctgcctttgtcagttacttcatagcaaatgtcaactgtaaaccaagagagagaatgagccaggatggagaacttttttttgtttaattgtgtcatgttgggtgctttttggaaagtgggtgaattattcatgatgacatgaatgggggtattattttaaattagtatagaagcaaatggttcacaacccatttattaagaccctaatgttgatgtggctaccaagaagctttaccagcaagggccagtgtgttgccttccttggttggttagtttttctacatccacttaactcctagcctaattttatcttttttttcctctgtttttctttccctgaatgtttatttaagctctgataaatcattttgaattaaggtcgggtatgtatttcctttcttctcatcttcttccccctccatgactgcctgcatttgaatacatttccattgtgtgagaggcagtaatggtacagaggggtggggggtggtgactgcttggtgagctgtggctcacatgtctccagagacacagggcctaggaagactgattaaaaatcaacttttaactactataacggctcactttcctgaaacttgttatgctgtaaccccacctattgaagacataatcagaaccagaaagtgaacaaaattgaccctggaaatatgtggcaaaaattctgtgcaataagtatgataacacttttctttcagtgaattctctctcagggcccactcacagaaccaattttgacatcaaattttcttccttttaaaaatacagttaacccccacccccatctgcaggttctccctctgcagattcaaccaactgcagattgaagatattcagaaatttagaaaaatgaaaaataacaatataacaaaaagtaatgcaaataacgcagtatcacatctatttatgtagcacttgtgttgtattaggtattatatgtaatctagagatgatttaaagtatatgagagggtgtgtgtaggttatatgcaaatcctataccattttatgtcagagacttgaggatctgtgaattttagtatcctcaggtgtcctggaactactccaccatcaatgctgagggacaactgtatataatataaaataaataaaatatgtactgtaaaattgtaatcttgaaagtttgatcctgtggcagctgctattttcaggcagctcagcctttgtttgcatgctcaaaaccagcttgtgatttggtttctaagatcacggctggcttattatctgtgctggcttatcatgacagtggctcggtgttatggacacagtgagcatttggtgtcgatactcccagaatgaactgagtagaatggacaggagactgacctttgtctatttgtctatgtagcagtaatgccactaacttgttgcagtgctctttatcctcaaactatttgctatatatagtaatgcttaaattacatatattatatatattacatatacatattatatatgtggatatattatatattataattatatataatatatataattatatattatatagatggttctgactttgcacagttctgatatgcatgagttgcaattaccatgatttaaataataccagttccccaacaactctagtcaaatctcagttacccccgtgtgttaattgagtaattgcatgaagtacacaagcttgctgctagtgcttcagtatacaactcaccatgtaaataacagatgcatgtcagaatccgtggccaatcacagcacttctttcaaagcccatgggtgattggtcagtgcacatgttccttagttcatgcacagacagcagagtgtgtagttctgtggccttcttggctattggggataaaccagtgtgacattttacaaaaataccaaaaatcgagagggaattggtgaacgaagataaaagtgcagcaaagaagctgaaagtgataatgctagaagtgaaaccaaaacctacatggaattatagaagaaatagctgactgtgggaatattggcagtacagctgttggagagactgcctgcgcagcccgaggaggagaatgcaggtttaccacataaacaaggaaagtggttgtgaagaaaagaataaagctgtcctagaggacatgaccttggcaaaacaaacaaatttcacattaaaggatctctcagaaccatttcccagcatagaaaatgcaaaggatgaaatgtatgcttattcaaacttacggctcctagcagcactgttcacaatagtggaaaggtagaaacagcccagttatccatcagtgggtgaatagattaacaaatggatgaatagattaaaaaacagattgtgatatatccacgcactggaatattgatttaaaaagggacgaagtactgatacctgctacaatgcggatgaacctgaaagataccatgctaagtgaaagaagccagatacaaaggtcacatatgataaggttctatttatatgaacgatcttggtaaatctgtagagaaagaacacagatttgtggtttggtttctaagatcacagcaagcttatctctaagatcggggctggggcgcggtagggaaatgaggaacaactgcttaatggatgtggagattccttctggggcgacagaaaatgttttgcaaccacgcggacgtggtggttgtatgacattgtgaatgtactaaatgcgcttaattgtttactttaaaatggtgatgttatatgaatttcacctcgattttaaaaacgtgacatttcaccaagtcatagaaaagatgcttcgcttgtataagttatgcgacaaaaagataagcacttttaaatatttcttgataagttttttgtttccagggttttaaatggcaacgtgctgaatatttcactatttttcacttccttgtacatttataactgacagtaatagagtttttaatgctttgacaaaatttttaagaagtcacagaacaattgcattttttccttttcatcactaacattgttttgcaccgtttcagcttctatggacattcttatggtttcatactgagtactgcctgtgcacatgtatttcactacacccccgccccccaaccaacccctccaccccccaaacacatcccatacccattacagcacgttgttgcagggaggattctgagatgcgtcttctacaatagaaaaagatgtgctgggcttgctgtgaaaaagcagaggaagttagaggtgggatattagtggtgaagttggtagaacctcagctgcttctagggaagagggaaggtaaagtcagcaggtattagggaccaggggaagcctgtaacttataaggtatggtaactatcagagcagtttgtgggattggctagcagctgtgtggccagtagctggaagaaccagtggtctggacatgtcctagttttgagaaatctgtcggcaaggagagcgctaggactgaaggtatgatgcctgaagcccagaaacgcataatgggctgtgacaatgctgtttcacttgagctcatcggatgctttcgaggattcaatccatatctccctgttctccctgcattttgacacaggccgtgcttgcatgacagttgggttagtgtattcccctctccaccagagacttgggagggtaggggagtgtgccttagtcattctcgagactcctgtgcctggcagtgcctagcaacggcttaataaatacttgctaatgaacctaattattatgacattaagattttaatctaaatcttctaaatgactatgggaatctgtttatttttgcttaggatcattggtaatgttttctggccaaagctgcttttttgtctgagctgtgtgtttatttttcattcctgtctcttatttatattgtgaaaatgattaagaaaaataggtggtatggctcatggtctgatatcacgagtcaatgtgttgttttgaagccaactccacacataatggttcaagccctctgactacatcttagttttactccagattttctccatcaatgttgcttgcatttttcagtggtactttttggaaggaaagaatacgaaagccagcccgcaaaagatcactgggtgggggtcatagtctgtgatggtgactgaattatctggtaaagcatatttttgccgttttcagggtcaggcttcagcataatgagattccagaaattgttatgaaaaaagaaaccttaggttacccagcagctaaatgattactgcatcagctagcagctccggaatggccatttggccctgtagaaagatcattcttgggcaggctgttgatgtggagagtgagaggagcagctgttctttcacctgaggccccatctgggtagcagatggtccccagctaggcacaagccctgtgtagggacatccgtgctgcccaggatcctgggacactgcccaaatcaactgtcaggctgggagcctgtgtccagaactgtggatggcattcactttgggttgtggaagttggtttgtacctactcttaagtcttgccccttcaactccagctcaggctttttaaccctagtagaagctttcttatctgtaggtatttaagataagtttgaacctactggtctgtgggaaggtaccgaaaaagccaaaagctgcagctcctggggagcttacaggctcccccttgttgagagtctcccgagtgctaggtactgtgggtttaagggagaccctgcagtggtcaaaaggctgcctggtgaaggggggccggttcccatacttctcagatgtgcctttgggcaagccacttgcctcctggtgcttctcttttgtcatctgttaaaggggttagtgaaggacccttctcatagggttgttatgaagattaaatgatttaaagtatgcagagtgctaagaacagtgcctggcagatgattaaaaaaattgttacagaaatacagtacaataacatttttggtcacatttaatcctcaaagcaatcatgcagaaagggcaattgtcatacctattttgcatgagagactcaaccactcgcccaaagtcacagtgctagaaaggacttgagccaggatctgaacctgtcccctgaaatcttcacctgctttgcttcttgacacggcaggagaatgatgaggaagtgggttagtctgctagggctgctgtaacaactgcagatggggtggccaaaacctcagacatttatttatttttttaatataatcttggatgttggaagtcgaagatcaaagtgttgacaggcatgggttcttctgagacatccctccttggcttgcaattggtcaccttcttgcttcttcacatggtcctccttctgtgtgtgactgtgtccaaatttcctttctgtaaggacacagccatattggattaggcccaccctattgacctcatcttaacttatttactcctttaaaaaccctgactccttatacagtcacactccgaggtactggggattaggatttcaatgtatgaattttggaggtgagaggacacaattcagccaataccagtaaatgattagtaatcaaacacagggattgaatacgcagatattaaggattggaatgaagccagaatttggaaggattagaactgatggaggcaggtgcttggtctgggtgatttttgaaaatgattttcaggccaggtgaggtggctgattcctgtaatcccagcacttttggaggccgaggctggcagatcacttgaggccaggagtttgagaccagtctgggtaacatggcaaaaccctgtctctacaaaaattacaaaatatcagccagaagtggtggcttgtgcctgtaggcccagctcctctggaggctgaggtgggaggatcactggagcctgggaagtcaagtctgcagtgagcaaagatctgtgcctctgcaccccaagctggacaacagagcaagaccctgtctccagaaaaaaaaaaaaaggctttcaacagagtcagtcgtggacaaagaggaaaggacttttttcctcccctgcagctttaacctcccaggctcatatgatcctcccattccggcctcccaagtaattgggactacaggtacgcatgccactatgcccagctaattttttttttgtatttttagtaaagatggggttttgccatcttgcttctgctggtcgtgaactcctgggctcaagcaatcctcctgccttagcctcccaaagtactgggattacaggcatgagccactgcacccagctggaaaggactttttgtgcggtgagaggaggatcctcagaatacggagatctggggtccgcagacccattgtgggatgcacattgatttagttagatcttgagtgaagagatactgtgttagctgactgcgtgataaacgttagcctgagaaattagtttgttattttgataggcatttgagtcatttattgaactaaaagctttggggtgcctcatgtactaggcacgaaatcacagtacagttcttatcaggggagagatcatttgggtctcagtttcctaaaagtagcttttaactccaaaattgttttaatctatgtttgtagaggaacatcatgaaaatattttgaaattaaacttcttaagtataccttaattttatactgttattattttatttcatttttatgtttattttttgagacaagtttcactgtgtcgcccaggctggagtgcagtggtgcgatctcagctcactgcaacctccgcctcctgggttcaagtgattctcgtgtctcagcctcccgagtagctgggattttaggcatccgccaccacgcccagctaatttttgtatttttagtagagacagggtttcatcatgttggccaggctggtctcaaactcctgagctcaggtgatccacccacctcggccccccaaagtgttgcgattacaggcatgagccaccgtgcccagcctactgttattattttaattagtaaattttggtataatagagactggattttgacttaaggctatctgggtttaaatcctggctctgtcacttaatagctttgtcagatataccatatgacataaataggcagagtttccatcttatcacctgtgaaaagtggataactgtacacatcacattggattgccacatgcagtaatggatgtggaggttctgtccagcattgtgtctttcccatgataggcacttgtgctaatgctatgcaagaaggtagaaagttgaaagtggatagctaaaagtggaggcaaattaagggacttcttaaaatatttttatttaatagaaaacaatatatagcaagaaaatttggatcaattctttcatgcattcaacaattgaagtctgagaaccagccgtgattaggtgctccaaattagaataaggcaaggctcctgccctcattgagcttccaggcaggcgggaagcccaggagggcgtgataagtgctacaattcaggtgtgttcaggttgtcatgcaggtattgaagagggctacttttggatttatgcccacagaagagtttcacagtttctgaatttttgccccaggatgggagcaggcacttgcattaacatttgaattaatcacccagagaagagtggaaaagttatttcaggcaatggtaacagcatgtgcagaagtctagagggatgggagaggccacatggcatggttggaaaatagcagctcaggaatccatttgctgtgggggtggtaagtggaggactagatttgtgaaaggggacagatcacacaggctttgggaacaactaggaggttttttttttgtttttttttttttttttgagacggagtctcactccatcacccaggctggagtgcagtggcatgatctcggctcactcaacctctgcctcctgggtacaagcaaccctcctgcctcagcctcccaagtagctgggattacaggtgccccccaccacacctggctaattttgtatttttagtagagacggggtttcgccatgttggccaggctggtctctaactcctgacctcgtgacccacctgccttggcctcccaaagtgctaggattacaggcatgagccaccaaacccggctgactaggagatttttaagcagggaagcaatttgatgatatttacagttttaggaagaccaaactgacagcagcttggaggctgatttggaaaggaggcagagtggaaggcagggttgttgaggggggatgttttagaaagattttgtgatgattctgctgagactgaggttctgaacttgggctgccctagggctgccctacagcagcccaggaggacagattgcagagctttgagatagttggcatcaagatgggtgtgtctggggtgggcatgactgggtttctagcttgggtgtccaagtggataaatagcctttcatgtggaggctgagggcatgggcaggttgagtactgtccttcttccccaaaggtagctggccagccatgggagtcaatccacatgggatggaaggatggagaatgccagctcctctttaaagacttggccctgaagaatagagcttgcaattttgtatctagggtagtcattaagatccgttcacacaggtttggatctttaatctccagaatagagggtgggatgctccctgctccattgagcccaggtcatcatgtgacaacctgtgactaattaggcagtgagctgatgagattcgtgtggctcttgagctaagcttttgaagccagggtgagactctctggccctcattatctcagctgtggtgcttggcatgtcccagaaggtagccgtgctgtggacctcagtccccgagggagcgctgtgccaccgccacccacgatggacctgccctgagagagaagcctttgttttaggctctttaagatgacatggggattttggtggtgtttttctagcctaatctagcccttcctgactcaagtttttgtgtaagagaccaaaccttgctcattttcttttccttagctacaaatcagttttgaacttaccctttttcagtatatgcctgtgcatgtgtatgcctttgtgcgcaggcagacaaatatagctaggaccaaaagcatttctgctgttaccattatccttttgtccaaggtatttttcaatgaactaaatgtcagaaacacacacgctttcttaaaaaagcagctttattgagatatgattcacataccttacaattcacccatttacagtgtataattcaattacttttattatattcaacgttgtgcaaccatcattatgatgttaatttttttgtttgttcctcttgttgagacagagtctcactgtcgcccaggctggagtggagtggcacaatctcggcttactgcaacctctgcctcctgcgttcaagcaattctcctggctcagcctcccaggtagctaggactacaagctcatgccactacacccagctagtttttgtatttttagtagagacagggtttcatcatattggtcaggctggtcttgaactcctgacctcaggtgatccacctgccttggcctcccaaagtgctgggattacaggtgtgagccactgtgcctggctgatgttaatatttttattacccataaaaggaagcctgtacgatataaccatcaccccccagttctcccacacatccctctccccatccctaggcagcctctaaactactttgtatctctacattttgcctattctggacatttcatataaactgagtcatgccatgtatggttgtttgtgactggcttctttcaattagtggagtgttttccagggtcatcaatgttatagcaggtatcagcacttcattcctttttattggtcaaatactagtctgttgtatgggatacattgtgttataaaaccatatggtttctagagatggaagccatgctgacccctgtagagttttgtttatccatttatcagttgatgaacatttggattgtttctgctttttgcttctatgaacctctatgtagtacattcttgtacaggttttggatgaatatgttttcatttctcttgggtttatacctaggaatggaactgccagactgttttccaaagcagctcaccatttgacattcccccccagcagtgtctgagggttccagtgtatctgcatcctcaacaacacgtgttgtctgtccagtgatagccatcctactgggtgtccctgttgttttatgtcatttaacaccaaacttagatcacatttctgcattactgactttgcacataccgtccccaacttgcaacttatgctgtcattaacttgtgtagatttatccatgtttggctgtttatgaggatttgtccgtgtcaacatgtatgtttcataaggacattcttaccttccattaccagacctacattctcaatttaagatttgatattttttcagtgtttaggttttcaattgaatcaactgacaagtttagtggcttaaactttcaagcttaaactgaaatgccaatcttgttttagaccaaaaattacatcctatctcttctcttaattgaggaacttaggtggtggttcctatttgtctttatttatttatttatttatttatttatttatttatttatttatttatttttgcctacttcagtttggtcggtaaactatcaattgtattttcagtatgtatatatatatagagagagatttttaaaattttattattattttttgagacagagtctcactctgatgcctaggctggagtgcagtggtgtgatcttggttcactgcaacctccacctcctgggttcaagtgattctcttgcctctgcctcccaagtagctgggattacaggcatgtgccaccatgcccagctgattttttgtatttttagtagagatggggtttctccatgttggccaggctcatctcgagctcctgagcttaggtgatctgcctgccttggcctcccaaagtgctgggattacaggcatgagccaccatgcctggcccattatatatacatttttaatataatgtgaaatcatgtggtctctactatagactgaatatttgcatcctaaaccccaatgggatggtattaggaggtggggcctttgggacgtgattaggtcctgagggtagagccctcatgaatgggattagtgcccttataagaagaggccaagtgagcttgtttgctccttctaccatgtgaggatacagcaaagaacgtgctttctgtgaaccaggaagtggccctagtcagacactgaatttgccagcaccttgatcttggacttcccagcctccaaacctgtgagaaataagtttcggttatttataaaccacgcagtctgtgatagtttgttagaggaacccaaacttaaaggcagcttctaaaggggagcaatgctgaccactctgtagtttgtatatttggtcaacacactttattgagtgatgagtctgaatttcatgcttgattgatgatgattggtgacagagtagacaaggtccctgcttcatggagtctatggtctagttggggaaatatacctttattgaatcaaggcagatgtgattacagattgaacaatggctgtagaaggaaagggatttccaagagagaattagaggggcttctcaaattgagtttgactttctctttggtgggggttgagtcaggaagaacctttttgaagcaggaaaaatctttagctgagacctaaaggaaggggaggagcttgcctgggaaggacactgtggtggctggagggggtttcccaggcagggacactctggcaggttagagtaactgaaataaagtctgtattggagtgcagagactgccagaagaggggctcatagaggccaaagtgggacggccttacggacgagctgataatttgggcattattcaaggtggggtgctatgtcattgaagggttttagcagaggggaggcattatccaagttaaagaacaaaacaaaacaaaacaaaacccactctagttgctgtgtggcagatggattgggattgggggtgtggggttggtggcaagaatagatgcagggggacaagttatgaactgagactgggacctcatgggtcttcctgcccaagaccgagatggctgggggtgggggctgcggctagggacatggggcctcagtgcccacgttttctgtcctctgtcccctgtgagggtatgtgcgctctcataccagccgcagggcactttggctcgcttgtgttgctgggagagatctcctttaatgtttttttgtgtttttaaaatatgaacgtaggccctggcagagacaaggcagaaaccacttttgagtttttagggctgtgcattcttaaacaactctgagtgacccttccatcattacaatttatcaactaaattagaaaacgtgctttcacagatttctagtacttgggcaaatttgttatttacgctcaagatgaagtgttgcttctagtgacagttttgctgttgggcagcatttgtagggtaaaggtgtttttgcttttggaatccattgggagatttaaaaaaaatatatatatatatacacacacacacacacatacacacatataaagtaaaaagcaggaagtctatgtgtgtgccaggggatcccaaactcttggcctccagcagtcaagagattttttaaaacctttatcttttaccgtcttgctttttaaaatccattatgtctttgtatagtacttgacatacatgggcagaagtcatgctggaacgtgaagatgggagcatggactttctggagcatcccaggtggggttcctgtggctgctgtaaggcaggaccgcagagcggtggctgcagacagcacggatttgctattatatctcatagtcatagtcctgtagggtagagtctaacatgggctaaactcaaggtgtcgccagggctgtgttcctcccggaggctctaggagaggatccccttgcctttcccagtttctgcaggacatctagcagcctcagctcattgtcccctccctgcgtttgcaaagccagcagagtagcatctctgtggccattcccacatggtcacatctcctcctgggatgctctccttctgcctccctttgcactttcaggagcccttgtgattccattgtgtccatctggataatccaggataatctccctattttaaggtctgctgattagcaactttaattccatctgcagccttaatcccccttttctgtgtaagctgacctagtcacaggttctggggattaggactcgcgcatcttgggggaccgtcattccacctgcggcagtggtaggctaaaccttaggcgtctgatattgtgaacctggctcactggcctttgtcttcttgccgactcctattggtatttgcctgagatgtttttcttttctttttcattcttttttcttttctttctttctttcttttttttttttttttctggttctgggcccacagtaggtgccttagaatcatgcagtccagttgccttctgggaatccattgtagtaagtggtagaggtttttaaagcagtcctaggggagatgcaattccctgcttacattcaagtttttcgggaagacaagtctgtttaggaaacataggaggttagttgcattttcctcattaatgcaggatattaaaatattcagagggaacccaggagtcctctcaagatgagtttaaatttctcatacttgtagaagttgttgagaaatactggattctaatttccagaactctggtggggaaggagactgtgaacctggtctgaattgagaatggggattgaggatttttggacttttgaaagattgacttactctctcccgttagttctgttgaactgctgcctaaatggagggaatgtgcatcctctcttgtgttgcgtggcaatgccgtggggacacttgggacatgagcaaaacgttgacagaggggagcacttcccggaatattattaatacagagttagttttaacttcaccttttgggcaaacttgacattatagatcttgaaataggattatttttcccttgctaagaggttagcaaaatcagtacagtgtgtctctttgacaggccctagaaagcactctacgtttgttaactttaaatttgggttggaaattgatgttattggaggagcaaggcgtgtttaggcctgatgatttttggatagcttgaccaaacccggtacagccaactttcccccaaaactactgtgtccttctcagtggttcctgtgcctgcacagggacccagcgcacaccccagtgtgcctctttgggctctggctaacttaggctgacatcctgatagaacgcagtgaccacctggtcatttgattacagcgcttcttccagacagcacgctcagaattgcgtttcttacttccagtcttcttgccctgtaagcattttctgtgagtcaccaaatcaaccacaaaatcatttaattttatggaagtggaaaatcagacttattaaaatactgtgtttttgttttaaagctcagaggtatagagatccatgaatttttttccatgccttctcataatgtggttttggtttagctgcggttcttccaggcgcagatgtcagccctctgcagatctgctgcatcagagtttatggcctgggtcttaggaatttgcaatttaaaataaccccttcaggtgcatctaatgcagcctaaatttggggccagctcatgggttgtaaactgtactgccctatacaatagtagcacagttctaagctcaagggactcaagggggtccagtaagtacagttcaccagagaaataacaaaagcatttgcagagggagaccagagcatcacctttgttagggcaaaggcttaacatagaggaatgtggcttctatgtccaggccagtgggcttcctaacacagaacatggaattaggcagacttaacatcccccatgcccaccctggtgagtgccagcatgggcttgagctgctcttcacactgatggtccatcctttggactgatctccttgtgaaggatacaatacagcaaggagcgggggcttggcttggcacagccagttctttacccaaactcctgccaacgctggcccttctttcttaccctggttggagtgtgtgagggtgggagaggcaggaggaatatgctggacagagcttcttccatctagaagggaatttcaggagtaagaaagcggcagctcttaacatacctgggagaaagcaagtgcttagtaaacagttgaggaatgaactaagaattttcagacagattttcctcttctggagcatttgcagaaccgcctctttgctcaagtgctttgttttttacagattcatttaaggtcatggttccagacactaatgtaaatcagcacatatattattgaagaagtagaatacctccaggcccagttgccttggagcaggaaaaacagttcatcctcattaccatccagaataatttatgttcaagataatacacaatcaatttactttttatcatattcgaatttgatttgtgtacacttttgagtttggatgtcagccacattgcttctgtgtgttaatctttatttacgggaataaatgggaagcagtcagccattttttattctttattggggaactgcattatagtggaaaaggtaaaattataagctaatgagaccagaggtctgtatgtatgaaaaccatcctcatcgcttcacagttgtctttgaaccagtttccctgggattgttcgaaatgtagcaaacgtggctcacggttaccctgacggggccagagcaatagggggaggtgtgggcacctgtatacatttgcgttgaaaaacgtacccgggctattctgaggtcctttcctgcccccagcctggtttctgggcctctctggagtctctctttctggcacttgtgttctggaatcgcttatcagcctggactccttcagcagcagctgccacagtgtctttgtagtcacactacacacctatatactccatgacatggagtgtatagaatgtttcccgtcttcctcgtcagtgctgccaggagaagcttcccctctcctaacctctggatagtggctggctctgctttattcaggcattgctttcattttttagaacagctgctccagtatgcttagtgtgaatgacagcccagcagaaagaatggacttgacactggagactgcaccactccacatttctttgtcccctcaagatgacttaactagctcccttcccttttccttcatgcaatagcctcagaagttcggctggcattgccaagttgttagagtgaaccttaacctgtgtatgactcagaattcacatctgctgtgtcagtgaacacacagatctctttgtgaacacatggttatcaagaggcacatgctcttacgtatcctgccggattctggtaaggcgctgcttgcgcagtaagcacttgtcaggtgcttatgatgcctgtgacgtgaggctgtggatgcagaatttgtggtctgaacatttttgagtagataaaaatggaaactgaaattggtgaagcagacttgtggcttttcctactttctcatctcttttatggatataactagaagctctgcttcatcaatgagtgtgttaaaacaatttgtttacaaaatcctatttattaaaataaaaatctgaaagaactgcgctgctgcttttcagtgctcgccactctaggaacctgtattcctcctcttgttcatcctcccttttcttcttttttgttttgttgttgtttgtgtgtatgtatgtgtctgtgtgtgtgtggcggggtggtgggggcggtgttgccaaatcttttgcactgaatctttgaagatgtcctgaaatacttaccaaatcactagagcgaagagaagcccatctgatttcttcatctcccagctgaggaaggacacactttctcccactctccagtgaaggcccctgtgtcctgtgggtgggggagctgacatcacactcagtgctgacatttcttgttccctgggtgggcgctgattccagatcctcttcagccccccaagcggaactgggtttctcttgaaggtcctaacctcagctcacaccacctgctactacctttctgggtcttggattttgttgttacccaggcccggggtcatcccaaaggctcttgatagccctgtggctgtgcttgctaatacactgtcctcatcttttgtcagcgaagtaaatccaataatgtttccttctctttaatccaagccagtcttcattgaaaacacttcacctctaagctctcaggctctgcagtctgccctctccaaccttacccctcatgccccaccttccctttgtccccatctttcccttctgttccagtcattctcatgggccatggagagtggaagcctgggagggctttgccaaagtccagttgcctgctcactttcctaagggccagagcaatgggggaggtgggggaggtgtgggcacctgtatacatttgtgttgaaaaaggtacccaggctattctgaggtccttttctgcccccagcctggtttctgggcctccctggagtctctctttctggcatttgtgttctggaatcgcttatcagcctggactccttcatcagcagctgccacagtgtctttgcagtcacactacacacctttaccccgatccactgacctgctgtcccggatggccctggtgtgttctctctgttcctagccgcagaaattgctggtgaatgtcaccaagctaagcggtgtagctttataacaagtggattcagccagctgggactggacgactgagagtttgcagcccctgctggaccctgtgtaactgtccagttcgcctagctattggtttggcccagtggttttcaattttggctgcacatcagaatcacctgggggaggtttaaaaccctacctctgcccccatgccctggggttcacacccagaaatgctgacttcattggtcgggggctggcaggcctggacattggcggtttgcttagaagctgcccgggtggttctcatagcagccagggtcaagcaccacggcctgttcttacctggctccccaggccccctttaatctccctctgcagcagattggcacacatcgcattgtggagcaagccatctgataattttccttaatcgtctttgaagatcttccctctgcctgttgatcctttaaggaagaagtctccttgccaggatcggcctctccagtctctggatcccttcttgcttgctctcttcagaacccatgaaacctctctggctgccttgacgtcagccagattggactgcccaaatagaaaggcagaaatccctgtcgaggccagacagcaaggatggagagaggcagggggtgaaatgaaacacaccaggaggagtaaagacaaggccttctgatgtcagccaagagcaggtgtggattaggcagtcctaagtttgagtcctggttctgctattcattggccaattgtattctccctccctctacgatgaggttaattacagttacctcactgggatttgtgaggatggaatgaggtaacaaaacataaaatactatcagtacaatgcccagctcataatgagtatgcagcaaatgttcaccctttaaaaaatgccacggccgggcgtggtggctcgcgcctgtaatcccagcacgttgggaggctgaggcgggcggatcacgaggtcaggagatcgagaccatcctggctaacacagtgaaaccccgtctctactaaaaatacaaaaaaattagccaggcgtggtggcgggagcctgtagtcccagctactcgggaggttgaggcaggagaatggcatgaacctgggaggcggagcttgcggtgagccgagatcacgccactgcactccaacctgggtgacagagcaagactccatctcaaaaaaaagaaaaaaagtccctttctaccttcaaattcaggaaaattttctttagtccaacagatgtaatccccccctcactcccccatccccactggtatctttatgtactcaggtgactattaccatattctgcttggactgtttttatacattgcagataatttgaagatatggacttaggtaggtttttagatttataataattaagtgatgtttttctatcaagtgatgaaagtttcaacagatatttgttaaaatttaatttagccaaaggaagacatgccatttcagcaatgtgatctaagtaaaagtgtcttctcttttttttggtggggagaacagagtgtagaatgatattagtaagatagagaattgatgaccaaaccataactgctagcattttagtagaggacacaacagagaaaggattctcacgtgtgttattaggatcttggatgagagtgggctgttattttaactttggcccctgttggagcaaattactctttgggggcccggttttcctcaggaactacctacagaattcagtgagatagattttagaacccttctgaatgctgctggtttggagattctgtctgtagcaagttttgttcagttgttaatctttctttcttttctttcattctttttttttttgacagggtctctctatcacccaggctggagcagtggtgtggccctggctcactgcaggctcaagcgctccttccacttcaactgcccaagtagttagaaccacaggcgagttccactacagctggctaattaacaaaaattttttttgtagagatgaggtctcactgtgttgcccaggctggtctcaaactcctgggctcaagtcatcatcctgtgttggctttcgaaagtgctgggattgcaggcatgagccaccacacctggccaactatatgttttctatgtttattatattttctgatttgtaatgtattttaaaattatcccaataatatatgaatgcaatcttgaaaaatactcagcatagcctttaggctaaaaagtggaggtctgccatttctctgccttgccccattcccttcccatgtcttattttccctgttaccaggttggtgtgaagcctttgagacctttttctctgcacacccatatatgtgttttttctatgtttttatagtattgtttcatttaaaaaataaactaggtttttgaacttgagaaatttcaactcgttctgctcagagctttgttttattaaaatcagtgcctgggagttgctcaagtctttgggctgtgtcgccctctagtggtagccctttggcttacagctgccattcagccctagggctggggtggaagtgatggttttgtgcccacaacctgatggcagggttggcagtgtttagttgctgacaagtgtctaaaactcaatctaggccgggtgctgtggctcacgcctgtaatcccagcactttgggaggccaaggcgggtggatcacctgaggtcaggagttcgagaccagtctggccaacacggtgaaaccccgtctctactaaaaatacaaaaattagccgggtgtggtggcgggcgcctgtaattccagctactcaggaggctgaggcaggagaatagcttgaacccaggaggaggttccagtgagccgaaattgcgccattgcactccagcctgggcaacaagagcaaaattctgtctaaaataaaataaaataaaataaaatataaaagtctagtgagccctggagtggtgtttgccttgctacctccaacttgccctttttaagagacttaaaatttgtggtaacttttcacatgatgtgtatttagatactgctgagttaatgaggctgctatacctggctgatttattgtttgctttcaaagcagttgtcaagtggtgtccacccatcccactgatggattttttttcttttttctttttcttttttttttgagacagagtcttgctctgttgcccagactggagtgcaatggcatgatctcggctcactgcagtgtctgcctcccaagttcaagcaattctcctgcctcagccccctgagtagggattacaggtgtgtgccaccacgcctggctcatttttgtatttttagcagagatggagtttcaccatgatggccaggctagtctcgaactcctgacctcaagtgatccacccacttcagccccccagagtgctgggattacaggtgtgagccactgcacctggccccactgactgtttatatctgttatactgttcttgcctctgtgccttttgggttccctgtcatggcagcatccttacatcctccaccacctctgaatgttcccgcaccttctctttctaatggaagcctggctggcccttgaagacaccgccaaccctgctggtctcttcacagagtatccacccagcaacctggcctgtccattcttgacttcttctggtccagctgcctttctgtacctcattttagtgaccctttttagatctcgtccaggttagcctctagaaccctgatctcaggcaccccactctgcgatcttccgttcccagccttcccacttgaaatcgtcttggaaatcccgggctttgccaatctgtggacccaccaccttttcaccccctttccggtgccctcaggggactttgctgtagcctgaacctcatggtcccttcctgtaaacagccaaactgctttgtactccctgaggagacccccgccccggttggacaccccaccctggttaaacccactttcacaattattccaaaactgccaactggacttgcatctcttcagatcggctgtcatcactcattgtatcaggaatcttattacacttttgcagcagtttcatcggttcagagaaaactctttcataccttctgctcatcagttctccacacctcccatcattctcctagctgatgactttgctgcttgtctcattgaggaaagaagccgttcagtcagtgagaccccctgtctcgcctccacctttccacctgctgccgcggaggcttccccagctcctgtctcactcaggccccttgccactctcaaggcatcttcttcctgcttcccaaggatgtcactcctgcagttaaccctttttcctcctgcattattcgtttcttcctttcttccgcatccttccaaatagcgtaaaaacaggccttatgacgtttctctttaaaaatgtccttaccagtgccacgtccctcttggccactgcccctgttgtgcctcactccgtagaaagaagtgacctgtagagactatatcctgccctctccagcgcctgccttccgattgccccttccagtctagtaactgtgtccattccttctccaatgaccgggtgacaagctgtcccttctgagagtgccagagggtgttccccgggtgggaggccggatgtcagtgccagctgtgctgtcctgggtgagcctgtgagggaccacatctggtcagactcgtgcatggcctgccctcatcttcctccgcctgcggtgcctttgagagcattgactccactaagcccgatttctgtgtggcatgttgtctgttcctccccggcctcctcgatggctcctccttggtctccctctggctactcctctgcttctccgcctccaagtgctgctccaagtgccttctgtgctctgtctccatccatcccaaaccttccaacactctctgtaagtggaatctcaccttgaggctgccagcccagcctcctcacctctgtgctccatctttagagagtcacctctctgtctggcattcccacttgaggaccaagatgattctcaaccttaacgtggcccacatggagccgctgctcttcctgcccagatctgccttcaccaccacatcctgcccactgtcactaaacggcaccagctcttacctggtttctcagtaaaaaaacaagtttatcatcttccctcacatactttattcaataataatcactaacatttattgagtgcttcctatgtgcctgacaccattctaagcatttgaagaagagtgtattaacctgcatgaggaaggctattaaaacctatgtaattaattaattaatggatggatgtgtggatgaatgaatggcagggtcttacactgtcacccaagctggagtgcagtggtccaatcatagctcactgcagcgtcagactcctgggttcaggcagtcctcccacctcacccttttgagtagctgggactacaggtgcttgccaccagctaatttattaaaaaacattttgagagatggggtttcatgatgttgccaaagctggtctcgaactcatggcctcaagcgatcctcccactttgacttatagattgtggggattagaggtgtgaggcatcgcgcctggcctgtaataacctatttgtgaatgagaaaggtcaggcacagagaagttaaataatttgctcacagaaatttcctgtgttgcagctgagatttaaatccaagcaatgtgtttctaagcctgggctcttaactgtaacactgtcctcttccccccaccaggagggtgtgtgtgtgtgtgtgtgtgtgtgtgtgtttctgaatctgaccagttgaggcaggctttcatgtcattctctctggccacccccttctttgttcacctccagtctttggaatagtcagagcgatgtgttcatggtagaaatgaaatcacatcaggtcctcagtggcccatcacatttagaactaaagctcactcttgcctcatgcctctgagcccttatatgatctcgagtcaccaccccactgccagcctctccactctcttctctgtgcctcatgcagcccaggaaatataatttggaccgcaaatgccagccacctatgtacggtaacttttctagtagtcacattaaaaagaaaacaggtgaaatgaattttaatgcattttagttaactcatgatatcaaaaatatttcaacatgtaatcagtattcacacaaagattaatcaagtatttaacagtcttttcttttgatccggggtcttggaagtttgacctaccacctctcaatttagccagccacatctccagtacttggcagctgtttgtggctacctcatggacagggcaggtcccgccacccgggcatccgtctgcctggcgcacgcaccaaacgggttccagtctggggaagttggcatctgctgttgttacttttggtcagaacgcccttcgcctgcatcctcacggggctgactccctttagccttgaaggggaccgttgctccgagaggcctgaacactccagctgcagctttctccccagtcattattgagatcaaattcacatctcttacaattcacccatttaatgggtgatgcaatgcggtggcttttagtatattcacacacatgtgcagacatcaccatagccaattttagaaaattttcatcagctgaaagagaaaccttgtatcctttagctatgactttgtgattccctgttcccctgagcccctggagaaccctatctttctgtctctgtaggtgtgctgattctgaatattttgcataaacggaatcatactagggggtcttttgcttgggacccctttcacgtggcgtgtttccacggcccatcccgtgtgatagcatgcatcagtacttcattcctttttatggcagataatagcccattgtatggatataccacctgtttttttaaaaagtccattcatcaattcatgagcatttggtttgtttctactttttggtagaatgatgctgccatgaacacttgtgtgcaggtttttgtgtggacatagacttaggaatggaataaccatggagttacggtaactctacatttaagcatttgagaagctgctggcctgtttttcatctgcaccatttgcattcccaccagcatcaagtgggagctccagtctctccatatcctccccagcagtcggttacccttttctgttgcctctgtagcactttctaaacataaaattagcttatttctttgcaggtgtctattgcaccccccaggaatgtcagttccctgcagactctcactctgccttggcacccgcaccccagcacccaggggtgaggtgcctgcctgggcagccctgtcctcacctggggttgactgaccagagaacccttgcgattctctctctgggtttctgtctgcattcctgtcgggataggtgagactggggtgacggctgctcgcggcttggtcaccttcttctctgcttacctgttcatgctctcttgcttttctctgatagcaaaccccgtctcctgtcatcctccctcctggcggaccagagctatactggcccataaaggagtgctggccacaccaggctagattccagttgagcttaaataaaacaaatagaaaggtcctccgtggtattagccatattgtaggtgctccgtagacacatgcggctagtggctgcccacaggacgctgcagatgtggacgtccccgtcatcacaggacgacattctgtgggcagcgctgtatttgtttacaaacacaattctttggctgtgtgaaggttcaggatgatacctttgccattatgattcatttattcatttcaggctggacacggtggcccacacctgtaatctccacactgggaggccgaggcgggaagatcgcttgaggccaggagtttgggaccagcctgggcaacatggcgaaacctcacctttatttaaaaaaaaaaaaatcggccgggtgcggtggctcacacctgtgatcccagcactttgggaggccgaggcaggcggatcacgaggtcaggagattgagaccatcctggcctaacacagtgaaaccccatctctactaaaaaataccaaaaattagctgggcgtggtggcaggtgcttgtagtcccagctactcaggaggctgaggcaggagaatggtgtgaacacgggaggcggagtttgcagtgagcggacatagtgccactgcactccagcctgggccacagagtgagactccgtctcaaaaaaaaaaaaaaaaaaagaatcaacatttatttatttattatttatttttttgagacagagtcctgctttgtcaccgaggctggcacgatcttggctcactgcaaaccccacctcccagttcaagtgattcttgtgcctcagcccagtgccaccatgcccggctaatttttttgttttgttttgttttgttttgctttgctttcctttgttttgttttgtttgagacagggtctcactctgtcgcccaggctggagtgcgatggcacgatctcggctcactgcaacctccacctcctgggttctagtgattctcctgcctcagcctcccaagtggctgggactacaggctcccgccactgcacccggctcatttttgtatttttagtagagatggggtttcaccacattggccaggctggtctctaactcctggcctcaggtgatccacccgcctcggcctcccagcgtgctcatttatttattttagcatcccttcttgtgcctggttgtaaagttcttcttatcccaggaaacttaataggtcaaagaaccctccccttgaggcagtttggatggggctggctgggaattggtatgtccagctgcccatatcgtggcctctgagtcaattatacaggcatctcggcaacttgaagttttgagtcccaaaacaacagattccatagcataaacagtgcaacgtaaatcctgtcccttgtccctcttccattggatacccttgtttatgttctctctggcaactgcctgtagcagggacggatgctggaaatcctggcggggccacgtcttctgtgctttgtaggcagctatggctggatggtgcttgctgtttctgtgtgtaaatgttgggatttttaaaagcccttccccgcttaatgcgttgtggttgagcagcacatttaaatgcctgaagtgtaagatgaagtctcttggatgtagagggcagtggtggtttttatttttcctggttgaacttggcctttggattgctgactgcgagctcacggtactgttaatgattttctacctacagtcacctgctgtgctgagcacatcaaatacagtgcggttagttccaagctatgaagcgcctgtcacgcatgtataacaggcagacctcattaggagggggccttgcataggggtcacattttccagcatttgttttcaaaatggaaatccagatcacgcatttgagattaaaataaaaaaagcggcctgtgctttatcattttctttaacttacatgcctgctggtccagcccagattgctgatagaggaagccctgagaaagttgcccagccagttgcccgtgcttcaagacacaaagggctgactgaggcatccgtgcctacccttggctgctgctgctcagcctgcttgcatctcgtctgttttcagttatcagtggtgtgagaaaaacacaacggtggattcagaaggagaaaccaagtcatctgcatttggcctcagtgtgtggactgtcctgaaatttgagtacagatgtgttcatgtcctgggattagataaaaagagaggaaacacacagtgaattcttatggtctgtcatttcagttggccatcttctgcccctctgttctggaagcttctccactaaaatagagcacccaacttggttttctacttgctttctggcccatcttgagttggaggaatcatgtgtttcagaactcttgctggtggtgggtgggagatcaacaaatgatttcattaagctgtgtgttcttaataaactttgggaagatttgtcgcagagaaactcagatagggaccttgtgatctcagcagtcatgggtttatcttgtccacacgcgtggcttcattgggatttggttggttgcgatccagcagaactgtggcggtgttgggctctgttggggtttggttgtgagcggaactgtggtgttgggctctgttggggtttggttgactgtgatctagtggaactgtggtggtgttgggctctgttggggtttggttgactgtgatctagtggaactgtggctgtgttgggctctggagtttggttgtgatctagtggaactgtggcggtgttgggctctgttggggtttggttgactgtgatctagtggaactgtggcggtgttgggctctgttggggtttggttgactgtgatctagttgaactgtggctatgttgggctctgttggaatatggctgtgatctagtggaactgtggcggtgttgggctctgttggggtttggttgactgtgatctagcggaactgtggctgtgttgggctctgttggaatttggctgtgatctagcggaactgtggcggtgttgggctctgttggggtttggttgactgtgatctagtggaactgtggctgtgttgggctctggagtttggttgtgatctagtggaactgtggcagtgttgggctctgttggggtttggttgtgagtggaactgtggtgtcgggctctgttggggtttggttgactgtgatctagcggaactgtggctgtgttgggctctgttggggtttggttgactgtgatctagcggaactgtggctgtgttgggctctgttggggtttggttgtgatctagcggaactgtggcggtgttgggctctgttggggtttggttgtgatctagcggaactgtggcggtgttgggctctgttggggtttggttgtgatctagcggaactgtggcggtgttgggctctgttggggtttggttgactgtgatctagcagaactgtggcggtgttgggctctgttggggtttggttgactgtgatctagcagaacagtggcggtgttgggctctgttggggtttggctgtgatctagtggaactgtggcagtgttgggctctggatttggttggttgtgatctagcggaactgtggcagtgttgggctctggatttggttggttgtgatctagcagaactgtggtagtgttggcctttgttgggatttggttggttgtgatctagtggaactgtggtggtgttgggctctgttggggtttggttgtgatctagcggaactgtggtggtgttgggctctgttggggtttggttgtgatctagcagaactgtggtggtgttgggctctgttggggtttggttgactgtgatctagcagaacagtggcggtgttgggctctgttggggtttggctgtgatctagtggaactgtggcagtgttgggctctggatttggttggttgtgatctagcggaactgtggcagtgttgggctctggatttggttggttgtgatctagcggaactgtggtagtgttggcctttgttgggatttggttggttgtgatctagcggaactgtggtggtgttgggctctgttggggtttggttgtgatctagtggaactgtggcggtgttgggctctgtgggtttggttgtgatctagcagaacagtggcggttttgggctctgttgggatttgcctctgatctagcagaactgtggtggtgttgggctctgttggggtttggttgtgatctagcggaactgtggtggtgttgggctctcttggggtttggttgtgatctagcagaactgtggtggtgttgggctctgttggggtttggctgtgatctagtggaactgtggtggtgttgggctctgttggggtttggttgtgatctagcagaactgtggcggttttgggctctgttggatttggttggttgtgatctagtggaactgtggcagtgttggcctttgttggaatttggttggttgtgatctagctgaactgtgatggtgttgagctctgttggggtttggttgtgatctagtggaactgtggcagtgttgggctctgttggggtttggttgtgatctagttgaactgtggtggtggatcccaggagctgctgctgcttgtgcgcttcaaagttggattttgtgtttttttgtgtgcagatgcttcttggaatcttgcgttgctgtatgcctgtatacctggaaagttgtgggaagaacagtttaggattttgaaccaattttctcaacaagtttgattatttcatttgagacatgttctgatgtaaatatattctgaaaaggtgagatcaaacatccactttttactctaaagcaggtccccttgctcctctctgctagtgcattctctttcctttacagctccttctcctttctgaagcaggaattaagctgaagtaactcagaaagtgccagcgttaaccccaggggacagaaaccacagacccagggctgagggattgagtttttaatttccattattctccatcagtgcgttcagtcttttgaacttaccctgactggtattatcacttgaaagttgttgttattgttgttttgatggtagtggtggtggttttttgccacccacaggagagaggggattagaagaaaaagaccaatggagtttccttgggattaattaaatgtggggctgccacacaggaatgggtccaagggctgctgtatttaaataacttacttattttgcagaggtgaatttaacctaacatgtactacagtgatggagtaaaccttttcctgtttggaatatcacaaaaggtacttcaataattgcggatcttcctttgaaccctcctattgtcagatggggtagtggtacagttccttgttccagaatgctcttagcaagttgattaatctgtcacataccccagtttcctcattcacaaggtggcataataataggacatagagttgccgtgaagtttaatgagttaatgaatgtatgatgcttggcaaatggtaggggctcaagccaaccctcgttgtcttactgagcttagtgggccttggacctgctgaggactttgaactgagcattccgtgttattctcttttttgtttttttaaggggatgagagtgtgtgtgatagagttcatgacaatattttgtttaagaaaattgtcaaaacaaagttcaaatgcaatggatggaaagtgatttttaacatgtagggtaactagagatttgagatcagacaaatcgattaggagatcaccaaacccaaacagagaatgtgagttaactcatacttaggagatgaatgctggctttgaagaccatagcgtgcattttcaaaccagatggagaggccacttttctctgcagatttcagttattcgtgatgttaaatgactcgtcttctcttacttgcctggcatgtggaactgagtaaattctgtcaaaagaactcactgaaggaatgtgtaacagctgggaattggatgtcttttcagatttgggagagcctgtgttttgactgtgatggaattcttatggtttaatatgcttaaatattactgtttaacattttgacgtttttgaggacagggataattaggagaatgcacttataagtttctatgccaactgtttccactgctcccctgtttacatggtcccagggtttatacagggctctctgtagccccacaatgaatcttgccccagtgagcgggctctcacctcccttctatagatgaggttggagctcagaagaacgtagagaaacttgtgcatagttattatgccagatttagcagctggaacaggactggaacctaaatcttttttctttagataatatgttctttgcattaatgagtttgtgggttttttgggaggcgagaaatatgtgtaaataagaagtaaaaatcctaaattgcaagttgattttttttcttaatatagtaatacgtataatgcagcaaacatatcatttcccctccatgcttgctagactggcttatgcacacatcatgatgataatgaaggagctaacatagcaagcactcactctgtgctcattcataaggtggcataataataggacacagagttgccatgaagtttagtgagttaatgaatgtatggggcttggcaaatggtagatgctcaagccagtcctagttgcctttctgagcttaggaatcatggaatcatgctctaaaaacttcatgagtatgagctcgcttcatcctcataacaactctaggagatagacgttactttatgtccattgtagggatgagagtgtgaggtatgaaaggaagtgagcttaatattctttatttttattttttatttttattttttgagatggagtcttgttcactggcccaggctggagtgcagaggcatgatcctggctcaccgcaacctccatctcctgggtttaagtgattctcctgcctcagcctcttgagtagctgggactacaggcgcgtgccacaatgcccagctattttttgtatttttagtagagacggggtttcaccatgttggccaggctggtctcaaactcctggcctcaggtgatccatccgcctcgggctcccaaagtgctggcattacaggcatgagctaccgcacctggcctaatattcttaatttggctgtcggttgtcacccaaatcagttaaagcaattccatttcttttttttttttttttttttttttttttttttgagacggagtctcgctctgtcgcccaggctggagtgcagtggcgcaatctcggctcactgcaagctccgcctcccgggttcacgccattctcctgcctcagcctcccaagtagctgggactacaggcgcccgccactacgcccggctaattttttgtatttttagtagagacggggtttcaccgttttagccgggatggtctcgatctcctgacctcgtgatccgcccgcctcggcctcccaaagtgctgggattacaggcgtgagccaccgcgcccggccgcaattccatttcttaagtgaaaatcagaatttcttttcttttttccccttctattttttcttttaatcttttttcttttgtcttcaagcaattttcatttttttttttttttttgatattcagggaacctgaggcgaatgaaggggaggaacctgggagctactgactgtgattacagtggatattcacaaaggaagacctttagtacagtgtgaagtagtgagggaaagggtgatggagtaggagggatttaagtaaaacctttcaggtttaaggtcaatggaaagcgaaggaacattctagaaggacattagattttccttagagtgacattagagtttctataattggactataccctttagtgcctcaaatcaagggtttcacattttctttttttttttggaattgcctgctcatgtatttccatctccttaaaggcaagggctggccgccttatttggctgatactagcctccatggcatcagcctgtccagtggaagtcctgaaacagtacacgatgaatggataaatgaatgaatgaatgaatgaaatgaatgagggaagaaatgaatattgtgcttccagaacgaggagagaagggacgatgatgtggcaaattggcccagcatcttaagatctgtattgactttagcctcatgtggtagtttaatgatactctctcttactcagggaatgtgccttttaagctgtggtctgtggtcaatgtgtgtgcacatctctgagagtcccggctgtgttgtgtttgtgatggctcccatatgtggtttgcctttgtatctgattgtaaattaaccttgacatgtaggtcacctgaccgtgtatggagagagaaaaatcactttcttcttctctacaagctatgtgagtgcagactgaagttccgagttgtgatctcaagcagtctgcagaaactaacctttggcatacttggccacagccgacttctttctagtaaattcccactggttcttggcttttcttgtagaattaacacatttgcaaagttttcttcattggtattcctggtacgtggactggaatattcttcatcccttgatttgtgggatcgttttgtctttgggccacacttgtcatgggaggaaagtcacagctagactgggtatggaaagaatggaagtgtgtctcctgcagggagagcccaggttattgagacagtcttggcccgtgtttcttgaagaagacgttgggttttgttttgctcattgatggccataccccttgtgtggttggccaggaagctgaacgcttgctcccccttgtggctaaatacaggtggttctgctggcaaacccagtggtcaattactgcatctactaaggattaagaagattataaatgtaaactcagcttgaaactttttgtggcttagaggtaaagcaagaaaataattaagataacaactcacatgctgagggtgtttcatgtgttattattgtggatgttaataacaattttggctctctgtgggaagccatttccttcacttaatcagttggcaaagaaagtacatcagggaagattgttcaccctgagccgagaaagtggagtttcaagtaagaaccctgctccgcatcctgccactgagttgagatcatctatttgatttagctactgataaagtgtttttaattacaaattgtctgcttgcttggggactgacacaaacacttgttttgttttcaaagtgccttctctccccagtgttgggtttggagtagagcaagagtaacacagaggttgcagtcagtgtcttccagcgattttcattttgtttgatatgcggggaacctgatgctgatgaaagggaggaacccaggagctactgactgtgactacagtggatattcacaaaagaaggacctcagtacagttccaagtagtgagaggttgatggattaggacagatttaagtaaaacttaacaggtttaaggtcaaagaaaagtgaagcaacattccagaaggacccagaaaagccgagcaagtcaggcactgagatcttgggattgagaggagttgctggttcagacccagcactgttctggaactttcttttgggtactctttttttgtttcatcgattcctttaaaaggtacaatccagaactgaacatgtcattccacaagtggcccaaccagtgttgtatacactgactggacaggttttgccactaaaatggaataatagtctggttttcctaattccaggaaaggaaaatcaaggaatagatacattttttaaaaaagcatttaaagaatttctcctgtagacattatcttaaacttttggtccctgccattgtatgtgtatcttgaatccaagggtaatacgatacgcagtctggcaaaagcagtcattttaaatgattgagcaatatttagtgactttcaaagagcagagagcacaacttggctaccatagaagctccaccatgatgggcgcagggtttcctctaggctggaagttgtgttctggttatcttgtgagagaaatgcatcctgtgtgatttatgtggattcatttattcttagaggaaatcagacaaaaaccatattgtaaggcccaacccatctaaaaagacaatagaaatgagttctgtgtgtttttcagcagggcctcatgggcaccactcgtaagtccagaatctcttccaagaacaggaagtttctggagggcagtggagaaggggagtgagggctcagctctgtgaggtcgaggtgggtgtgaggaccagcaccagtggggagtgggtttattagctgggaaaggccataaggatgaggaagagaagcttgtgtttgagaggataacagggaggaaaagtcgccgagcccagagtgtgtattcactgcctgtcctttggaggcagccgcttccacctcttttgactgattcttccaactcgtatcctccagtctccaaaacatgattgtggtgcagctgcttgaattttcaaacttgatttccattttagaagttaaggatttgtttttttttccaaccacataccctgtcgctaccacatcaaatacaggtctctcatactgttggtcagctccgttttccgtgttgacctctgatactctgtaaacactcttgacacgtaagctgggtggtttatataccaccattacttttcctgcccagctttgtctttttcttccttgtattttatttgtaaagattccccagctcgtccccagttgtgtcagcctcttttcagtgtgctcagacccattaggtataaggcctatccatgttcctgaggaagtctggcccagagccgtccaggtggtctgacctgggcagggccccgggtctgccatcacccagcccatgctctcctgccgccccactgaagacttccttcacctctcttggacgttagggtttctctttgatggctcctctctttttctgggtttctgatattttctggttgagtggtgctactttcttctaacctatttttatttcattaaataaataggattcactaaatggatttcatacccatgggttgtatgatttgcactttgaaaggcactgggctagatgaccactttgagtgatgctgaggcattgctgggtgacttccttctttccttcttccctcccctcctcctcttccctcccctcctcctcttccctcccctcctcctctttcctcccctcctcctctttcctcatgaagcatgtgcacaggtgcatccctgatgctttgatcaggtatggcctgaaagacaagccattttagttagtttttggatacattacgaagtaatgtgggaagtaagcatcttcacctgtccctcttccctccttggctgagggacagtgtcctagtcagttccatgtgctgtgacagagtaccataggctgggtggcttaaacaaaaaacacttaatgctcacagttttggaggctgggaagtccatgatcaaagtactggcatatctggtctggtggggacctgcttcctggtctgcagatggccgtcaccttgttatatccttacatgatgagagagagagaaagcaagctctgttgtgccttttataagagtactaatttcattcacaagggcgccatcctcatgacctgatcacctcgtaaaggctccaccttccaataccgccatcttggggattaggatttcaacacatgaattttagggggacgcaaacattcagtccctgacagggttaggcactgtgtggctggcaatcaccaggatgcctggagccctgccgggaccacgctggctcatttcagccaccctggatgaatcatccagcctaaggcccatgcctggacattctgggtcctcagtgccttgcctttattttacctgatataatccttcaaacgaaaatgcttgtacttatttttgatcacttaatatacttggccatttaacaatacagattaaacttgtgttattctgttagaaaactgagagattgttttctgtagtctttgactgcatgcatagtctagggctggacttgggaggagaggataatttggccacaataggattccttattatctgtctcttccctcccaacccctcccccgacccccgccccatacaggagaccctcagatacatttctgtcagtaccctcagttacatattttgggagacgtaatacttaatgaaccaaaactctgttttgctggcagggaaaaaaattgggctgatacaatcaagataatcctatcaactttaggattattaggaatgttgataatcctatcaacattctatcaactctgtaatcagaaaaatatatttaaaataatgcgtgtttgttaaaaataaccaaacaaaatacagaaaaaagcaaagtaaaaattgacaatcccctaactccagtgttggtagttagggacagaagaagggtggaggatgtcttttgtctgtgttacatgattacagcaaaagtcactcttcattctggtagagccatagaaatctggccgagcagaggcagctgtgcctgaggagcctgacttcgaatcagctgtgttcatctttgctaacctcccaaagggaggaagctcaggaaaccaccgtagaaccccctaaaaggggagggtggctacagctgagcaggtgggggcaggcaggagtggagagaggcgaggatgatgagtcaggcaggtgagatggaggctttgtaggttatgttaaggctcctagacttagcatttcaagcagggatgtgacctgatcagatttatattttgcttgcattgctgatggacattggttcagtgctcattgtactggaagggtcaagaatagaggcagggacccaaatttagggggcttcccagggaatccaggggagaggtgttgtggcctggactagatttggaacatccagaaggggactggagcaatgacatacctatacctagtcccagagggccccgatctagctaaggacagagcgtgcagtcttgcagctgctgggctgatgacatgctggggagtgtatacctgggaaattctggtacagagataaaggaaatgctcaagcctccacctatgaatttgcccggtgattaaaatcatacttcctaagctttatagaagccctctgtttgtcccacaaagggccactagcacaaggaaatacataatgtgttcccttgtcattttataaaaatgtagactggtgctgcctgctgtgaaaatgccagtcaggttgcttccttcatagtaatcagtggattcttttgtccatttctgagtggaggattagccctctgtttgccccacaaagggccaccagcacgaggaaatacatagtgtgtccccttgtcattttataaaaatgtagactggtgctgcctgctgtgaaaatgccaatcaggttgcttcctttatagtaatgagtggattcttttgtccatttctgagtggaggattcctttccataacgtggtgtatttgcagtgtttctctcagaggaggagtgcctttctggtgtcatctgtcctgttggtggcagagttctgctgctgaattaaacctttgtgtcggccttggccactcttatggctctgctggaggtaaagccagtggagtggccttgtggcatttgctccgagttgttgctcatttttctgagattatcagaggccttagagggaagcattgaggatttcattatgctccgataactatcacgttgtcaataatatggttctgataagagtgatgggggatggtggggttttgtgagttgacagacgtgggtttgagacccagctctccagtcagaagccagcgccaggcctgtttctcttctctgagttttagtgtcctcaggtggaggggaggataatattaataacaccttcctgatgtggctccactgggctggccacgccatgggcacccagcacggggtggctgccctggttcgtgttaaccatcagcagggttggagagctccctccttactggtgttggaggtcattacctggcgggggatgtggtagataaagcaccttttattgtccctacacaaggcaactatggggtaacacaatataagttattcagattagagaaaatatgaactcttgctacagtgttactgcagacaggcacatatggtttgttaggatgacatttaaaaaaagtcattttgagttacagaataaaatcaaacaaaattcctttaatcaccagggctgggatggaaataaggcaaaatgttgattcctttgaaagacaatttttgggttttttttgttttttttaaaaaaactttatgtgttgatggtttactctggtctagtcgttcctactcctattctgaaagcaggccttgaattcctgattgtgtacaggattgtgtacaaacaatcaggaattcatcattcatatgaagaagttctgtttttccctctagtgtcatgaatattttcatgtacgtatatgttatgtgactagtgttaagaatgcatgtattatatatgtgcatgcgtctcatttacattgaatgtagctaaaaggaatatttgaaaagtataccttgcctgtctccaatttctacatttcaagttaaaaatgggaaataatcttagaatccatgcctgtggttcataagcctggctcagctcttgcattcccagctactgtctgacgaaactcacaggagctgtgaaaacaacgctgttttgtgaaagccaagtaggagcttagggtcatggcaaacttcagagaaatgtaaaggagcaggcactgtgggttttgtctaccccacccccccgaccccactgccttccaaaatttctttcttttttttttttttttttttttttgagacagagtctcgctctgtcacccaggctggagtgcagtggcgtgatctggggtcactgcaagctccacctcctgggttcacgccattctcctgcctcagcctcccgagtagctgggactacaggcacccgccaccacgcccggctaattttttttttattttttgtagagacgggatttcactgtgttagcccgtacggtctcgatcttttgacatcgtgatccacctgcctcgacctcccaaagtgctgggattacaggcgtgaaccacaccgcgcccagccccaaaatttctaattgaattttaaccttccacttttaagttctgatcctgatttataaaaacctatgtaattttcttcagctttcagaaggaatgtcttgtatcttcctatgggggtgttgggggaactgatattgacagaggtcctctgacatttcatagcctggcaaatagggtcaaacatgttccagacctcagaggattgctgaggatagctttctacttaagctagataaaagaagttttgggaatcttaccttgcactctgttttgtagaaacaactgtgtttaatatatttctcattactggctgaatgacctgtatgtgttcaggagatctctctatttaccattttaatgccacatatttaatgagcattcaggcccagactgtgaagactctggaaatgagaattttgtttcctatctcctgtgctgtaacaaaagcagcttaaaaattgcagtgtatagacctcaccttttatcatttttttttcagatttttaaatattaatattaagggtctttatctcagatgtttgttgtttaccaggtcatcagtatctggacgctggcagggtccttagcaatggagggagggagagggggtccagcctgcatgattggatcagtgttgaacctgtcccacctgtggggaagaggcagcatgcggagcagacaggtgcctgctgcaggtcaggagagctggccccaagtcctgacttggagggaaatggtacatattaatatcctttagtgccaggtactggcgtagctagtttatatgcatcacttgagcccccttgcatcactggcatcacttcaagatagacaacaaggggaatgcacatcatatccctgttcactggcgttcactggtagggaaactgaggcttaataatgtgcccaggtacacacagctgataagtaaccctgcaccctcgatctcacagcatgacattggaatccacctcattagacagagctcagctgcctattctgtcaaaaatgttgagttgtatcagctgcagtgtctgtagtattcctagacatttctgtgattctcataagtatctttgaaagggggccatttagtttatttctgcatttctcccttatctgccgaaatgcccgcaggctctgggacaagctataaagctctccgtgttatgctgtgttgcaaacccagtgccagtaatgatgcagtgctatttaaagataagaaagcaagctcacagagggagagcgcagcaggatgtttatgttccagaagcataaacacatgacctgtgcccgtcccgtgttcttcgtccatgtccccagagaggccgtggatgggatggtgcaagaaacccatcaggaagcagaattaatccttcctgcgggtggtccctgtgaagaagacacagcggccggtggtgtgacagcccacagctgtcgaaggaagggagaagagagggaccgagggccagcaatagggttttacagctacgtgctaggttgtctcacatctaggaaagagaatgttcatattatatagaaatgggcattttccctgtggcctgatatgaggtatccagaatattcctttaggtattattaagtcataggtttctgttttgatagaaacagcaggtggttcagttagtatttttgttgttgtaatagtagcttagatctcttgtttttgttttctttggccaagacagaaaacattctgccacacacattacttcatgactctggttatatattgagagcagcattaaaaaaaaaaaaaagtccaatttagtccattaggccattcttgcattggtataaagaaacacctgagactaggtaatttataaagaaaagaagtttaattggttcttggctctgcacgctgtactggatgatacaggatgcatgatgctgacatctgctcggctactggggaggcctcaggaagcttctaatcatggtggaagatgaagggggagcaggcatctcacgtggccagagcaggagcaaggggttgggtcacacacttttaaacaaccagatctcatgagaactcaccattgccagaacagcaccaagccatgagggatccacccccatgacccaaacacttcccaccaagccccacctccaacaccggggattattgtcaacatgagatttcggggacaaacatccacactatgtcgtagccttaaggggatcttacctctttgaagcattgtagagttcagagagtaggacattttgtctactgtattttaaaatactaaatgttctgattatgaaagtcagtcctggaaaaaaaaaacaaacaaacctgaaaccatagatgaagataaggaacaaaataaaaattacccacagtctccctcgcgtgtaccgcacagttcatgttttagtgtgtctacacaccatttaatgcaggtggacagactcaggggcaggtgtgccttgctactgctatgtccacagcacctggcagagtccctggtacagcataactgctcagcagttgggtgctgagtaaatattaatacatgtgcatgtggtaccagtcagggcccaacagagggacctcatgcgaggagttgctccacaggtgtggaggatgaaagaacaagttggggcgaccctgagagagcccagagacaagctctgcaggaagcaggcaccaccactgggccaggtgacctgagcccaggagccaagaggatgccctccactgctgatactacctctgcagtgggacgacatcggaccccactgccgatgctgggacggtgcttcccctccccctgaggctctcctaccagggccccctctcatcaggccccagctggaagccaactggaaagggagtcggggaagtttcatttgtgggggtccaagtgccaagggacagacaagggaagggtggatttgcagctaagaagatagtaaataaccagactacgtgacagtctgaagaatcaaatctggaatcaaattctactctgctctaatgtaaccctgtattttactgtgaataatataccgtgggtatcttccttgcttgatagatacagctccacataatttttctcaatgaaacagattctggagtaggcaacgttttcctcttttgtaaaatacaccaaattgtgaggattgaatgagataatgtcaaagtattagtactttaccctagctgattgacagtatccagtgatagtgataataagggtaattactactctagccaattttatcaaacctatggatgtttaaggaattgggttttttttttttctcctttgatgaatactcctgtaaatacatcgttgcctgcttgtctgagtctttctgtgggtttttagaagtggattacttgcagcaaagtctcctctacttaaggctctttgtatattttgcctaattgtgctctagaaatacatcaatttccagtcctccttctctcagaccacctgtccctcacattttcaccagttctgggtcttgttattctttttactctttgtcagtcaggtgattgaaaaatgtacatttttttaaaattggcatttattagtgagcttgaggatgtttttcacagtcatatggaaacagttctgcttcatgaacaagaccttggggccacatactggcttgttcacctggatgcattttctcagtctccctcagaatcatttttctccctgaaaaatgggattaaaagtattaatagtagtgcccatctcacagagtcattgcgaggattaaagagaggatgcatagacgtattgaatcagtgctgggttctggtagatgttcagctagccctagagattattagccatttgatgtgctgatcctcaggaaggtgggcgggagagacctagacgcagaaaaggagctctggagttgaggtttctagagatgaggtggtgcgtggtggcccagtccagcatggctctgggtgtgagcacaacataggcagatgtgtctggggctcagggagtcatttgtggattgagggtgctatgtgggtgtggaccacggtgatccaggatgatgcaggatttgggccggggaggaagatggcaacccaggttccatgccatctttaaagaggggatggttactagggtgtccagcgaccagccaagtggcctatagataataaggaggactcttcatgacatggaggctgaggtggaaagtcccagagtagggttcagccctggccctaaaaagtgccggagaacctgtagcctcctggaagctgtgctgtgtgcagagccaagcttcagtgtgacaaggaatggtgggagcaatttggagaagaatgaagacttggtgcagtggctagggaggcaggcagggtgaggatgtggaagggtgcagagctgctcaaggtcagcttcctgagcctgcggtgtggtcccttgctccacactcagaagggccctgtgtttgatttaatgctcttttcttgccatcttgaaattcttgatagtttttgaacaagggatccatgttttcattttgcgctgggcctggaaattacgttgctggtgctgaggggatgtgcagagcagaggtgggcagagaactgacgagaaggacacgtgggtaagggtgggatgagctggcctcaggactccgagcagagctcatgtaaaggtgtcgggcccaggatgcgttctcaggctggggtgggaggcctgatgatggcagatttctctggattacaaatagaatatgtagcagggtggttcatagctttgtgtgtctgtgtgtgcattggtaaatttttattttgaaactaaaattatttcaaaattagagaaaggctgtgagagtgcggttgagctggtgttggctctggaacagggtttcccaatgcaggcggcactggtaactatgtgccttgggtcattctttgttgtgggggctgtcctgtgccccatgggatgttccctgcacccctggcctctgccttctagatgctggggggcactttccctggtgtaatattaaaaaaaactctccacgttgccacatttggggggcagaatcaccccctccccgaattgagaagctatgttattggaacacagtgtcctgtattttgtctagcctctgctgcttagagctgcctgagcttggagaagatacttgttctctttccaaagcttcactgtccctttctgtacattgtcaggacggctgttaataccactgctctaaatgtgctcagttttgcataaacatcagctaatgttaaaattttaatctctgctaatataagaggcatcgaagtacacgcgagttcagtttgcatatggtgaggagggagacggcctcatatcgtatgtgtgtatttgccgattctatattttgaggttgattcctgttgtcttttgttcagttgtctcattctgttttcttttggggctttgaatgcccttttcatgcctgtgacctctctttactatgccttttcttctctgccagcaaatctcatccattcttccagggcaccttactgtcccccaaagccccagtgactgctctgtccacagggcttggtttctgtgctctggctctgcaatgcaatgcagaaggggctgggctcggaatggggttgctggtcaggccatgtgcccaggggaaggacacaggactcaaggagtccacccctctctcccccccttttttttttggtcactgaaatattttctttccaattctactagtcctgctagagctgccataacaaaatacccaattggtgacttcaacaacagaaattgattccacactgttcttttttttttttttctttttgagatggagtcttgctctgtctcccaggcaggaatgcagtggtgtgatcttggctcactgcaacctctgtttcccaggtttgagcagttctcctgcctcagcctcccgagtagctgggactacaggcacatgcactgtgtctggctactttttatattttttagtagagatggggtttcaccatgttggtcaggccggtctcgaactcctgacctcaagttatctgcctgcctcagcctcccaaagtgctgggattacagacgtgagccacttcgcctggccatgatcccgcacagttctgaaggccagaagccaagatcaggagaccagtggattgtttctcccgaggcctctgttcttggcttgcaggtggccccttgctgtgccctcacatggcctttgccctgcatacatccgaagccccagtgtctctctgtgtgtccaaatttcctcttcttagaaggatgccggtcatattggattagggcccacccgtgtgacctcattttaccttaataacctctttcaagtttctgtctccaaatacagtcacattccaggggctagagcctcaacatggaagttttggagggagacacacttctacccataacaccaatgtcatattaagctttatggaagaatagaccaatatgtggtgggttcaagaatcttttcttagaagaaaagtgaatctgtatatttgatactttatgatttccttatttgctctaagcagttggtaagaatctcagtgtcacttggctgaatgatacactactggtgcctccagacctatgaggagcctaatatttttgtcttggttgaaacaatgcaaatcctgggttttggagatgctcacagccagctgtctgattacgtaaactgaaagtggcagagaggaagcttttgcgtggggaaaacatgaaatatacaagggttcctttaaaacagagtgtacttctgaacatttactgaaggtggagggccctggacacctgatgttatcttatgtggcgttatctgggtcagatttcattgcatttcctgaagaggtaacttggcagtcctgggagaggctggaccttggtgtccaggtggcaggttcataagacacctgtgatttgatgtgagccagtcacagaggaagccatttccagagaggaacaaccgtgtagactgctttcctgggagtcaagttaaaacttctctcctgtgaccttgtcacccggcagtggaaagttacccttggctgcagccacgacttccgcatactcttcagaacttgctctgcccttgagttttccagctttcctttaatgcactaaacctttaatattgtattctcctaaatgagacgtctcgcatttgagcaggtaacactcggtaagactttgcttggtgggggaggaggttttaccttcctgtggcattctgaagctctccacatccacccatagtcatgattgtgttatatgacctcaagatgctggagctgttaattcatctttaacataattgacctgattacttctttcttgaaggattttgttcaaacctcagggtttatttaggaacaagtctaaccaggcctgattggttttcctaagtggagatacagctttgggaaacaaattaagaaaatgaatggattgaaaatgtaggaacaccgtgacagttgtgaatttttcttattgagggaaaaaatgggtatctgtgaatatttctcttacactatatagtgagaaatgacactctgctgtggatggtaatttatttctgtgtaattgcctgagtaaggctttctctgatattgaatactgagtagaactcttaggttatttttggaagaattatggattttctcttaggttttagaatattttttgtttgcctgttaagagaatttgatgaagatttcaatgtaattaaccaaataaaatggcattctgtatcctgggaagggacgatgtctttcagttctaaatcaatgcatcatttacctcctatctctcttgctggccgagccatcaatcctgtttttattaaatgttgttgttattgttttgagacggagtttcactcttgttgcctaggctggagtgcaatggcataatctcggcccactgcaacctccgcctcctgggttcaagcaattctcctgcctcagcctcctgagtagctgggactacaggcatgcgccaccacacctgactaattttagtagttacagggtttctccatgttggtcaggctggtctcgagctcccgacctcaggtgatccgcctgccttggcctcccaaagtgctgggattacaggcgtgagccactgcacccggccgttttttgataaattttaaacttctggtttgaaacttttgtttcctgtgcttaaaaggagacagttaaaagcactctgatttggactgacagaatgttttttagatgttagatagatctagctttgaatatttatttgcagagaagtagcagggaggactaggaatgactttttcttaggaggtgctatgcattccatcaggtgactgacccctttgtgagctgtagtggtcagtcccagcatggcccacacttgttggctgtcttagccatggtggctgtggttggcgggtacccagccaagggttttccatactgggggccttggtccagtgggggcgggtcgtaccatgacccccttctcctgtgatcttgcctcactggcccaggtaaattggtggacgtccttgactcctccacctccaaaaggactttgaactttggcactgttgggagtttaggctacacctcaaccaggcagagattgggatctaacctacttttaaaagccctctacagggaatttcataactttcctgagtgttaggttttggtgattaacagccttgactttttggagcccttcctttgccaaacatgcattcctcaggtgctcacttaaaatgattcttcacaatatgcctatagacgggtctgtctggtacagcatcctggagtggtgtcaagggaaagaaacatgctgcttctgccacagacggaccatgcatgggaagaaactatttgagaatggctctccaaggggctggtcggccttgtctgcccactccctctacctttctttgttctgtttctttctcttcagtgttggtccattttccttttttcactgttgcgtgttagcacatcattactcttatctccatatatttggatgtttcctgcattatggtgagcttcagtaggtcttggatgagttagttgttctcattccaaaatgtaaatttctggtgtttagtaggtgctcagtaaagcttgagaaagatgaaagtgagagcccagaactagtataaaaatacggataccaccatagcatggtaattaaaggggtgattgtgaagatgaggtagctgtgcctggatatgtgtgtgtgtgtgtgtgtgtgtgtgtgtgtgttggctggagaaggcttaccagtggtgctggacatgtcgggtagagtgttaatagtaacttaattgactgaatttggaaataatctatggggttagagagcaaggaggtagctgtgtaagaggatggggtcggtgaggtggggtggtgtgagcaatggagctcaagggctcaaggtgcaggcctggactgatggccactaggaccaccccaatggcttcagggtcaggacaggaagggaatgtgattattgcagcaggtagtagggcagtatgagtgtattattcatatatgtgtgatgaaatggagcatcaaataatatatcccataggatagaaaggcacagtgagtgagtttgggttaaaaattcgatgagataaagtggttgtacctcctatgaaaacaatttaatttcttattatgaaggcattactcatgttcttcagaaaaattaaaaaaaaaaactcagtcattatagacaattgtactcaagatgaaaacaccctgtactgtcgcaaccctgaagcacctctgttaatatgtgtgtgtcttctcacggggtgattcttgatcagagttactgaaacagcaaggcttgggaacaagaggcatgagagcaacactcaggacctgttcagttttctgcacagttccaggtgctcttccagcattgctggctccgagagagtcaaatattcagagcttgcaagctggggaggaaaggggttagggtggagataaagatctgggagatctacagatacggatcatctgcatttggaaattttgtttgcccttctcacacatttccatccaagttttctttggggaagaggggatccctgcagaggagtccagttgcaaatgtgaaatcttaaaaatgtatgtaaatagcatctttcattccgtgatacttgtttgtttgaatagaacattgttaaattttattgtgcttcagaatcatctgggtgcttacaaacatagattgctggactctggttctggagattcggattctggaagtctgaagtggggcttgggaatctccatttcttccaagttgccaggtgatgctgatgctggtagtcgggagtccgtactttgagaaccactcttctacctaccaagacttccaaaaaattggtactctgggaagatgccctgtgccagtcctgtggcttcttaggcacgtcttccagcatagactcctgcagagaacctggtacctgcaagtacctagtacctgcaagtacctgcaagtccagtgtgggaaatctcatgacaggcatcaacattccgtgacggttgacagccacctatggggtggctgatgccttttctgtgtcttcagggttttaggggaaggagagtctaaatgagtggttctaggttgtgggaagagcctggctttgatgttcagacacctggcctcaggctgcatcgcccatacttcctgtggaatggttatcatgagtcctgttgtcctgtaggtgaatcattgattcctgtctttgcataacctctcacttgatgataatttttttttaaaaaaatgactcttggaaacagaacacacagttgtagagggacctacagtacagcagaagctttgtggaaggatacaaaatgtgagggactgtagtcgaagagatttaaattggaagtgggaagagattgacttttttttttttttttttttttaaagacagagtcttgccctgtggtccaggctagagtgcagtggcacaatcttggctcactgcaacctccgcctcccaggttccagcggttctcctgcctcagcctcccgagtagctgggattacatgcatgagccaccaggcccagctaatttttctatttttagtagatatggggtttcaccatgttggccaggctggtctcgcaaactcctgacttcaggtgatctgctttgtgtctcttagggagcatgtttgaagagtcaaaggaaaaccaagtctgttagctttgcgaaacgtttttttttttgagatggagtctcgctctgtcccccaggctggagtgccgtggcgcaatctcggctcactgcaagctctgcctcatgggttcacgctgttctcctgactcagcctcctgagtagctgggagtacaggcgcccgccaccacgcctggcaagtttttctggaatttttagtagagacggggtttcaccatgttagccaggatggtctctatctcctgaccttgtgatctgccctacttggcctccaaaatgctgggattacaggcgtgagtcaccgcacccggcccgaaatattgttaaaaccaagtacctttgtgaaacattgttacaaaaaccaagtaccaagtgtgtggcattaaagtcaaacattaatttcaagttacagaaagaaatagcactgagtagaggttgatcgataaaaaatgaataaaatattcaacagaaactccttaaaaataatgtgagaaatggacatgtgacatgggcgtttaaaaagtctgtaaggccaagaaaagtttcctgaaaggaacactgtgcccaggcagtcctggctttgcaggattccctgataaccgagctcaggcatcctgcagagtgagtactgcccagatagaaccttctgcctctttggggtaaaattcgatttcaaagagagagaactgtggggtgagaaaggaagactgggacccaaggggccaaactagtgacaatgactgctgtcatgaagggtgacaaggacaatacctgctgagctcaaaccaccctttggacccagtgaagctcagatgttgcttccagtgcaggagtagttaagctcaactgttttacaatatccagttatttggctgggtgtgatggctcacacccacactcctagcactttgggaggccaaggtgggtggattgcctgagctcaggagttcgagaccagcctgggcaacatggcaaaaccccatctctactaaaaatacaaaaaattagccagacgtgatggcaggcgcctgtaatcccagctacttgggaggctgaggcacgagaatcgcttgaacccagggaggcggaggttgtagtgatccaagatcatgccgttgcactccagcctgagtgacaagagtgagacttcgtctctaaataaataaataagtagcaaaaacaatccagttattcctcaaatatttatgagcacctcttaatgtttcagatactattgtgacaagagaaaaatgtgtttgtatatgtaaatagaaaaacaaaagtgatgtggaagcgattacttctgtcattttggaactaccttcctcccatattaagtccatattatgacaattcaaaaataatcaaacttcgtaagatattacctgtgaaaggaataagtatttaaaaatgtattttagatggccttttagaaatctagtccatggacacaatctagcatcatgcagttgccttcaaaaagaatatcctaaagttcttgtttgttttctttttcctttcaaagtgttctgttgaaaataacccatttgtcattttagttttgatatgacttagttatacatgccttttgaagcagtacccacccacatagtaattgcgactatcttgtgttttgaaaaaaaaaaaagcgagacaatttgactttgatagttttaagtttaaaaaaaaaaaaaaacgctccaagttagactcagatgaaatcctttgatcttaggtattttatgaggaaactggaaaaaataatttcacaaatttctattttgctttataaaaattttatgattcataacacagggaaaatccagtaagctaaggcgttttttagtcgtttatcttgctagtgagtctttgatgtgagttatttctttgcagtaaggtggcatggatgggtgatgaggctaagctgaaaagttaaatctcataatggacatttgcaccctttaaggaagtaaagctctcaaagcatgattatggccaagatgaggccggtggcatgtttgtctcctaaatgtgcagccaggaatctcgacggtttgtctgaggtatgcaggtgcctggtagataaattagggtgagcatcattcatggcgtgtggtcagttgcaggccttcagccacagggatgacagaagggaagtgaggaatcagggatgggtttgaactgcggcgttgctttgggagtctctagacatgatcagttgcacatggactgttctccttgtcaccctcaggatctactgtcctgtggttgaagcctgcagctctcccaagttggtggcactgggcttcctgacttctcgatgtctaatgagacagtggaattctacttgcagccccactgcaggccaggtttatctctcctctgtcttcccagctggtgatttggtttctcagtgctgttttgggtgcacttttgtggaggattcaagctggtccttagccactccttgaaccagaacctcttttactttcttatgtagttcttctcttcctgtttttatatcctaaaactagtccagcgaccagcccatcgtagtagaagcgttggtgttcttcctaaaaggaattgtaaacatctcttggagagtgggttagccaccataaattgttttgggacttcggatacccccttccgcaaatgctatctagagatgctttaatttcatttcaattggttattgcatccctgatattttgaaactgttatgagtagaaaacattctggtttatgaacaatctgcttttcactatgaaatagatgggaattttaattattcctgcgctttgtcttagagaagttacatgcatgcatcaagtgttgtgtgatcttgtgcagttcttcttagattgagtttttggctcctcgtgtgcaggccttctaaaatcacaatgtccctgagttgggaaggaacatcaggggctatctggttcattatcctaccccccaccgcctcccacgccccacatttctggcagcctacgagtctttggtccctccccagtgctacctggccagctctcagccttgggaggccacctgcccgtgtttgacctgggttaatgaccgccagttcctttcccttaatacgactcatctgctctcctgcatgctcgctccttgggtgagagctgccctctgcaacctcataacggaaaatggcttgacttctgccacctcctcctccttcccatgaaagaatctggtcttttctatctctctattatttttaaaaccagattaggttggttgtggtggctcacacctgtaaaaatcccagcaccttgggaggcagaggtgggcagatctcttgagccccaggagtttgagaccaacttgggcaacatggggaaatctctaccaaaaaaatacaggaaaaaaaaaaaaatagctgggtatggtagcacacacctgtagtcccagctacttgggaggctaaggtgggaggattgcttgagcctgggaggtcaaagctgcagtgagccttaatcactccagtgcactccagccggggcaacagctagaccttgtctcaaaaaaaaaaaaaaaaagaaaaataagaaaaagaaaccagattaaacattcctaagtaattctttttgtgacttttgcctgtttattaactatcctggctacttaaaatgaatttttgagttatgaatacatttagatggttttaaattcaaagaagtctcttttttctcagtcacttccatccccagccaaacagttcttatccccagagtcagccagtgttaccagtttcttgtgtccatgcagtttgctttatgcatttacgtaagcaaatattcgtacacacacacacaccctttctatcttatggaaagttatttcagtggcacatgtaagtatctcagcatctcttgattgtcattctttttggattttttttttaaatttcatacttacaaatgatcatgtatcttaagttttctgaagtagccttggtttcgcattttgactgtatttattatggtatcaggttccatatttcttaaaagtaatactgctgctgcacttacattgaacaagtcaccaagctctgttaattttgcctgaaaaatgccactgctttgacatgatagaaaacacaggcaatagtctttatttctcactgctgtttttttcttattttgaagaatcaccctaatacataggaaaatctcgacttagcaaagagataaatgagactgtaattattgcattgggtttttcacaatgtatgttagttatctattgctacataacaaattagttttagagttagcagcttataaagcaacagatatttattatctcacagtttctgtgggtcagtaaatcaaaagtggcttaactgggtggttctgacatgtgcctttccacagtgactggtatgtagcaggcaagggtctcttatgatcctgagtgaggatgtcagccaaggctgctgtcatctgaaggcttgactggaacagaaggacccatttctaaaatgagtcactcacatggctggaggcaagaggcctcagttccttatcgcagagattgctccttggggctgactgagtgtctgcacatcatagcaacagctggctttccccagagggaatgatccaaaagagaggtggaagcctaatgtctttgtgacctaatctccaaagtcacacactgtcacctcttccatattctattagaaaggagtcactaaatcagatacccatgggaaattacccacctcatgaagaaagaaatatcgagaatttgtggacctgtttcacaaccacacagcatcattttttgaaggtagagtcaccttgagcatttaaattagggttctgctctagaagtctatccctttattttttcccatttgttaaccctttttctacttggcataatagcagccattacccagtagaagttgagagatttaggttgcacagaatcccacagtcttttcagaaactcatatccttagggtgtctgcttgttgacagcattgtagaattgaaacttgaccacgtgttatgtgttgggctgccagtggtgatcagagatgacggtgagtagtccgttgagttagggctgtttgcctctgtcggtgtcatctgggtttgaactggacttgcagtcctggtgggctgctttcatttccaccctgggtctttgttctcaccactcacatcttacgcctctgttccaccgctgtgtaagaggcaactgtgcacacaccttgcctctgccattgactgtaagctcctgagagagagagagaatgtgtctggttcagttttgtggccctcctttttgctagcataatgcattgaacatagtatcattctgcatttttgttgagtgtataattagatggtcaatgtggagaactcagagggattttaggagggggtggcagcaatataaggttgtgggacccaacattaagagagggaaaggtgtagcgggaaggcgttggtgtggggagggagaaagtcaagaggattcaacctggcaagagttggaagtgacaggaaggtgtgtggggtggggacgcaataggacagtgtgtgagattttttaaaaaatgcaggcaggggagggatgagtaggcagagcaccgaggatttttaggacagtggaaatgctctgtatgatactataatgggggatacatgtcattatacatttgtccaaactcaaggagtgtacaacaccaagagtgagccctaaggtaaacgatgggcttcgggtgatttcgatgtgtgaattgtaacagggatactactctggagcaggatgttgatcatgggggaggctgtgagtgtgtcgcggtagggggtacgtaggaaatctccgtgccttctgctcaattttgctgtgaccctaaaactgctctaaaaagagtagtcttaaaaatgcatgaaataggatcctgtctcaggactggggcaagagcaggtagaaatggaaagagtgactgtggctgctgtgtagcaggcacacaatggtcatggtccatatgctggcttagttattttttaaagcaactaaagttaagtaatgtatacgtaacttacatatttatgtggtccaaaaaacgttggtcatctgttttaatgcagagagtgtttaccctaagcctgcaaatgtgatgggtaatagctagaactagaaaagtactttagaatatggaaggtaaatacatgaattaatttaggtaagagtgacaaaacagtggaagtccctgacttagaacttattgtccgcttggacagctggtgtacgtgatcctggggtcacagtggctccctgtgcaggaagaacactatttcccagctcagataccatctttttaggagagtacctgccattgtggaaaataaggataaaggataacaagttacctccttaagacaaagtcataggagaaatggtaaattccagtatcttgagttttgagttggaacttgaaatttattttactacaagaacactgttgatggattatgtattttatagactttgtgggtggctatgggactctagtaactgcttatgcacagtttatatgagtagggctgctggatttccagatgacgctctcgcaactgaaccttcagattaccacctgtttctcagtttggacactattagtgtgctgctgtcacttatggctcgggcaccttatcttgttttatgtcttgatgaagaagtacaaaattcagtgtaaaagaaaaacatatgtaaagcttatagaatcaccccgttacacaataacaatgcagaacaatagattaataacaggaagagatgctgaaacttctcttcagcctagtttctactctgatgtttcttctctgcattgtacagccaatctatgaataatattttcattgtctaagcaaagccaccttagctaaatatttaattctactggagtcataaacagggttcaaaatatcacacatagattttatgaaagtaataaaatgcttcagaaagtacagtggctcagcctggggccactgcatctgataatttggttacacaccttgtcatgtgcttcctaaaagaatgacgatggttgcttatctgtgtttaagcttgtcattttgaggaaacaaagataagacatttttgctgtgtctctaaaatgcatgtgtaaactatttttatagagtaatgcttcagagaggagtaaaatttcctgcaacaggtgcttgtaaacagtaattgctcagtaaaggtcacctcccagctgttgcctacatgttacataagagaaccccttcacgtcttccgtatttgcagctctgtacctttgtgagtcacctaaaaaataactcatagggttgtttttctttctttcttttttttttctttgagacagggtctcactctgtcgcccaggctggagtgcaatggtgcgatcccggctcactgcaacctccgcctcctgggttcaagcgattctcctgcctccattctcctgcctcagcctcctgagtagctgggactactggcatgcatcagcacgtccagctagttttatatttttagtagagacagggttttcaccatgttggtcaggctggtcttgaactcctgacctcaagtgatccacccatcttggcctcccaaagtgctgggattacaggcatgagccaccgtacccggcaggtttgtttttcttatgacaaaatcaagcctggatggtgtcgttaacggtgaagttaaaatttttcttttgctttccttaatatttccgtgtttttttctttttctttttttttttttttttaacaaaagtctggtttctaaaccaaaatatttaatgcttcaaaaggaaaaaaatgtaagtcagtccaaagaaatgattcattttgcagaggtaattactactaacatcaacctttccaggtctttttctatgcagctatatcattgacatttttttaaaaatgagattacattgtactggagggtagactgctataacaacttttggttttggatgggaataaacagaaaaagtctcatctccagttcatttctggggagggtcaggaggtggggggtgcttggctctactcccttcgtatgattttcccttctttatctccaggatcttccccatttcacggagagacatggatgagaatgaaggctgctgagtgggaggggcttatggggccagttttgaagaggcctcataccttttggccacattccattggccagaactttgtcatatgactgcacctaactacaaggaagactgggaaatgtagtcaagttgcatgtccgggtagaaaagggacacttttctgtggaatagctagcatgtttgtaactcaattttataaaccattttgaaacttttcttaaaaaaagcttatttcagacacatttttatatgctggatctgctcacctctccatctctatcttattaaaagttcttgccagaatctctctccaattgttctccctccttctgccctgttccctcacagcagccacagtggttctttcaaagactgaagctacattttatcactcgcctgcttaaaactttacagtgcttctcccccagtggtcgggataatgttcaccctctcctgaagctggcctctgtggtccttgaccccatcaggtcccacggtgccctgcatggactctgccatccttcaccagcttccccccatcaaacggggcttgctgtcagctcttcctgcaactcccagccctgccgcaccactcagccttcttccttcaggcttcagctccagtgtcttttcgccaaagaagcctttcctgatctctcagccataaatgttcctctccccagttgctttttccctctccctctactcagttgctttatttaactgtcatattgtctttggagcacttgccaccatcagaaattatcttgcattatgtatttatagtctgtcttccgcctactagatggtgggttgcttgaggcaggaactctgtcttgtttacatctctatctccagataacgtgtctggcacgtgatgggtactcagtaaatacttgtggaataaagaaatgtcattacaggttctctatgcattaaaattttttagaaatggggtgttgcagccgggcgcagtggctcacgcctgtaatcccagcactttgggagactgaggctggtgtatcacctgaggtcaggagttcaagaccagcttgggcaacatggtgaaaccccatctctactaaaaattcaaaaattagctgggcatggtggcacacacctgtaatctcagctacttgggaggctgacgcagaagaatcacttgaacctgggaggcagaggttgcagtgagctgagatcccgccactgcactccaccttgggtgatagagtaagactctgtctcaaaaaaaagaaaaaaaaaaaagaaatggggtgttgctatgttgcccaggctagagtgcagtagctttccacaggcttgatcgtagcgcactgcagccttgagctcctggactcaagtgatcctcctgcttcagcacctccccgagtaagtggtactataggtacttcaggttttgaagcatgtgtaaaaaatactctagcagggacatcatttgagctgagcaggccatggaggcatcaaatgattagcagtagggtacaacttgttgtgagaaccagaaaagagccttggcctacataacatcctgtgctaaagaaagaaccctgactcccagcctgtgagtgttccagagatgggcagagcagtccctgcagcgcttcagggaacagggaagagcagctaacccctgatgcttctgtaagcactttgggacgccctttgctatagtagggtattgtcttagttatccctgacttgcctggtgttactttacatcccttaatcctttcatgaagactggcaaacacattcagtcctgccaaccttgaaagtaggccatgtttgaaagaacattggcacaaacgagttgcgaacatcttctttaccatattcatgttctttaccgtattatgaggacactgtgcttgccacatgggcagtcttgttttggggatacgtggttggatggacggttgggtggatggaagactcctggaatgtgaagtatctcaaggatgtgtgtccattgcatgaatgtatgtttgatctatgcagctaattgacaaagatccaccatcctgtaccctccatgttttatttttgccctgccattgttctcttcgacattctataatcatcaaggttttcttgccctcacctaggtcttgactaaacatgttgggtaaatgaatttcatattactactttcttgcgccgtcagccattgtgttcttggggactccatcctgagccttttttttttttttgagaccgagtctcaaaaacaatgaaggcaggtgactggtgaggagagttccagccactggattctccctcagtcccctgtgctgtggcccttggtgacccctagatttcagtgcccctgcctgacactggagtccctctgtaaagaagcccctttctagctagctagctgttccatcccgcacacccccacagaagccttttgctgccattagtaagcacgcctctattttctcacctgtgattgatcatgcatgattgagttttgtctattaaagcaattgataagttactaaaatggcaccaaaagaaattagaaaaaaattgttgcaaatgtcagtgaaatcttttaaaaaactgttgtactttagaagtgcctcaagtgactaatggaggcttaggactctgagtggtgtcgcaaggaaccttatgcacagggacactgacattagcctgtactgtcacccaggctggagtgcagtggtgtgatcttggctcactgaaagccccacctcccaggttcagcaattctcctgcctcagcctcctgagtagctgggattacaggcacatgccaccatgtctggctaaattttgtatttttagtagagacagggtttcaccatgttggccaggctggtctcgaactcctgtcctcgtgatccgcctgcctcggcctcccaaagtgctgggattacaggcataagccaccatgcctggcccctgggccattttttattcttactcttaggctaggtttctgcagaccttggttataactgcaggctctacattgataactgctgagtctctaagtcagaccagacgtttctccccatttagtgatacatgttttccatccaattgcttcatagacaccttggacacagtgctctatttcaatttatgttgacagttcatgacccaaactggaaacctgagttatcctggacttctgcctaccaccttctcctaagccatctcacctgtcctaaatgtcgtagcccttatctagttctctaagctgtcatagggtcctgtactgctgggctgcttgttgccttcaatagagcctggagcatattcatgtcggtatttcaaggccccgggcataagagcttcttaggaaatattggaatgaatgaagaaatgatgaataaatgaacaaatgaacagttgattgatttccaagacactttggggtggtttccatttagaatggtttttatttctttttactggaactaaggaattatttttgcttgttgatgccaacattttaaaagcactataattttgaaatgttttaccacattaaattcttttctattgcaggtcacatacaaatatgtcaacttcaaaggaggaattatttgttatatttatgcaaacttgtggcacttggacatttatctagatggttttttgtgtatgattgtgttcttggtacagctggaaaagctaactttaaatggcaggagtaattgatcttaatgacttactttgaattaaacttgtgcttaattaacttggatgttctaagtttctagagtcacagacttttagagctggaatattgctttttgaacttcagtgtaaggaagaattgcttatgctcgaattgatttgttctgtatcccaatactggactgagtagaaatcaattactttaatattggatgagagagtgattgattgaagatcaggtttttaacctctttttttgttctccttctcacagggagagtcccgtattctcagagtaaaagttgtttctggaattgatctcgccaaaaaggacatctttggagccaggtatgttggctttgtttttatttctgtggacttctgaaaaattgacaagcagttttcaaattcaggcacgcatcagaatcacctggaggacttcttaagacaaagctggctgggccccacctgcagggattctgatttaggaagtgatgctggcccagctggttccaggagcacattttgcacagggcttctggacttaccatcacaacagtagttaacagcctgttcttcacatgggctaatttcatgagattagcttctggtgttgtattctcagtagaaaaatacagtgtgggactatggctctgcttattttaatacttcaaaaatatttcaaacttagggaaacataaaagtgtcattttgtttctaggagaactggatattctggacatgtataatctgaattaagagatttggtgatttggggcgaatgtggtgatttctgtggcatttctagaagtaccagcagggaagcagccagatctttctgtgtgtttcagcttttttattttcagtattgcacttggatattcctgtatctttaaatcagcccttttgttcctattggctgtcagcaatgtgttgcatgaagttattggactgggagcagggtgagggtagccgtagagccacctggcactagaatttagccagattttggagaccaaagatcttttgaactttaaacctggaatggacatgagtgatgttctagtccaacttttccattttatggttgacaaagcttgaatccagaaaggttaaactacccgtgcaggtcacgtgggccagtgatgtttgaggagtgacaggaacactcctcctgcctctacccagtacattttcctttgtggcatggtggcctgaaaatactgtgaggtttaacaatgaaggcaggtgactggtgaggagagttccagccactggattctccctcagtcccctgtgctgtggcccttggtgacccctagatttcagtgcccctgcctgacactggagtccctctataaagaagcccctttctagctagctagctgttccatcccgcacacccccacagaagccttttgctgccattagtaagcacgcctctattttctcacctgtgattgatcatgcatgattgagttttgtctattaaagcaattgttaagttactaaaatggcaccaaaagaaattagaaaaaaattgttgcaaatgtcagtgaaatcttttaaaaaactgttgtacttagaagtgcctcaagtgactaatggaggcttaggactctgaatggtgtcacaaggaaccttatgcacagggacactgacatcagcctgtactgctggtaatgtcagagtgaagcaaatcccacctgaaggcactctcttgcttgaccgtgaagtcacactgagtggttcaccatgtgcctgcactcatgcaaggataagccaggtctctaggcatgggcagaaggatccctgcttcccttctcttccctttcagagcaacactttcagccatttccatgagtctgggctcttgttacccagctgaaatactgtttcctgaaactcacaaatttgctctctaccaaagcccaccttatgccctgcctttccatgaagcctgtcaagaaaattccaagaaagaaaatttgatattcctatatcaaagcgtgtgtctttcctctcctaatccctcttagctgccacagtaggtgcaatgtcattttagcttttgcagatgcattacctggtggtttcctagtatttctttcacttgcctcgattgctagattagaaatttactggggacagacatctttttaatatctttctcctactacttaacatatagagcatcaagggaaaaaaaaacaaaaattatcttttaaaaatgtaaacatttgcatgccaaccggtagtggattgtgcccttaggttaaaaatatgtattctcactctttccaatgaaatctgtagtgctgaaggagcaagttggatttagaaaattttggtgatttctttttaagcttgattgggtttttattttgttttatccaaaccctcccattaaaaaaaaaaattgattcacattgtatttctaagccagttaagtagatttaaggttgaatttgtagtggaattaggctccaaatcttagaagagcaaattcgtaccttgaatttttactgtttagataataacaggcagggtcatttctaagggacatggtggaaaggaatattcgtgatattaattagaaagataaatcgtattgtggccaagtggaccaagtgccagaaaatgcatcagaaactctgaatcctgcttctggtcttcattttcctagattgataagtaggcgcacacattcctgctttcctccctcctctgaagtgctgtagttcttcagggacacatttgccagtgggtctgagatgcaagtgtgaggtggcagtgtgggttaatgccatcttggtgtctcactctggagtggcactgcttattgccttaaaattttgccagatgacctgcattctccctccatgctatcttgggcaaatcccttaaaaccactcatgccactgtgtattagtgtacaacaaggataacagtttctttgtaactggcatgtggggaagaaccgcaaagtgacttctgtcggcagcagctctgtcgtgttttaaggtagtagtcaccgggcagaggtttggtagtgtcctctctggcagccaccgtctccttcagagccctgggccactgacatgccttttctccaagtctcttccctgagtattccccgcacctctgtgcctgatcagacacctcattctcccttggcagcaagaaggccgggtaggcattggagcccttgctgtagacaggataatgggtgaaagaggaagaacattttcatgagaggcatttcagagcctttaaagtggtagaaatcctgtagacaatgatgtttttaaaatcagggatttgcatctctgggactccaactcctttgtttccaagggaggttccctgggccacttggcctgaggttgggaaggggtcggtggttgcggggcagaatgtgatgcttggggatgcaggatggtcaggggcgggtgacggtgggaggagtggagcacgtcatctctccttgcccttccgaggtggtgatggaagctgcctacagctccagctcagaggccgggggtttctggggcccttggtgtggggcctctctcctagctggaggtggccccttcccccttgagaggcctgtgcctgaaatgcccttgtccttttcggccgtctcggccccagtccagtacttaggatccaagatcattttcagctccttccagccaagtctcactttattaaaggagctttgtttggagcagattggataaccgagccgcgactccacttgaacatctgagcagttggcccgcgtgggaaacagcaatggcagagaaagatgcttccctttggatcataccttgaggacaaaaaagggcagtcatataatctgtcatctaaactgggacgcttttgtctggaatgaatgcgacattgaatgggacgtccggacataagatgtaaattgagactgcagtcaccctaggtcagagacatccagcctttattatccatatcatggggaaaaaaaaatggaatgtgattttttttccccaaaacagcttaaaaaaaatgctaagtaaaagaaaaaaataaaaagcaccttttaaaaaagcaggcctcacataaaatgccactaagacatcaaaagagaagtaaaaccctgctcaaaacgcccacgtggggcggccacagctcacccttgtgtgcctgtgtcccgtttctgctgtcccctttcccaaggacgtactctgccctaacctcaccctgatctggtgactcctccagtggcccatcctatgttcaccagctgggtcctcatctcctccgccacacaggctgctgctctgtcccccagcagacctctccctgtctctggggtgcccatgacccctgggaagtgctgtgcatagttctgtgagtgaggttgacttgttgttttatgcttagaattgtttctttctcctgaaattagatttttctcctctgatgactaggattctattttatttatttatttttattttccacgacctattatagcacatagcacctaacaggtcctcaggaagtatttaccaacagattgcatgaagtgagcccgttcttcctccctctctccttccctccctttcccaccccttcactggaaactcacagtcactaaatatgccatgaagttgctgccttttgcctttgcctgtgttttcccctctgcctggcatctgctcacatcctttctggcagctgccctctcatctgtcagggcccagtttgggtggcaacactcctgctgaggcccctgcccgcctcatcaccccagcccaagaggacagaacactgctgcccgcctcatcaccccagcccaagaggacagaacactgctgcccgcctcatcaccccagcccaagaggacagaacactgctgcccgcctcatcaccccagcccaagaggacagaacactgctgcccgcctcatcaccccagcccaagaggacagaacactgctgcccgcctcatcaccccagcccaagaggacagaacactgctgcccacctcatcaccccagcccaagaggacagaacactgctgcccgcctcatcaccccagcccaagaggacagaacactgctgcccgcctcatcaccccagcccaagaggacagaacactgctgcccgcctcatcaccccagcccaaggggacagaacactgctgcccgcctcatcaccccagcccaaggggacagaacactgctgcccgcctcatcaccccagcccaagaggacagaacactgctgcccgcctcatcaccccagcccaagaggacagaacactgctgcccgcctcatcaccccagcccaagaggacagaacactgctgcccgcctcatcaccccagcccaagaggacagaacactgctgcccgcctcatcaccccagcccaagaggacagaacactgctgcccgcctcatcaccccagcccaagaggacagaacactgctgcccgcctcatcaccccagcccaagaggacagaacactgctgcccgcctcatcaccccagcccaaggggacagaacactgctgcccgcctcatcaccccagcccaagaggacagaacactgctgcccgcctcatcaccccagcccaagaggacagaacactgctgcccgcctcatcaccccagcccaagaggacagaacactgctgcccgcctcatcaccccagcccaagaggacagaacactgctgcccgcctcatcaccccagcccaaggggacagaacactgctgcccgcctcatcaccccagcccaagaggacagaacactgctgcccgcctcatcaccccagcccaagaggacagaacactgctgcccgcctcatcaccccagcccaaggggacaggacactgctgcccgcctcatcaccccagcccaagaggacagaacactgctgcccacctcatcaccccagcccaaggggacagaacactgctgctcctggggctgtagtgggtgtacaagttccctcctcctacggccccttgtcttagcggacttgggaggctcagaggctccagccctgtcttattggtgtttgcaggtccagaaatcttggcacatgacagttgcctggtaaactgccttgaattcattgagtggaacacaatatggtgtgctgtggcacctgatggccagcctggaggaaggggtacttttttctcattgtcatggaggtcccattggctcttcaagcatctctcccaagcatctaggagaggtgcttatttctcattctcacaaaggctctttgtggaccagcacaggaggcctgcctagggcttggatgaaaaatgagcatagagagaagaggttaagggaagcaagctcaagagtgggctcagagaaaagaatctgggggagtcaatgagatggcaggcaaggaacagtctccatttgatgctgatgtttgtgcagaatgactactttataccgtacagaaggagcacactctcttcttgtggtaggtcccagaaacttctacttgggggtacatgaggcccagctgggattgggcacagaaggtcatggctctgcacctgaccctcaccttaggggtcaggagagagccaaggacacgagtgatgggttagggaggactcaggcaccatggaatactgtggccatccttccatagaggagaggtacaggtggcaaggcaggcaccaggcagccgccgacagggtcaggaaccaaggcaggtccaggaaacagaggccaaaacagcagcaggaacctcaggcttagcagaccactgactcttctggaagtcttttagacgctctgtggtggggcagggacaagtccttggtgtttggccatggtgaagtgtgcagttagggtaggtgagtcgtgctttcttaacacgggggtaaggaaggagggtagagtttcagcagctcctgtttcttgagcacttgctatgtgccagatgtggtttgaactgtttacatgggagctcgttgggtcctcccagcaaagtcctatgtagcaggcactgttgttctttttgcagataaagaaactgaggcaagaaaggtttagtaagttgtagagctaggtattgaaccagggcctaacctcttaacagaagttagttagaggctgttacttgagtgctcacaggttggctggcaatgtgtttggaacccaatgtaatgtcattagattctgcctaaatcttgtgaagaggggatttccatttgataggtaagaaaattgagaagttatcatcagcccgagatcaaacaagggtatagggagtggtgggacctattaagttcagatttatgtgacttctgatgctatgctcagtgatagatctcttcttgaggataaaagtttgagaattagggttcctcgaaaaccctgagatttctttttttgaggggtacctttttgtgttagcagatttaaagagctggccattgtatttgatggtagctgagtaagccttttgaattggagtatcatcaactattactagatttagaataggtatattttgctaagtaagatcttaaagtttttcctttaaacttaggatagctgttcaaatttcaaactcttcttttttcagtaagctggagacatttaaccttttgtcataggcttaaagcagtcattaaacagggtcatttcaatgcaactttttaaacctaactcccctccctttttctctttaattatgatcagtggcttcatttgagcttacctaggatgcatttgagactataaagctgctttcttaaaacttagcaatgttggctgagacaaaccaactgtagaatctcatgctttcataaagaaggttgcaagacattcattcacagttgctcctttattgtgtgtgatgagccattggcatcaaacctgcttgggttgctatcagtttttcttttgagagctggtgacttgcaatttaaaacacacatgggctcaagggtattggagggacatggcagaaagtccttctgctgcctagtgattgagagtgatggggtcctaactctgtgtgaggatagctctttgacacagctcacctcagtcccctttacctaggtttaagttgttagcattttgctgtatttgctccatctctttttttccctgaagtattcagaagtgaattacagacatcatgacgtttagttcctaaatacttcagcccaaacctctaaaaaacaagaacatatttctatataactgtagtactgttctcacaaaattaagactaattgcctaatggactctattacctgatccattatctgaacttccccagctgaccttaaaatgccttttacagctggactgtttaaaccaggattcaattgagaattctgtattgcatttaatcggtgggtctattaagactctcttaacctagaatagtgataaaagctttttactcttggtctctttgcaaactggggacccccagccagcaacaccccacctgggtctcactctaccatgctggggtgccctagctcacctgtgttatagcttgtacctgtgttcagtggttcccgagttcttgcatggcacccaagaagaatgaggatatgctggacattgagggtgaggagggcagagtagaattttactgagcaatggaatagctctcggtggagaggggctgcagtcaggtgcttctctccttcccgtgtggctgggcccagggctttttatgggctcagaataggggaggggcaggctgcaggtagtattggaaaaggcaacatttgattcattaaaaggcattgttcagaaagaatcaatcaggaaagggtgggcagacaggaacagaagttctcgctctggttcgtgggtttcatccgggaccagcagtccagtctttcagccttcaggctgtttttggctcgaaggtggggtttcaccggggacccgcccctatctgcccaggcgtttggctgcttcctatcactatcaatagtccctccccttcaatgacttgtaggaaggttgtttcgcttaccacattccatcgtgtcctggtggcatcatcaatgaatgaacatgttcttttccccatgtttcttgtacgtactgtgtattagaagttggactaaaggcttgatcaaatttgaggcaggaatgggtgaggctacgtgcgactggagggacacaatgactggttctgtcataatcagtgattgaaattgatccctgggtaaatgtgggggcagtctcatccctccactatcaaaaattaacattttttttccccaggtgaccagcaagtaacgaggggaggggctgttttggtactgtatacctgcaaattttaaatattgatttactttacttccaaaggattggaaattttgtttttttctttctttgcccttctttgaaaacattgtacaaagtaaatctccttattttactaatggagaagcttctgaaagaggctgaacatacattgaagtacctttgctcagctgtaagcccttctggatcagaggtcagaccaaagtttgcagacagttggtccctgtggaccagactgaatccacacatgagtttatttggcctgtggagcactgaaacaaaaaaatgcaaatcctgagccaacgtttgggagatcccatattataatacaaatcgagatttccaggtttctggaaggtcttggcaatctagccacactgggcctgcatctgtgcaaggctgcatggctagaggtgtgtgctgggcacacccattaggtgggactgcgcctttctggccactagggaccgtacacctcctgttgttttcatgggggctggtttcccttgctgacacgtggccatgaggtccctcgaggtacaggccggcatttggacttgtcctctgcactgtttctttgttagcatttagaactgacttctcctcttcctcccccattgaggagcagcaccttactctgtgcagagtctgtctgtgatctgcaggctctttgcagagctacatttctctctggaggccttgctgagcagcctccgctgtctagggcattgctgagaatcacaacatcaacactaatggcccttgggccaaaaagtgtttgtcttaaaatccctgcaccaaatagcttgtgcaattactcctgtgagagccccagaggatctaactcttaggctgtttgttctagctgtattccttcccaccccccaaaccgaaatgacattaaaggatagtaactccctcccgcaaatatagataaaaacctctttactccctaacaaccacacaactatttacatttttgtgtttacctcctagtctttaagtatatgaatgcatgcaacgtcctttaaaaatatgtcaatcctagcctccacaccacccagccgaccaggtttcccagagggaagcattggaaatggcagatgggtaaatgcacagagctggcaaatctccatcctgcgggaggcttgctgtgcaatatagccatcgccacaataatggatcttcctaatgatccggaatcactgagcaaagactgtgccatgttcagtatacactaagtgagcatgcagggaatatatgatcagtttacaaacatttccacataagcttttttctctctcccactccagttttggtaaataaaagagcaaactagactgctttctttctctctctcactctccccctgtctccctccctcttcctctctgtccctgtccctctctcctgcctccctcattcactctgtcgtcctctctctctcctcctcctccttccttccttgcttcatttcccccctcatctctttcttcctcaccctttttaaaaagagacaggagtcttgctctgttgcacaggttagagtgcaggggtgcaatcatagctcactgtaacctcaaactcctgagctcaagcagtcctcctgcctcagcctccccagtagctgggagtacaggcacactaccatgcccagctaatttttaaaaatttttatagaggtgttgtcttgctgtgttgcccaggtgggtctcaaactcctgacctcaagtgaccctcccgccttggcctctcaaagtgctggaattacaggtgcaaaccactgtgtccagccagacaggtcacttttctgtaccattccctgatgttgtgagattagtgagagtccctactgtggaaccttgttcacgttgccctgactcctgatgcatggatatttgctgttaccaaagacacctctgctttaccaaatgttttgacagagtggaaggaaaactacaagacttcttgccctcgttttcttcagtctagaatgatgctggggtcactgagtctgtagggcagagaatctgatgtgttttttaggaagcggaaggtgtctgacacatagatgtttgacaaattttgttaatctggtcagagtgcagcctagaaaattaaattaaaaagctgctgaggagtgctggggtcgcattttgacatagatacaaaggcaccaatagggccaaaagtatgaggccagtcctagggctggtgaagtttggatcccctgcctgacattgtgtcctgagcccctggccccttcctgcacctctccctgagccgccggcccctcctcattccttcctctcctttatcttccgctgtctttgcctgtgcccccacgcccgtgccctgaatctggagtctttgtcttagtgcattctgtttgtctcactgtcttcctctgttttccttttcttgcggggaggaagggtagaaagagtgtaagaagctcaagtatgaggaagggaaggttgccaacttgagatgagtcagaaatgaaagcagttctgaatgtgtaagacaatgaggaaaatatttatttaacaaaaattgaactaccaaccaagccttcaggaacacagccagaaggtgctgtgtagggagaggtgtgcattaggatgctggagcgtggctgccggcgtccccaccccaggaggaagggactcgtttctctgaacctttttaatggttctccccattgtagacaggactggctctccaccccatcctcagtgggtgcagctttggggaggccgtgaggctggtgatcttggggcctcctatgcatctgtgttattgaaggtaacaatgtcccttctacccaaaagtcatgcttttaaaaacgcacaatcttgaatccatttgggaaacatctttggaactccagaatgttgtctttctcagatatgtattgccaatgttgtattacttcatttgctaagaaacattgtcatcgactttataaaattattgaataattctatttgggggagaagcctggaagctaagattttaaaggttatttataagttaagtgaactggcaaattcttaaatggtaaataaaacctttcctacatgctataggtagttatctaaatcagggcctaacaagcttttttatttattttcctgtaaaaagccagatactaagtagttgaggctttgcaggactgatggtctctgacatagcactaaagcagccttgggcaatacataaacaaaggggcatgtgtgtgagctgatggtccacgggctgcagtctgccaacctctgatgttataagccattgattttctacaacatatatatttagaactgggagtgtcagtgttattttgtcatggtttccagattaaactctttcatattgctgctggtcggtcaatgacagactaattctgctagcattgactttctgggccagggaatggggttcctagatagtgcagtagctttttatttattttcttttccattcaagggtaacatgcttaaaatacagcgtatgaagcttttggatatccactgtaaattttaaggtctaaaaatgaatgcaattgtgaaatgtttttgccttagagaaaacgctctcactgctttgtgttaataaatgcatgaaaaataatgatgaattaaatgcatacaaacagatgcagacataatttagatgagtgtattgcaattaaaatattgcccactttcgctacggaatattcgttggacttatgaccttagtgtaagtaatgtttaataaggaatctgcaatgtgtaactcctccgtaaattattaaaaggattggcattcctactgtataatatcaacacaagggatagaaaatatgcctggattcttaatgaatgtgtgctaacgttccttctggcataggaatgtgtagtaaatacacttcaagggttgttcgcatttttatccgtcattgttataggcatgttattgtgtgtctcctattgaagaactgattgatcattgttttaagcttctgtgacttttagatgcttaaaactaggcgttcatggtaggaaagtagagaaacatgtggaagaaatactgcgtttcaagtttgggagtggctggtagaaaaatcaaactaggctagtcttacagctttatcgcagttttgttttttttcctagtaggaaaatgatagtattggttgtatattaaaacactctctctgacactgacttgaatcacgtgcgagttcattgagaacagggattttaacttggttaggtgattttaaacattatttagcaaatctggaaaacaaaagagaaattttcaaatatctttcttccacggtggtgtactggctctctggagtgtgatttcatcttctcttattattgcatatgtagtcaagccatcatgttcttgaagtgagacttcacccactagtggggccgtataattcaggatcttttgtttgtccttacatagtttcttggcctggaatgtcaaaatatcagaaactgttctttctctggaatcatctgtctccgtgatggcctcgccatctgtacagtcatccaagctagggaccaaagagtcgtcctttactctctcatccttccggctgctgtgtctggctttcagtgtttgtgtagagcaggggtctccaactcctgtggcgtgttaggaagtgggccgcacagcaggaggtgagccatgggtaggcgggcaaaacttcctctatttacagctgctccccatcattcgcattgctgcctgagctccgctgcctctcggatcagccaccagcattagattctcataggaccatgaaccctattgtggaactttgcatgtgagggatctaggttgcacactccttatgagaatctaacgcctgatgatccgtcactgtcccccatcacccctagatgggaccatctagttgcaggaaaacaagctcggggctcctactgattctatattatgaagagttgtataattatttcatcatctattacaatgtaataataatagaaataaagtgcaccataaatgtaatgcccttgaatcatctccaaaccatccaccccactcctccaacccccaaaccagcctggagaaaaattgtcttccacaaaaccagtccctggtgccaaaaaagttggggaccgttggtgtagaggactcctcaagcagcgtccatatctgccctattctctctattcctccacctaggtatagaattctatctctaagacacagacagaccatgttcctgcctgggcaaacacttcggtgactgtgcattgccctgggtgaacgggggcacagaggtctttgtgacgccctgcaacgcatccctctccgagccgcggtgcgctcttcctcctctgtgccttgccggtgcccagaaccacccccttctccctctttgcacaagtgccttgctctctcctttctcaggccagtgctgctgatctgtctgtgtgacccgggtgcacagtccttggctctgtgcctggccctgtgcaggtctctgtggtggcacttagcacatggcgctaagattctccctgataggccttcagcgccgcaagggccagcaccgagtcctgcacatcctgctctagtcccacatcggcccaggggcgttgagctgaggacagctccctaccccctttctgtgcttggccgactccagcgcccgttcttctgcccctccttggctctgcctccccaccccttggctgaatctctcctcctttcgtgcttgttctccaggtgacttattcaggtccatattttcattacccttgcatttcattaattttctcatttattttattctgtaggtttaggacattctttaaaacatgcaggttctgaattttaataatataaaagtcctctgtgagtgcccatcacattgcttttctgtcctccctacattaaagttagcactgatgcctttatgtttaaggaaagcctcctgcagaggggctctgcccatgtaagttcattagaaggcaggtgtacagcctctgtcacctgaagacctcttaactgtctattccttctctggtctatcgaggtgtattgggggggttacagcaccctctggtggccatattgtcaggtgcatttttgttctagccaaataaaatgataacacaaatcgaatagtcgattggagttctttttcagaggacatcgttaattcacattttgtgtgtttcagcaggtatttaagccattctcgaatagtgacacttatgcagaggagagaatgattttatttaagtaatttctactttttacatagctagttttaaagtagataatacatagtcttaaactttatttcccctttatttctttcttttctgttagagaatttcttaaacttgtagaattatccaaataaaatgccagtcactaaaaaggaataattaaccaatagtgggaaaaaattaaattcttcaaatgaagagtactgtattcatttcatatggtcccagagataaaatgtttaggattcatttttagttttaaatgtttatgaatcagagcttcaacactcttccaggtttctttaagaaaggaatttgtctatctacggattaattaattagcagagcctctctgtgtcaccaagactggagtgcagtggtgcggctgtagctcactacagccttgaactcttgggctcaggcaaccttcccacgttagactcccaaatagctagaccatggtgcatgcaaccatgcccagctaattttttttttcaatttttctgtagatacagggatctcgctatattgcccaggctggtcttgaactcctgaaggcctcaagcgatcctcctgtcgtggcctaagaaaggaattcctcatatagaaaaatattgttatataaatagttgcctatatccatgctgtttatggtaacagctaaggttcatctcaaaagtatttgtatttggctttggaataaaaagaaatttcccctttcatagggttctgagattgtaggagtttttagtatttcaaaaagttaatggaacaatctgtgatgtgaaagagactcagaagaggctagagaggtctttaacacattttttttttgtattgttatcccttccctatagctaactttgtagatgacattgtttttcagactgatgattgtgaccctcaaccatggcagcaacaatttttaatttaaattttttaaaatgcaaggttgggtgattttctctctggatgcttgagttttgtttttgataaaaattctaccaggggcaggggaaagagtccattaagtcttggtgcaagaaacctgggcagattgcctaagtggatatgcatagcaaagaactgaaaacagagtagggggtgctgaaaacacccacagaggaaaatgcggggcggggggtgaatgcatctgctcattttgtaataaagtccttcctttcctttaacatctcttaatgttacaaataccaacaaaaaccatgcatgtcttcagtgggacagaaaatgagggaggcatttagggagaaaaaagtgtcagttgagatgatgttaaaataaagtttattttctttgcagttgcagacattaagatttattctctgggctgttaggacagttcctgcagctctctgtggtgacctgagcattgataccttttttttttttttttttttttgagatggaatcttcctctgtctcccaggctggagtgcagaggcgcaacctcagttcactgcaacctcagcctcccaggtagctgggactacaggcacctgccaccacacccagctaatttttgtatttttagtagagatggagtttcaccatgttgcccagagtggtctcaaactcctgtcctcaagtgatctacccaccttggcctcccaaagtgctgggattacaggcgtgagccactgcgcctggcctgtgccttggtttctcagatatttctgcccctgtagtgttctatgcactatgcagggaggtcctgactgctcagagcttaaattctgcattcctttattttaagtgtttggccaactgcagaggaaggtaccttgaaagatactccctctcctccctcactgctgggtcccctgtcataggagacctggcctgaggaggcttcttcctggtaacctgggttgtcactgggaccacatcttcccataagaataatgcttcaggttgtatgggagaagtgtctgacagcagtaacttcagcacaccctgagaatggcccttatggcagacacaccggacagcagtcactgaagaaatgagggttgccacatggaggttgctgggaggagggtgctaagtgaaggtgctgtataagctgcatgctttttacaagcagttgaagttctgctgtccagcccagagccactgggccaccctataaataagttcctccaaataaaccctgtgccttgtttgttagctctgggtctcttctttggcttcttcaacttggtgctgtccctgttgaagttaatacgggtttggcacaacacaggagtagacggttacctgtaccctgccagctgtccttgctacaaacatttgcccagagagtggcatttgtgccggttcttaaagtgtttcttgagctgcacattaataggccatgtcctctttcaacctgccctctggctaggtagaacaaacactcttcacctgggctctgagccagctgctcacctgcagcacccccctccttggagatagcttttcatgttgcatcttaccgagttgattgagtattcacttcgaagctccatgctgcacgcatgggcctgtaaatagctttttcgtgcacttgtgggtgtcatttcagatcgcttcatcggatttcagttacccaagtttttacttggttcaccgtaagtttgcaaaaaagactttttgttatcctgaacattgcaggtggaaacatgattaattttgaattatttttgtttaacttctaccctctttcctatttacagcctattttgtttattttaacttccgctgttaagacttctaaggccaggcatggtggctcacgcctgtaatcccagcactttgggaggccaaggcgggcggatcatgaggtcaggagatcaaggccatcctggctaacatggtgaaaccccgtctctactaaaaatagagaaaattagccaggcgtggtggcgggtgcctgtagtcccagctactcaggaggctgaggcaggagaatggcgagaacctgggaggtggaggttgcagtgacccgagatcgcgccccattacttaaaggaagtgggcttgtgttttgtggccttaaggatgtaatctgttggtaggagggaatgagggtgtcctggtaggggtgtctggctttagtgtcaccattcttttaggaattgccatgttgtggggtcacgtcttgtaggagaaacgttctgaagtcatgggattctctaccctcctctcctgctcttggtttccaccagcagcctgcttggtgtggttttgaaatggagcagagatggttttgatgagcctcactggaggtgctgctgagattaccgagaggccttgctgggcacctggagtcaatcatgccgggcactagcatccgtcatcttaggaggtagggattattatcctacctcctaagccatccctggagtggtggcttggagaagttttccagagaaaccgatcagttcataaagtttctgtaaaggattaacacagtgtagtccagaaatgtttgttcatgaagtcttggtttttgggtttaagaaagtgttctcctgtctgggcgtggtggctcacgcttgtaatcccagcactttgggaggctgaggtaggcggatcacgtggtcaggagatcgagaccatcctggctaacacggtgaaaccccgtctctactaaaaatacaaaaaattagctgggcatggcggcgggcgcctgtagtcccagctacttgggaggctgaagcaggagaatggcgtgaacgcaggaggtggagcttgcagggagccgagatggcaccactgcactccagcctgggcgacagagcgagactccatctcaaaaaaaaaaaagaaaagaaaagaaagtgttctcctaagtgctgctcaccctttttcccaaacaggacctaaccctgcgagggagggtgaattaggccatttgtttacagtttcatcagcaccaggcgtgcacggcgttagtcatggtccttgctctcaaggcactgtacttgtagcagcagtatggtgcaaatgtgcagctgaacagtgggcacaggttcctggttagcatttagtgccacaggaatgacagggaggtcttaattgtgatcggaccgtgggagctggattaccccagactgtagctcacttccctgtaagcttttggtagggagcttggaattagcaccattagtagaaacagatttcaaagggaatggtacctgttccgtatgaaacactttaaaactcccggtgtccacacgtctttaaaaaagaggcttaaagcagtttcatttcatcaaccccaaactggagaagctatgaatgaccacactgatgaatatgtcctaaaatatatgtatattatataaagtgtaaaaacagacaagcaggaacatactaccagtttctatcacagctacccttaaactatcattggagggcaattaagtgggtacaacctctagctatttggaaatatgtataaaaatgacaaatgcctggttgggtgctgtggctcacgcctgtaatcccaacactttgggaggcctaggcgggtggatcacctgaggtcaggagttcgagaccagcctggccaacatagtgaaaccccatctctactaaaaatacaaaattagccgggtgtggtggtgcatgcctgtaatcccagctactcgggaggctgaggcaggagaaccgcttgaacccaggaggcagaggttgcagtgagccaagatcgcgccattgcactccaggctgggcaaaaagagcaaaactctgtctcaaaaaaaaaaaattaaaattaaaattaaaaagtaaaataaaatgatgaatgcctgtactcttagacccagcactcccagttctgccagttcatgcagcagatacatatgcacacgtacagagaaggatgcaacagatacatatgcacacgcatacagagaaggatacgtatgcacacgcgcacagagaaggatacatatgcacacgcacacagagaaggatacgtatgcacacgggaacagagaaggatgcacaagaacatacattccctagttgacggagtcgcagattagaaacaacagaaaagcgtccattaaacaacagtttgaacctgtgttgagatatcagcatcccttctccttctctcccccactccctctgccctctgcaggttttattctcagcctgattttctccattggatgtcagccctaggctggcatttgcagagagagatggtggctcctgcagagcttacggcctgtattttattgggctgtgttgagttacccctgatgtgagcaggagaatgggatgttctgtaaattggcctctagcccatcgtgaattcatattttttttataatgtgtgagtcacactcccttctgtcttcatttccttttcacactcccagcagatcattctctctattctgattggcattttatacatgaggcagcagaggctgagacctactgtattttgagacactgtagctttatatggcataattaaatcatagtcatcaatcactcttaggaggtaaggattattattggcattttccagatgagaaaaatggaggatgagaaaggttaggcatcttgctgaagtcacagcagacttaagtgccggagttggagctgcattccggtatgcttgcatagactctcttctcatgctcactgcacgccagtcacctggtatgctgaggccctgcctccaggccttctgattcagctggtctgcagccctggcatttccagctcctcaggtgattggaatgaaagccagagctgggagccactggtctacaccaccagtaaatgatcgggttctcacttgatcatttaattaagaatcttggttttctgctttcagtctgagaactcttgttcatgctctcaggcatgtcttcacgcaggaaagtgatctttgaaattaataggtgcttggaaagcctttaagcagcaggcagtggagaaggccactcagtaggaagggccgagcatgaagcctagtgcacaggcttttcaagaccccacggagggtcttcagaaaaatgggtttcctttgtctccgtggcttccagtctttgttggccagcagttgtctgcttcaaatgagctggctctagaggggcctggagaacccagaaaaactttgtgacaacctgacaagtttgtgttaatcttctgggcattggctttctgcacttattgctcactgaatcactgaaccaggcaggtggggtactggagggcaggggatgggtaagaagggcagcctttggaaggaaaatcagcagagggcagggaccggggaagaaggagtaagaagggaaacccttttcttaggttcttataaatcagaagagcaataaagaaaaaatttaaatctaaaaaatacatgattaggatttaaatccagtatgcttcactacatataaacctttgacttaatattttctgtagtagatgaaaataggactttttttgtttcccttctcttcacatggtattgagtttttttgtgttctgaatacgtgttaagattaattatgaaaatcaaattaccagatacttgaaatataaaattagtaatattcaaagacgattaaatgcacgatttccttttctcataaaaaaagaagcagacggaacttgtattctgaaagcaaatatggaaatcacattaaacatcagaaaatcctcaccaccgccccccacccccatgtgcatttcatttctctttggtctgagttcaagggagagagaatatgaatgtgctgctagctcaggaagcttcagttctaactttctaaagagctgggaatgtgcttgagtctctgttatctcttgtttgcatttttcgctactttgcctccatttgatccagggaaaacttcatggtagggatgtgagatgtattttgagggctaaaagaaaggagtttgaacaaaagcaggacagtgttccgaatgtggaagcaaagagtccttccaaggggatgtgcggccaacgcctctgttcagcgatagtccagctgagaccaggacctgtgcctgatgcccaggccaccccacaggacggtcctccagcacctcatttctcctttcatcagacacctcttcactggcctactgggagaaaacggagatgagtgaaaatgtgcatacagaacatagggctcaaagggaccctagcaccagtggtgctcaagcctgtcccagcattagcgtcacctgggagctccaaaaacatattgttgccaagactcagtccaaagcaagtgacttccttggcctggagtgagatgtgggtggccagggtcaggaaccaccgagtgggtccacctctgcagactgggaaacagagtctgggaggctgcttgttccctcaaggacctgaagtgacatggggaggcaggactagccttggggctcctaattctgtcctggcctgtattccagtgtgccgtggggcacgtccaatttgaatctggccccagtacactctcaagccctgtgttgctctggtcccacagcttctgcccttgactttccatataacagcacattggtggccagggctttgcactaacctacctgcctccaacattgtttttgaataatggaagctaagcagatgcatattaatgcctgcattatggagaagactgtctcttcacaagtaatctgtagttgttagtcttgaaagtgggttaattcattgtctttctagagaaaatgattgcatggcctaatagtcttccagttagtctgtgtggcaaggtagaagccaggagtggattcttagctcctgttgagtgctgctgtcctgaatcagagatcttctctcccgggccactttgtcatgagcaggattttgaaccaagaccttttcttcacctgtctcgggggccctcaccgtgggctttgtgatcccctgacagctccaaaagcctttatcctcatccaatatctggtgaacagctgacacctcctgggaatctttaaaattgttctctaaagaaaccattctgctgcaagtacctatttttagactttataaagcccacgtcaggttgtcgctgcctttctctctgtctgctaagcctgctgtttgaaaggcagcaacaggatcttttgtctttaaaagttcagccccagctggtgcattccccacttgaactccatagccctggtgtgctctggggtacgtctcttccaaaacccaaaccacaggcagtgacctttacaccccaggagttgaaataatacacctggaggaagaaaataacttacaaacaatgagcctagagtataaatggctatgttttaaaaccctcgattttccttgggcgtatttaacctgtacagctagactgttgtgagttttgggctctctagggggctgtccaagttcagaacaagtgcatctgctggcagccagcttaaggagttagcagccctcaattccaataacgaacgtgtaaatcagaattcaggtgtgttgaagtggggccttgcacacatcctggtcagcccagggtgatttcctctctggccagtggttttggcttttttcttcacatgaactcgtctgttgtaactaatggtcactgagtgacttcagaggtagtgatagctcatagtgaagcccgtgacccacagcggtgggcacacctcgatcccttctccttttcctccatccccacctttctctccttacttcatcccttcctctttccacattgggtcatccagcagaagtcaagtatcttctatttcatatctttattgaataagagttttacgatccatgttattgaagtaggtaaatggaatctcttatgtggaattctctaaaaaagaatcaaaactccagtcaaaccaaaccaagtattccaaatcgtttttagggaaaaaagatataattagaaaagactggagagggtatgcaaactattaacattatgttagggtggtaggagtataagttatatttgctttttctgaatttctaaattttcttcaattaacatattgttcaaagtatcaaatacatagaaggaagagtgtgcatgcctgttatctagcaaacacacttcatgcaaagaaactctcctaaggaagtatgaagttatattttatccttatctatccaaagagagtgtgtgtgtgtcatatacctaaagaattagttattaagatgaagcattgcttataatgaaaaagttgaagcaccctaaattagcttaataatggtatatctttataatggaatagtataaagccattagaaatgatgttacagataagtatttaatgttatggaaacattttataacatagaatgaaaagtaaattgtagattggtttgtataatttgatctcatcttaggaaacacataatacagaaatatagatgaaggtctgaagggtattaatgccctaatgtattagtagcattacctcagagaagcaggctcatgagtgtttattttcttttcttctaactaagtatgtatatgtgtaagtgtgtctgtatacaggagatgtacatacacttttcttgtgaagaatctgtattgcatttactactggaagggtttattttagatttagatattaaagttacctctttgagtgagaacctatgatttatacttcttagcttaccttttacctccattatttaaatctgtctttttctgccatcaaatagaagatgtaacagtgataaaaaggctgggtatggtggcttacacctaaaatcccagcactttaggaggccaggggttcgagaccatcctgaacatagcgagtgacgtagtgagaccccatacctacagatttttaaaaggttagccagacgtggtggtgtgtgcctgtagccccagctactcaggaagctgaggtgggaggattgcttgagcccaggaggtcaaggctgcagtgagtcatgaatacaccactgcccttcattcagcctgggtggcagagtgagactctgtctctaaaagtataatattttaagaaagaaaaaacaaaaactagtgataaaaagaacttacaacaaactgatttttaagtggactgttgataattataagggctgagatttttaattgccatttgtatcaatgaataacccccctgtcaccacattttctggtgtgtttggtgtgtctggttcctataggagagacagtaatgctatttgacatgctttattgctgattagaagcctaatctctgtaatgggaagctcagtaatgaagcttgttcagaattgtgttacagtcggttaatgaagctctgagatcaagggcctggcttttgatggcccctatttcagaatccagaggtttgtttctatttatttgggttttgcaggtaagttccctggactgaggtgatctgaaggttagctctgctataataggtaaattgctaagaaaaacattggccttggtatgtacaacttaaaattttattggtgagatagtcttcttacaaaacaatcacgttaagctagaacttggtgtataaccagcatatatactcctgccaccctcagtgtgtagccaaagttctaaattgcatgcacagataacaggcatataattggtgatttcagaaaagttatacctggtgggcagtgagaggcgagccctgatctgggaaaccccagtgcttcaaggggaagcaatctgggaaactccaatgctgggattgggattcaatctgggaaaccccattgctgacaaggtacatggtacaagcttgataaaaacttgcttaatgtcacacttgtaatcccaacactttgggaggctgaggcagctggattacttgagttcaggagtttgagaccagtctgggtaacacggtgaaactccatctctacaaaaaatacaaaaattagcctggtgtggtggcatgcacctgtagtcccagctgctcgggaggctgaggtgggagaatagcttgaatacaagagttggaggttgcagtgagctgagattgcaccattgcactccagcctgagctacagaaaataataataatttaaaaaaacttaatgatgatagcatttgagttggcttttcaatcctggtttcctaaatatgtgagcctggaccattaaactgtgtgacaaggagctgtcatcttaacatacagacattaaatgcattgttcaagatcagaaatgatttcttggttctgaggcactattgactgtgtgtaaggtgccatcgttaatttggtaacaaggggagacagtggcagggaagttccttttgcctgtcttgtgataggcttcctattttctcaaaggttaagatattaaattgtcttaagcaaagaaggtatttaagggcatcatcagggttagttctcaggtctcctgactcctagcttctctagtttagtgattcacgttagcctttcaacagtttaccactcactttaatggtttttcctagctgtcttgacatgcttttcactgcttacatggttagtttcctacctagctgaatgcaggcatctgtgctgtctgctgggttcgctggtggtgatgcagcccacaggtacctgtctctttgaggggagttcagcaaccatctatttatgtcgaaaggcactgtactgggagatgaagaacacggagttctaggcctccaggaatttatcatcacttgctaatttgagctgagcctggcacttgaacataggccatagatttccagatgtgaaaaaaagaaagaaagaaagaaaaggatcctttaatgtatagacttgtctttctgcctgctttcttcacttctgatcattttaaacaattgatatcctagtttgatgtgatcatgttccaacacagcacaacagcatgtatggtttggggcatgcacctgtggcagttgcaaaggtttttacagtgaagtggctaagaggagagtaagaccagtgtatagggtgtggatgaggtcagatgcgagactatttcttgatttgagtcattttatttaggagctatttctttggaatactttatatatgagaatgtacatctgattggaagacagaaggtactgaaatttacctcttgatcaaattattctggtataaaattaaactaaataccaatcatatacttaatttcacagacttgcaaataatatactggggtaatggaagtaagagacaggaccttttatgtggtatgaagttctgtgataattcctatcttcctttgtacctaaaagaggcaccctctcctgtcatactgcaaacagatgccactactacgtgtagacacatttgccagctgtggcacagctggtcacccagccctcatcacagctgcctgtaaaacccagatttattctcttccccctgatcttttttagaaattactggtatcgttttagagagtatccaacttacacacaccacttaaataatgaattttccaatttcttctttttccacggccttcacgtcatctggtaaatattcccctcaggttggcatctgcttctgagaccctgctggacctagatatattcaccagagatgggtgaaggctttggaagagtgaagtggttaggaacatttcttccgatatctcctgctcattgtttttgacctctctgatttccagtatattctctgctccagccacacagctttcctgaacagctaagtcttgctcaccggtcagggaccagctcaaaggctgtccctttttaaatttatttcctgggtcttctcctggcctcttccctgcactcggtggagatgcctgccccatggttttcagtagcgttggctcttagctgttccgttctggggaaggattggttgttttccttttctccatgtgtgttgtgaatttcattctgtgtcaccgcatcacgcgaggtgggtagggaagagaacttttacgctccccgctgtcgttagtggcctgattacgagtctgtgggaaagaatgaaggttggaaagaagatctggtgggaaagaacaagggttgtccttgagcagccaaactaagctgtgagaatgttaatgtaataaagcaggaattctaatgggctgcctgctacagaggagatgggagatggtgtagggctcatgactgtaaaagcaggagccaccagcagatggtgatgcggcctcttggcccaggtgggactctgcatctccccctcccatggacattcacttgataagtgttgggccggtcacccatgccctggtcgttcttatcttatcgaagagtgctaatataagtaagctgtaaattcccattgtaagaaataattgccttttaaaagggagcattcaagaaaaagaccttttggctcaataaagcctttattttcctcaacactcttggctcttaaaaggggcctgttcttggccttgaagtgggaatttacacagaactttaaacagaagaaaccccctctgccttgggctgcaacttgttgtccctggcagggtttgggctgtggggtcatgggatctgtttgtttgaccgttgtatgcaaaaatgattttaaaattggcctccctaatctgttggagacattagttaaaaaaaaaatgagagtaaagaggaaaatattttgctattgggtatgcactggatccatttttaaactgagagaaggtgaaaggggtgactggttgatttcggataatacttttagagccacggggaactgtgaaagacaagaaaatgtaaaaaaagcacattgattgcaggaccggtggtccaaaagcagcacgtgaaagaggtttcaaggctgtttctacaaacaagaatgccaaaggtggcataggacaagaagcttgctggatgtcacgaagctagtggagatgggatccaaagctagttttggctgatgaaaatacaggctcatgccctgtatgtgaggacagtgggacagtaatttaaacagaagtatctagaggagtttccttattgccttgaatgtatttctttttaacattgctatggacatttaggaaaagatgccactgatattccaaaaggggcattccatacacctgagagggatccctgaggctccagggtcacctgggccaagccaggtatacacacgtctcatggcaagttggctgttatcataacttccctggtgttgttttgttgcaagggcagcattgtggggctgtggtttgaattgcttttttgtgtctcttgaatacacgaagttcctcctatagtcattggctctgctgcctctgatgaggcacttccgtgttccccacatttgaatttgctcccgattcgagagaggcaggcatccgcggcagcagcttccaacccagacaggcttaagccgcgcgagggtgcccgggtgggtggctgcgcagggccctacctgggcgggagcggctgcagagccctgtccacgcggtgcctccccagcacggcacctcccactccaggctgttggttacctggccgggagctggcggagaccaggatttctcctcgccgccgttgctgttgttaggggaaacagaccatctgcatctagacctgcctctctctccgctccccacttcagacgagctcttcctgcctggaatctggtaagtgccaccgaaggttccgttccctttattactcgattagtgcccacagcatcaggagaaggttctcttaccgtgaatccattagctttaacccaaatgtgcaggattagggggattatttgaacttgcttgctttctttttaaaatgtccattagacattttttgcatgcttcaaaatcaaaaggcggcacagtgaaaacattttaattatttatgtatttaacctgtatcatcttgtttctaacctcttttcttcagggtggtgcagtcaaaaattacacagatattgctctggtgcctctccccccttttatgaataaattactgcatttgtcatcactgtgttcctgaaatgtcaaaaatagacactgtaaaggaatctgtcatgcagagttcagaaattttcaaatttctgagttcaaaacctcaggtgaagcgaggacagatcttttatttaaaatttgattctttgtaggcttcactgtgaaataagttcaatttagagcatagctaatgcaatcagccagctcgtgatgggacaacatacttctctattgttttacattcacctcctgggatacacacactttctcatttgttttataacctttacaggaaatacctggggatgagtcacatgacccctaacttgagtttttacatgtattcacccagattaaatgattttgctcttatatggataaacgtgcagttaggaactttaaaaaattgtaaatgaggtgcataatcattactcattgtcttttactgcattcttcagccctcaaacatacaaactgttattccctttaagagaaaataaaactggcacttatgttttcctttactctaagttaaagactacccatgttatgtgccattaaaaaagatgtagaaattaatctgtctttttctttgacctaatcttactagcagggatattggggctctacttttctgttctctctctctctttttttttttttttttttttttttttaacatcagccacaggtaatactctccggtaaacatataacttgaggaaaattgaattaggttaatgctggaatagaaaaccagggcagtgcctgctctttttggataattctgtataaacaatgagaaagtctcaggctgccttagacaaaggctgagacgggagctcctgatgatttttatgagggggaagaggagatggtgaggaggagggcaccgagcatgtgcagcaacttgaagcatgtcagaaagaacatttgccagaaatcttcaaaaccgtggcggtcggtaatgtgtgaaattgaacttctgaccctgtttgcttgatggcgacttctcgttgtgcttgagaattgtgtggcattgggtccctggatgtgggaggaacagcaaagtggtttagtgaatagagagggaagtgccttcctttttgggtgggacttgccatgatagagcctgggccgtcaccttaaaaggagatgtttctgttgagagatggaaaattggcaagacaaacgccataaaccttaacctgtttataattccttacctgtaagctgctttgcacgcaaggtgatggttctacctcataagggacaaggaagaacagcacataaacctgactgaatggagtgtggctgtgggtgggagcagctttacaagaaggaaacggggccccctcctgagacacccccgtttgcttctgctccttccttgccattgacgtgcccttctcctgaaactacccacacctgtgtttggcaacaagcggctgccccttgatccagatgcatttttcaacttgcgaactctcacctcttgccaagggacccaagtacctggttaatgatctttaatgtaaatgatcctttgccttgattaacattgagctgggttagtatgcacaggccgagctccgtggtcctcccatgtgatcccttccctgccagccacctgcccacctgtaggaactgggcatggccagttttctctttatgtgctctctttgccttggatggaatttgggctgagaccgatgaggtggaaccaaagctgttcagcagaagagagcaaccacagagcagcctgttgggtggagggcttgagggttcctaaaatccgaggactttctggtgagcctctcccctgagcctgcttgagggaaggcgctgccccacacactctccagtgggtgggggtgggggtggcagcggctgatcaaaggttctcacctgcaagtgataatagcctgggtctctttggcaccaacctgccttcttcacctttctgctcagacaccccttggcacccctacataaaggaaagagctgtctggatggcctagtaactgtaggataggtaaagttagccctttcttctgacctagatatgtgatggtggtatttctacatgtttatgtcgagaactttacaaagatgaaagaaaagctttcagagctgcagaaatgagaggtggcccttttttaaaatttattttaagaaacaacttttaaaaccactttttgaaaaattggatggcaccgtcctgcagcctatcagatttcccttgagaactggggattattggcttattccttgctacctccaatcccaaattaagcagagtgacatgtaagaagctggggacatcagcctaaagcgtttatcaggtatgtccttcccaactggatcttttctactccctggcccgaattttgttttagggaatggggcctattttaattgctggtggcaaaaggatccctgggcagtgtttccatggtcctctaaggtggagtgtcggggagctgggggacacacagtggtcatgggttatctgtcttggcctctttcccagaccaagttctgtctcatgcttattggtttggctgctagttatagaatctgatgtttaccttagaatcctaggatggaaagggttaagaatgatttctaatttgaattccttgtttctagggagttattaaacctatacattacatttattattttacaaagcactaattcataatagttgacaggaacaactattttttggcttctttgtttttttgtttgtttgtttgagatggagtttcactctgtcacccaggtctggagtgcagtggcgcaatctccgctcacagcaacctctacctcccaggttcaagcaattctcctgcctcagcctcccaagtagctgggattacaggtgctagctaatgtttgtatttttagtagagacggggttttgccatgttggccaggctggtctcgaactcctgacctcaggtgatccgcctgcctcggtctcccaaagtgctgggattacaggcatgagccaccacgtccggccttctttggttttcatattgattatattttctaagacaaatactcatttatatagtctaataaaaattgttaaatctaattaaacaactaataaaaatagttgtttaatccacgttgacatcttcttacattgcgatagaaattttgatatatttatccatatgatgaattgcttaaagccggtggttctcaaccagtggcagttttgccttctctcccacaagggacatttgacactatctggggacatttttcattgtcatattcaagggagtggggtgtgaagctggcaagcatctagtgtgtagaggcctgggtgctgctccactttctacattgcacaggatggcacctgacacacagcctaaagcgtcggtactggttgaccgtatacgaaatgctgtggaagaccaggcacggtggctcacgcttgtaatcccggcactttaggaggctggggcatgaggattgcttgagcccagcagtttgagaccatgtttaagtttaagttcatttaagttctctgaagtggtgattctgatgctatatagatgaaggttggtttgttgaagagctgactctggtatttcatccaacatctgcatttttctttagctaaggatgccttgagaaacattctagtctcttaggcctgaatttgttattagcttaatagctttcctctggttgaatttaaatggaaagaaaattgcatcttgcaacaggaaaaagaacattagggaaaaactgaggaaatggaaataaagtgtggaattttgttaataataaatcaaccttgatgcattaattgtgagacatgtcctgaaccaatgtagatcttaataataggggaaactggcttcagggtacgtggggactctatcttatctttataataattctctaagtctgaaacaaaaaagtttattaaaaaagcacaaacaaaattgctgccattttgttaacagatatagtagtcaatcttactgttttctttttctttgaaataggctgctgcaaaggtatgttctttgttatctcggctctctgctcagggtagccatgaaatggctcttttaaaaatgtgcccagataattttgaaccatttcaaaccatattatgtgattttaatttattttccattgcattcactaactcatttctgggtgatgtatttaaaagactagacagaatttacaggtttaaaaagttacattaacagaaaatgtaggtgccagttgaaatactgtcaactggaagtgctaccagcaatgtgctagctggacaatgggacttgtcccatttttttgctgggtgacagctatcactgcctcagggaggctggtgccatttaatgcctctgataatcagaataagtaattgtggcttctgggtctgtaaagccacaaaatacatatgcaggcctattttaattgacggtaagtcatgaaatacactattttcgtattaagataacgtggatatgttatggaacaaagttaaaaattagcatgaatttttaaagtactactggagattgttggctttaggttcgtgaaccccattcctgcccccacactcctgttagtggggctaccagaggggccagtatgaaaagcactggacttacagatgaaagaacttgagctggaatcaattcgagtcacttaccttcgctacaggtgggcagaggagtcatcctgcaattttgttgtgaaaacagaatgagataatataaaatgtatttgaatacagtgaggtctgtacagatgctgaatctattactttgcagtaggagtcaggtgtggccccacttccccaccttcttacctacttgtatcttagatcttatatatattgatattcacttttggtggactaaggttgtctttgttgcaaacctggactctcttgtattcttgctcagtgtgtgtatgttaatgttagataaagaagattaggctggtgcattggctcacgcctgtaatcccagcactttgggaggccaaggcgggcagatcacttgaggtcaggagttcgaggccaccctggccaacgtggtgaaaccccatctctactaaaaatacaaaaattagccaggcatggtggtgcctgcctgtaatcccagctacttgggaagctgaggcaggagaattgcttgaacccaggaagcagaggttgcagtgagccgagatcacgccactgtactccagcttgggtgacagagtgtgatcctgtctcaaaaaaaaaaagcagaagattatttggaaagctatttttaaattattcttcaaacatatactaaaatagagaagacaacatgagagccaacagcataatgaaaccccatcactcagcctcaaccgttgttaacagtttactatctttattgctactgaaggcagttaaatatttcttggcagtccttttttatttagcatataccatcagggatgacaatagaaacaggtttcaaagtcaggtgaaataatgtttctctatatgagttcaccactaacttgatacacagtttatgtttatgtttatgttcttattacgttcgtgtattaaggcaacctttcatccctgccccctaataggtaactgtctttatttgttctgggattatccctcctccattgccctttttggaaagagtatggatatatttgtattttctcttactcataaagcagcacatggtacatactgttctgagccctggttttctttttttcacttagcgttgtatactggaactcactcaatgtcagtatacagagaattcccttgtctttttataactctgtgctatacgctgacggaagttcattcagtcagtcccctattgatggacacttgagttattctcagacttgtccattgttttgcaaaaatagccctgggcatatgtcatttggtatttttgtcgaggcattccaataaaaataagtaaattcttcctctcttgccttgaagatgtgcagctcctcagtaaccttttattctctaaagctctgtcctcatctttaatccctgatttaagaggtgcagctcttcaggccataaacctttcttcctgcctcaagtttttaaagctacaaaggaacctaagagatcccttgtgttttacagctaaaggacctgagagcaggaaacaaagggagagccggaagcccaggtctcctgttccctgcctggcaggtgatattctttctgttaaactctctttccctctgcctattattggccaggctgtcctccaggacagtgcttgccaaagtgtggtccatgggcagcagcatccccggagctcatcagcaatgtaagatgtcaggccctgccccagaggggctgagatagaatctaccaattactggattccctgggtgactcatgcagtcaggttggagaagcgctggactggtggctttctccagaggagcatgcaacagcggtttgcaaacagggatgatgcagttccttttcaacacgtggatttgcacttcctcctggtgcgctcctccagcctgcctgtcctgttcacaccagcctccccctggaaggggttcagacttgatcctttgggtggtagggtctttcttggatagcgtagccatccattcctgctgcatacattcaacacagccttcatccttcgccatttgtctctgatacttcatactccttttgtttgacaagtgccctagctttatttattttctcatcattgttgttaagggcctattgtgcttgctagtatacacaccactatgtaagttactagttcaatttatttgttttactgctgctgtgaggtgtgtccatgtgtgcacatctacctgtgttaataactgataatattgggcctcagtacatactttttttttttaagagacaaggttttacttcgtcacccaggctgaaggactgagacacacttgtagctcactgcagccttgagctcctggacccaagtgatcctcccaccttaacctcctgagtagctgggactacaggcacacaccaccacaccaactaatttttttattttttgtagagacggattcttactgtgttgcccaggctggtctagaactcctggcttcaagccatcctaccacctcagccttccaaagtgctgggatgataggtgtaagccgccgcacctggccctcagtgcatacttagatatacttaaataaaaacttaattgcaaattacttcttaaattatccacaaactgacttggcagtaaaagtgactacaagtagtgaaaccactgtcataataaaaataaaataaaagtctttattgttagatttagtatttctaatctcttacatttcagttttggaaggtaaatttttgggaagtggtggtaataatctaagtatgtctagattcagtgatgagagctagtacactgtaggaaagagttgagcataacaatatggaatgttggtaaatgtataggggttttctttttaaagacagctttttatacaaagaaacagatgatctttttttttttttctaaactatgttagctatacccaaattagtaaatgttaaaataaccatgactggtaaaaacattttgcaattttttttttttttactttttatataattaaatgaaattctccatttggtagttgatctctcagacaaattaagtcttgccagactgtctgagaagactagtgaatcagaccctaaaaacttgtagcatttgaaaaataacaactgtgtactgcaatttataagggcataattagagaaagtttttcagtctgaagatttatactaatcttatcaccctggttttagagaacccagttcaatccaactgctgtgaaaaagccactgcttttagccacagaaaataaccagtttcatagaatgacttataataaaaaattcaaccattttgactccaaaaacctagctggccgggcgtggtggctgacgcctgtaatcccagcactttgtgaggccaaggcgggcagatcatttgtggccaggagtttgagacctgcctggccaacatggtgagacccccgtctctactaaaagtacaaaaattacccagacgtggtggtgtgcacctgtaatcccagttactcgggaggctgaagcaggagaattgcttgaacctgggaagcggaggttgcagtcagccaagattgcaccactgcactacagcctgggcaacagagtgagactccttctcaaaaaaaaaaatgcctagctgactttatcatagatctgtctgtaccttgtaggcacaaatatatttacaaaataattaatggtgatttacttattcacaataagcagttattttgcttttggtgtatatgtgacaaggtggttatgtggagtacataaaggagtaaagtaagtccgttgacttcaagatgcttacagtctaatagaaaccttgaaatttccactgggcaaggttttcttgggattgctccaaccaaatgaatgagcaggcgtctaagtaaatgaaaatcactctcatcactttccttcacattatgttaactggtgacaggtcatgacgcatgggaattgcttatgtttctgagctttagtcttataaaaataagtttagatagtccatcatgttcttcacattagacactcattacataaaaggttttatatgtattgtagatctttctgaaggtcatctatgtgaatgtttaaaaaagaagcaagaaggtgctataaaaagcactagaggtcaaatggtttgcgagacaaaatgaaactctccagctctgaaatccaacagagtatgatgaagaaagggaaaaaatagatcaaaaaatggcaggggaggaactcggcatcaaaccagtgataaagcagaatgtggatcagatccagacatccagtagtctgtgagcatctccatatgggatgtttgggttgagagttcaacccatcaaatacattttatccataaccataagatattctaagatcgaccaagtagagtaagcaatgtagaatcaaaggtatcatctttattatgtcctatttgtgtttcctgcttttgaggttcttagtccttttaattaactcctaatgaactaatatagttttgtggtcaccagcttctagctagcacaggcacagttgtgggttggtaggagaatgagcagtaaagccatgagctaacacaccaagtaatctgttgtgttcacaaatgtccaagagaataacaagagattaaagaaaggtaaatacagccacctggcaaaaatatttacccttttaaaaatgatggaagttatatatagaagaaatgtttttggtaaaaatatttgaaagtttgttttataatcataagtagcttgggctattttgactagaggggtgtgtgtgtatgtgtgtgtgtgtgtgtgtgtggttggcagggagagaaggagggaggcaggcagctggtagggactgtggagtgtgtcagttgggagagggaaatgagatgattaagttagtaagaatagaaaacatgtaggaaggcggatcttgaaatttcagggctattcattagtcattagttgaagatttcacagagaaatggtagaaaccaccagtaattaagaaatagcattattgtttaaaaaaaaaaaaactcccaaaccctttccctggcattctggtagaatatagttttggtctaacccaggtcccctctcatttcctttcacatccccttggttctagccacgctagactgtctgggttgtctgtatatgttctgatgtttgttttcctctgtgctgttcttctggcctcagaatcctagtgtccttgtgcctccttctgcatatgtctggactttgcttagctgatgagatccagttcagataccaccttctgtacaatggcttccttaattcctttaatttctcttaattgcaataaagctatttgcagaggaatgaaagatgctcccctttgcgctgggtacaggatgcactgaaactttcagcatggggcgcggtggctcatccctgtaatcccagcactttgggaggccgaggcaggcggatcacctgaggtcaggagttcgggaccagcctgaccaacgtggcgaaaccctgtctctactaaaaatacaaaaattagccaggcatggtggtatatgcctataattccagctacttgggaggctgaggaaggagaatctattgaacccaggagacagaggttgcagtgagctgagatcgcaccactgcactccagcctgggtgacatagcgagactccatctcaaaacaacaacaacagcaacaacaacaaaaacccaaactttcagcaggagagtagcttggttcagcccagcaacatcggtttgaagattatatcaagttttccagtcaaatgtaaccagtttatggatctgtgtttgcacggggtctgaacctcccctcctcaggtataagctcttggaggacagcctgctgcttaaggtacaggagaattcatctttgctggacatggtaacgtatgcatagagatctggcaacagaacttaagatatgtgggagaaataataggcaaaaactggaaagagcacaagtaagagaagagaaatccgcagaagtgagaagtaacagaattgctggctgaggttggaggcatttaagtgtgtgggtgtttgtgggaggcatggtggtctcctgttccttgacctcattgggcaaatattacagcacgaacatacaggtaggaatcaattgcatccccacctgggcaccttcatcggcagttggggtacaccacttgctacagtgtgatggaataagggacgatccaaaggcactcagttctcccacccatcctgtgcacaaggaaaagacctttgaattgtgtctcccctgttgtcctttgcattgtgaaagtgcatattagttctcccatccactcttttctctttaagctttagcatacggttgtttgccaagaatggaatcagatagaatattttcaccaggaagtgaaatttaaagtgcttgaaaaagatacaaggatatctggaagttccagccggcgccattttatattttaaccatgacaagtagctgtatatcacggaactttggaaaacagagattgttccatttatttttcacagatgaaaaccagagtgctgtgtggggatcaggaagagggaaatcaaccaaataccttattttagagatttttttttttttctgggaaattggaaacagcgcttgtttatagccaatgcagcgtccttgaaactctcctacttacagttctggagctgtagtttcctccctgaagaatgggttaaggcaggcagggtaatatgcatagatgggagtgagagtggatggcctacagggttgttaacctctaagtgcaacaggaatatatgaaggtacttgggctggtggtcctgtgcagaaccagccagtaggttctaagagacttgatagccgagggtccctgggccctgttccacctttttaaaatttctatgacttagtagcggcagtaccatgcccatcccccagtgatgtttggggtacagctgcacccttggccgtgcctctgcactcactcacgagtgtcatctgacatctggctcttgaccaggatctgaggttgcttaagcaggatccaggtcaggttttttgttcatggaaggtggaattttggacctttcccccaaaaagttgacataacttaaagagaagggaggtatattgagaccagcctggccaacatggtgaaaccctgcctctactaaaaatacaaaaatagctggcatggtggtgagtacctgtgtagtcccacctgctcaggaggctgaggcagagaatcagggggcggaggttgcagtgagccaaggtcatgccactgcactccagcctgagtgacagagtgagactctgtctcaacaacaacaacaacaacaacaaagagcagagtggtattatttcctcactggaacattaaatggttcctactaccaaagagttcctgttctaatgggggtttaatataatagtaacattttattcactgggattcactcgggggaaagtattcaggaacaaagtgacaaaattaaatataggacatatgaacattgtcattttggttctagttcttacaagggcttatggtagcaacccaaatagaagtatttgctctaactaacagataaattattagcacttcagttgtttacatatgagtcagagcatctaaaatttgttcccataagtaggttgagcctccttctcagcctgttgtcatagggtctaaaaatggaaacgtgagtccaaactctttccagatcataaaaataattctgaattagtagagcataaatgaatgtgattttattcgagtgtcattttcaagttccccaggccaggttgagaccttttaagtcatccttaattccctgtagggaggattaagaaaatagtagcagctttgcttctggccttagacagttttctaatgaggtcagagcctctcaccctgggagaagcagattcactttgccccttcagcattggtttttgagaattgctgtctgaagctattgcatagacaaggtcactttttaaaagggtacatttctgaacctggagaaggagtgggttctgaatgactggctcttctgattaacagagctgtatatcaagctgtgctgaaaatactcctcagatatattaggccacatttatgcatgagtgagctcactgtcgtgacatgggagtgaacctttgctgattcgagatcctggggtgccttcactttggaacactgattctagatatttaatagcagttttaaaattaggctaaatgtagtctgactgcaggattcattccagtgggaatttttttgtttgttggttagttttttaagcctgaatatgaacccaaacatgtttcccaaaatgtgaaatgaagagtgaaaacctaacaatgggataagaaagataatagataagagattatagttcaaactcggcctgcactcaggaaatggaagcaattcctccccctcatcctgcccccctcctcttcctccacctcctcctcctcccttacctcctcctccactacttcctcctcctccactacttcctcctcccccttcatcctccacctccacctcctcttccacctcctcctccccctcctcctccccccctccccctcctcctcctctccctcctcctgccccctcctcctcctcctccacctcctactgcccccctcctcttccacctcctcctcctccacctccccctcctttacctcctccttctctttctgcacaccccacccccgcccccactagggacagtttactcttccccctcctttcttagaatgccaacaactagcctgttagttccattacttacttgccttgtgactcataacgttttcatcttgggtatttttctttcttggtctttgtaaaaattctaagcatcatagagcatatcacctggagaaaagacctacgttcattatttaatgaaggtaaaaagtaaagaattgagtctgcatcctaagaaattagaaaaagatcaactaagtaaacaaaaaaatataaaaactaggagggaggaattaggagatgataagatttaaaagttatgtaaatccaatagctggttatttgaaatgaccaataaagtaaactctcattatcctaactcaggaacagaaagaaatcatcctaacttagaactagataataggaatgagaggccgggcatgatggctcacacctgtaattctagcactttgggaggccaaggcgggcggatcacctgaggtcgggagtttgagactagcctgaccaacatggagaaacccatccatactaaaaaaatacaaatttggccgggcatggtggcttatgcctgtaatctcagctactcaggaggtgaggcaggagaattgcccaaacctgggaggcagaggttgcggtgagccaagagcactccattgcactccagcctgggcaagaaaagcgacacttcgtctcaacatcaacaacaacaaaaaagaaagaaatagataataggaatgagaaaggagacacaggagatatcaatagactttataagaaaacattacatgcagccctgtggcaacacatttgaaaatatagggctgacttcttaggaaaatacaaattaccaaagttgatccaagaagcatggaaaagttgaatagaccaattactatagaagagataggaaagatgattaaaagttaccattgagaaaggcaccaggaatccatggatttccagctgaggttttgtttgtttgtttgtttttggagatggagtttcgctcttgttgcccaggctggagtgcaacggtgcgatctcggctcactgcaacctccgcctcccaggttcaggtgcttctcctgcctcagcctcccaagtagctgggattacaggcatgtgccatcatgcccggctaattttgtatttttagtagagacggggtttctccatgttggtcacactggcttgaaaaaatagaaaatttgagtgttatttttactcttccaggacatactaaaacatggaaaggttcccagttcattttataaaaccatcaaaattttaatttaaaaatctgatgaattaaaaaaataaaaataaagatcaatattatttatgaaagtaaatgtagaaatttaaaataatttattaacaaatagactcttgggtgcatcaaaacacgaatgcactataatcaatagttattttccagtaacaccagggtgattaactgttagaaactcatcactatcatcagttgttacacaatcatattgaaggagaggaatatatgaataagtcagtagaggctagaaacctatctgaaaaagtttagtagccattcctaatatagtacaatctgagaaagcgaactaggaataaaaataaattacttaaacataaaggccatatatgtgtacacaaacacacacacaccacagcaaatatttcctaaaagacaaaacactaaagccattcaattaaaattaggaatgagagaagaatcttacattttacaattagtatttaatattatcttagaggttcttgtgagtggagtaagacaatgaaatggtcatatgtctagaaatcgcaagagcatctagtaaaaaatctaaaatcaacagaaacaattgtcaaggaagctggataaaagataggtctctagaaattatcttttctgtgttttgaagataagcacctagaaatggaagttaagtatttctttcacaatagcagcagataacctaggaagacattgaactaatacctgtaaccttcttagtgaagaatgtgaaatataatctagagaaattaaaacatgtaatgcctgaatgtatcttattacaaaattaataagtaaatttcttgtgattccggttagaatttccaaagtggtgggttttctctttaattgaataaaataatcctgaagtctttatagaagaataaatacgtactacctgagaggagccaagacaaatatggaaaagaaaaccggtgagggcagatttggcttacaagtaatgacaacatgctaagaataagaagtcttcgtgatcaaagcaatgtggtattgatccagaattacataaatagttcagtggaacagactagagaatctaggactgtgtctcattaagagagtgaatgtataacaagatgatagttcagtactgttgaggttggtactggcataaccagttctttatctggagagggggttgggggaacagcacagacctctatctaatatcataatcagtaataagtcccggaatcttcaaacacttaaatgtaaacaagcaattcaacttttacaagaaaatataagaacctattttgtataatcttggagtgagggagaatggttaagcaaaatttgatacgcacaagctataaaaagagacacactttgaacatatattttatttttatttgtttattttttgagacggtctcactctgtcaggctggagtgcagtggcgcgatcagggctcactgcagccttgacctcccagactcaggtgattctcccacctcagcctcccatgtagctgagactacaggcaagactcactgtattagttctcatactgctaataaagacatacctgagacggggcaatttagaaaggaaagaggtttcacagtttcacatggctggggaggactcacgatcacgggtgaaggtgaatgaggagcaaagtcccatcttacatggtggcaggcaacagagtgtatgcaggggaactcccctttataaccatcagatcacatgagatgtaattcactatcatgagaacggcatgggaaaaacctgcatctgtgattcagttacctcccaccgggtccctcccgtgacacgtggggattattacagttcaaggtgagatttgcatggggacacagagctaaaccatatcagctaccatgcctagccaattttttgtggagacgaggtttcaccatattgctcaggctggtctagaactcctgttctcaagtgatctgcccacctcagcctcccaaagtgctgggattaacaggcatgatccaccatacctagcctgaatatatatttttaaacttttctgtggcaaaagatacgtgattaagtcatagatcaagaagggatatttgaaacagacatggggttactatctataacaaaaaacttacaaattgttaagaaaaccacagaggaaaaatggacaaagaatgttaatatagaatacacagataacaaatgcagacagctagctggcaaacctatgaaaaatagttcatttttgctagggaaatgcagattaaacaatgagacgttactttaaacccatcagattggtaaaaatagagaaaaataacactttttgatagcaaggctgtaatagaagtggcaagtggtattatttctcataatactgatggaaatgtgaattatgggcagttgggaaattgaaaagcagatgggcaatgtatattaaaataaaaaactatcatacctttcttctaagcaacctttgtcctcggttatttgtcttttagaaataaaaaatgtgtgcaaagtcatatgtataaggatatttattgtaccattatagtggcaaaatactgaaaatatgaaaacccatcagttgaaaaacggccaatttatggactgtttgtaccatgtaatattatgagagaactagagctgtatgagagttggctgtggaggaatttctatgagaacttgatgaatgagaagcaatgtgtagaaaaatgtataatatccagttctaaaagacgcattcctcctgtgcccatatgtgtaaatgtgtgagtgtggagaacaagatgaaaatgctcattctgtatgttaagcagggagtggggtggaggttaatgtggaatggtgggagagtggggtggcagggatttccaagtcactcaccagtgatgagtgttaaccacatccccatttttttcctatgaaggaagctgcaatgctgtggtttgaggttaaacatgctggctccttctcttaggtcttgatttggtttttgttgttgttgttttttttttaattctagtctgttcttgttttgctgtgctgatatcctcttagattttacgagcatattaattgtgagtatttaacattcttctttggtttattctgagaccccgtttgcctgccctttggcatcattggcagtttttggtggtctactggtcttcctgtttgtgcctctcgtttgcccctttttcactggaatgtgccaggttgaagcaatatgtagggcccggtgggatgggccaggaggtggcctttcagatgtggctcctgcatggccctgcttgctctcttgagctgcctgcacttcagtcttaggaccacattcctgctttggcctacatgaagtgcaaggtagcagtgggaaaagcagagaggaaatgaagcttcctgataaatcacctgatcgctgccccagggttagtcactctagcccccttggatctcttgactccatctcttgatttgtttcttttgaatttctggcatctggagaatacttgtacagcagcagtcccctggttttgtttttctttcaacccaagcccatcccatatctgttcatgtgatgatactgtgtcttattttcccaagattcttatgactgtgatatttagtctgaatcagagaaagagagagatagaaatgtacactcagagggccacttggatggaaacttctgttgatctctccaagccttagtgggatcatctgtagagcagggataataacagcgcctatctgttactgttagggttactgcaaagattaaaataggtggtgctcttaaaagacttagaacagtgctgtcatatagtaaggattccataaacattagctgctcggtttgtgtgtgtgtgtgtgtgtgtgtgtgtgtgtgtgtgttttgttgttgttgttgttttaaacgggatcatgctggaaatgatagattgcaacagagctttggggttttttctctaattaatagatctaggatgttttctgaggtgtgtcatgtttttaaaactctgtggtatttctgtttctttctttctttcatttttttttttttttttgttgttgttgttgagacagagtctcactgtgtcacccaggctggagtgcagcgatgccatctcagctcactgcaacctctgcctcccaggttcaagtgattctccttcctcagcctcccgagtagctgggactataggcatgcaccaccatgcctggctaatttttgtatttttagtagagacagggtttcaccatgttggccaggctggtcttgaactcctgacctcaagtgatccgtctgccttggcttcccaaagtgctaggattacaggcgtgagccaccatacccagcctggtgtttcgtgatatatctatgtgtgagggtttctgtagttaagttcccatagttgaattcctggttcaaaggacaagaacatttacaatgttcatagacgttgggaaattgccttctgtagtactgcactagtttccactggctgtagtggttgatgagagtaccagtttttccctagttcaatattaacccattttatcagtcttttcatcttcgacattatggaaggtaaaaacatctcattttatgtcttcagtcagtgatgccaagtatctcttcgtgtatttatatttccatttttatccagtgccaactcacatccttctgtcaatttttcctttgacctattaatttttcattgataagaattctttgtaaaatgggcagtttaactccccatctgtcatatgttttttctcatttgatttattgtatatcttgtatagcaccttttaattttaacattgtgtttttaagtgtcttttctttgttgacttggaaagctaacaactacttacagcataatttccttctgttaaaaacaagaaggaatttccccactctaattgtgaaaattatacatttttctaagtctgaaaaaaaatagaggaaaaaacagaaaaaacaacagaaagaacatcagtcactcttaatattttggcattttccttttagttgttttttaggagagaatgtatatttatacttcgcatcataacatagatatagtctattttggtgatttattccaatatgtaatatatgtttctgaatgtacaatatcctatttatcatatctgttaagtttgtttccagtttttcatttaagagagaaaggtactgggaatatctttgtgcaaaacaagaatttttttttttttttagtcagattctgttcctatgatacctccctggaaatgggattcctaaattaaagaatattaggatttaaatacttttggtatagattaccaatttgctttcctaacgtgtggtactagtttatgttgcaatcagcacaaagactcactgtgccatttatcatcagcagagaagagagcagccctgaagatttgggggaggagtgttcgtagagaggcacgtgaaagtgagtttgagaggtttgagaagtagccaggtcagtggggctggggaagggagagagttcatgggggagggctggagatgaaggtaaaggagccatggttctttagggctgtgtgggtgctggggaatttgcatttcctgcttaaggttgtagtaagtcagcctggagagttgcaagaaaggagtggcttggtgtgatttattgtagcaagtgagagtgacccagaggccagttaggaggctgttgcagaggcctgagtgagagaggatggtttaaacaccaaaatggtaacattcagaatggagaggaggagatggtgggagattaaatttggggatggagcccttaggatctgttgattgactggatgtgtaagagagaaagggaagagcagaactgaggaaatgtcctcttgaactggctgggggccactgagatgggacagatgcgctggggagcagtgcagaggtggaatcactgctccttttaggtctaaggcatcccttagatctccaagtggatgtgtgaagatggtggtagaggagaatggagctcaaaagaggggccagagtcatttccatttagatggtctttacagcctaaggaactggcagatttcactaaggttgaggtctttctttcctgtgaaaatgtgatcaggatcctaagtaacagccctaaaaattaaacattaggaatacaaggtttcataaattaggaactgtctgtagctgccagattctaaatgttttgaggatacaaatcttggggtcttttcaaatgctttgagcagaagaggtacatcgtattgtgtttactgaatggcatttaaagatgcaggagacctttcccccttcttgatgaaacaatttgcctttcagatgttttgttatagtgagttgattgtaggaccttatgaagcatgtaaaccacacatttgtaaggcattggaagaaaaagctaacgcgagttaggagggatttaagaccatgtgaggaaattcaagcctatgttgttatcaccaaaccttgcctgtgttatgtaaagatttttgcctgtgtcatgttatcttcgttgtgttcaatttattcctccccctccaagtgtcctagtttctcctctactgtagctggttttgaacaaaatagagaaacttgggtctcctctaccctcagcatctgaattcttctcatttggttactcactgtgttaaaataagtgatatagtacattcttagcagtttgtttatttttaattttattttttatggggctagggtctcgctctgtcacccacgagtgtggtgccatggtgtgattgcagctcactgcagcattataactcttgggctcaagtgatcctcctgtcttagccccacgagtagctggtattacaggtccatgccaccatacccagctaatcttagcaatttttaaataacttttttttccgactgtaacagatttagatattggaaaagataaaacataaagcattgatctacctgtagagccaaatagccacagggatataaattggttaccatttaattttatttccatctatatttggctatatttatatttatgtatatggaaatagtttatgaatttggaatcatactatgatattttttagaatgatgctttttaaactattttatggtaagcattttagtaaagctcgtaatgttatttttaaaaacgtacttttcgaaggctgcagagtatggataaattcatgatgactttttagaggaaaatatcaagatgatctcactaacaaatcctgagattaaaaacaaaagcaaacaaaatacaaaaactgaaccatctttggaatactatgaaattcagattttatgttcttaataaaatcctgttttgaatgaaatcagtcttcatgcttttcttattccttttggctatgttgcctacagttgaattaactgtttttatatacttcctttgctttgcattgaaacaagctgatccattgtgaccctttgtggtatttcataaaaccacaccctaaaaactgcccagtcttttaagtgtagtcaacagtattgagcaattttttgggtaatattgtcggaagtgttaggtgccaaccaacaatggcttattgcttacatttaagtgtaagcaatatacaattaaaggaatgtcatgactttttaacttcattttgaaatttgagtttagaaaaaattccaagggaaatgagcaagaatgaaagcatcctctcctactgccagacttctgggagacccacccctggtcttcccaggtgtctcttcagtgaccttgttggtcgttgagggctgtggaaagttctagggaggctgctcgtccctcctctccttttgcttattgcattctgcccagattataaaactgaagtatctgtcttaagacgccagcagctttttcttcatcaaatccagacacatcgaatcccccacaaccaagaattacccagccacaaaatgtcagtagtgccccggtaaaagaaagctggttttagacttagtctcagaacctggccatcttccatggattatcccgatatgtgcatccttgtctcttttcactatagcctggtgatcatggtggcagttttcattttgggacactggtgaggttagaatagcttcaggcttccctcagtgaatagtattgtgaaggcagtggtggtaacattgtgttggagctggtgtgagggttgaatccactctgtagcctctgtccctagatcatggcgctgctttgattgggccctaattttctcctctagacaaaaggaattgaactaagacttccagcattccctccaggcttaacattttttcatttggtgctgatggtcactgactattttccagttacattttaatgcaagtttggcagaagccgatttctctgggttagggaaaatgacataggtggcagggaggtggatgtacaccatttgtttgatcagtttgcctagaatggaggtggcagaattggagttggaaagatcaaatgtagcctttttttcccttccagaatgaggcttttctatgcatttttttgaggcatgagaacctcatgggacaaggcaaaagtgagcatactcaagtgaagtgtatggttatgggggaatggttattagaaatgtcaattgtctcaattttttagtattaattttcagagggaaacagtggtgtaattagtgttgtgattgtttgccagggcggtcgtaacaaagtagcacagactgggtggctcaactaccacaaatttgttttctcagggctctggatgtccggagcctgcgatgaagcaggattggcttcttctgcggcctctcttcttgacttgcagatgctcctctgggtcttcccaggtcatttgtgtacctgtgtccgtgtcctaatctcctgttcgtataagggcacagtcatattggattgggacccacctactaacctcattttaacttaattacctctttaaataccctctctctaaatacagtcaccatctgaagtattaaagacttcaacttaggaattttgggcaaatacaattaagcccatcacaatcaggtaacatttggtaggacgtgtagatgctttttatctttaagggaataggcaaatcgttaaaaataaataaataaaaacttgttcaacttgtttaggtacattttcttatagtgtattgtggttcttatttttttaaccttccagctagtgtgtaaattggaaacattgtagcttaatttgatagttttagacataatcaaagatgatggaaatcttgttcttaaatttagtctattcagcaacttgtgtatcctcaactgctgaagactgaaaacttgagatgttcctcttgttttaagaatttgactgaaaacgggctgggcacgatggctcatgcctgtaatcccagcactttgggaggccgagatgggtggatcacttgaggccaggagttccagaccagccttggcaacatggcaaaaccccaaaaatacaaaaattagtggagcgtggtggctcacacctgtggtcccagctattcaggaggctgaggcacaagaattgcttaaaccccagaggcagagactgtagtgagatcgtgccactgcactccagcctgggtgacagagtgagaccctatctcaaaaaaaaaaagactgagaatggttggcactgtccccctgtctccaggagggtgaatgtttctagctgaaccctggtgcccacttgctcctctaagccttcagcagtcctcccagcctcaaggggtgatccgttcatcttccccccacctctggaaatcccagcgtttgaacgctggggggaactgcaagtctagtttacagggtttctcagctgagatgccaggaacacttcgcgagtgagcatgccaccacatttgagtgcatatagaaagttagctgtttgctacaactggggacacttcctattagagccgcatctgctggggtggagggctgcatgggttggagagtagggtgtgacttcttccagcaagaggaaagagaagtagcatagtgcccatcgcaggcagagagcacatgtttgacttgctcttggaatttctgtagagtaagggtggtcaggttgccagactacccctcaaacgaggacatggtgctgctgggtcccagggtagagctctgctggcaccttcaaggccctgatttacacctaagggcacacaactgggatctgaaaactgggatgcacagtacagactgcagatttacagggcggggctgtctctcatctgactattgattcttttgggggctgtagtttgtatcatagttatttttgttcctgtttttttcccctcttcaagacaataagcttttggagggccaggaagttgtgttcccatctgccgagtgtggggcctcgagggccagaacctcagaatgtagaagctgagttagtttgtggcagggtgaagggctgacctctactgttggaaatgccaaaatctctgatctggctttaaataagcaaaacagccccgccagacatagagtcatccacaaaacctcatgacctctgttattgcccatcctgtgtggaagcccactgagaacttcacttgaagatgctgcaggaacaactgcagggaacctggagataaggccccgggtgatgatgtaagctaattgctgagctgggtggagctacttaaccttatggtaggaggtggagcttgacgcaacccccttttccaccaacaagcatttctttctacctgtcattgaagtgaatcatcagtataagtagcgagctgggcgcattccttctcagttgtgttaaaacttgctggtattcccccggtatcagcagaggtgtgtacgggcactgctttaaaactgggaaggaggaagacgaggccagggagccggagggtcaccaaggtagatttccagcagcgctagtccagctgaacactttccagccttgtttttcagcagctttgaggaaaagtataggtaagaacaaagacaccactgtatgtttgctatatgaatgcataacatctgttcttggtgtgagtttgatgttggtttaatactgtttttatgtcagcggcatagttctagcatgtaccaagattttcaattttaaatgctttttggtgttcacagttagctataattggtcaattttaccctccttatgcataaaaagaatgataggcaaagaatgagccttgaaaagaattgggatcagaattctggtcccctgttctttgcttcttaactttcttgactgtttagaaaaatgtacagcttttcttccaaaaaccaaagcaataatacttttatttttgaaaataatggaaaacagagaccgctgaagttctatgaatgaggttttctgttttagaaatcacaggttgaggaggaaagaattgtgttttccttcctgttctgtttcgagtctcagtatttctgacttagaaacctcctggagaagagggagataccagctctcctttgtttcaagtaaaataccatcttaggtcataaaatagtttgcttggagaataattcatggcttatatctgaatttttggttggtagcaacagaaatctttctcttcctcggtatgagtaatttggcttacatgatttagactaaattttattatattttttgtttgagaaaacaaaagtcaaagcccagaacatattcaactgagtttttccctcaggttttctatcattttcccacccttcctactcatacatgtgaatatgctgaatgattaacatgtgatttttgtttctttactgtctcatttcatggtgattcataaactgttagttaactggttatagtgtatccatatgttggcaaagcttgaaataaatttgagtgcaggccacaccttcgtattaatgagccgggttactttcagtaaagtatttctgatgtcattaagtgttaagatggccggaattctaaagacaataaaaatgtatcaacaatatgaaatatcaaagcctacagtcaaatctgagttattctttagtacttatttcatagctattctttaatgtttattctttaatacttatttcacattgaaaagtactttacacatgtttgaatgagatattgccagtgaaagaaacaaaaggaagcaaataactctataagggaagtgggattttaaagtatgtttgtgctggccccaggctggtgagtgagtttcattagcaatgaccaggaagagaaagaatgccacagtggtgggtgctgaccttttttttttttttttaaaccttttttaatgtctgtaaggaatacaaggtgaactttaattcttgtgggaatctagtaagatggaagtcaagaagagaggaagaaatgctttttatttagttaagaggaagtaaacatctgtattagttacagatgttatgccttaacctttttcattcctattgtttttatgaaaatttgcctttttaagttaaatgaaggttttctggagtcctgtattgcaactaaatgttgatttaaaacgacacatttgggacattttcttggcactgtggaatataatgaaaagatataaaatgaaggcaggtatgaaattatatgaattctgctacttgagtgtagaagttttattccaaagtggtttgtttggtggatgtggtgatggtggggggctctatgtacttattaaggcaagtgatgggacaggagcttttgtggtcttgacggttctgttgggatgggagggttgtttgggatttttatgtttcattccaggcaatgtttattttttcagcctgtacttcttagggttttaccaagtcagttttcatgtgaagccattttcatatcgtttctttcaccttgatggaaatcttttccttcttatgtgctttgagttaaatatgatgtagtgtgctagtaacatagacggggctttcctttctacaggtgggcttgaagtgagcctgccactcgctcaccttgaatcacggaggtttcagaggccgttggccttcagggcaatggcagaagcacatgttctctgctgttttctgagtctatcttgactgcgttcccagtggcccagaattccccaagggtcactcgacacaccctcgtctacagtaaatatttgtgcttcctctgtgcctggccaggttttctcagtacccaggagcacaggtgggcagtgggatgtgggcaggcggtacccagattccctcccacaggggccacagggaggacttgggcgcttcctgccaagagccccctgcccttcagactaagtggaaatagagatccgggagtccagtggactcagtggagttccgtagaatacatggaaaacgcaccgctttcagtgatgtaagctgtcttgttcacttcacgattactcatctggcctgcagcaggcaagaggatcacatgcaattataaacagcctcctctgactaaggtcagtgactggaaaccctgtcacgttatcagaggtcatttggtcatagattcttgggcagaagccattgagagtcctgggggtgtgatctttgagcctttgccagtgctggggtttgactccttttagctcaattaactgggtccaggagtttattttggccgagatctgccatgctgagttgacaggcttgacactggaaggaagtctctaacttcattagaggaaatggcgtggcaggctttaaggcattttgatatactccactttttctctcttgccctgttttgttgaggttttcagggccataactgtacctgaggttaatcagtgagtgatctatctgaaaggaatttgttctctttgggcaccgtcctgtgtggtattatatttgtataactatttagcttaactcattcaaaaggctatttaagtcacttgtcctgttcattacttgaaaacaagttgtcttctctttattcttttagtcagttaccaaatatttcctaagtgtctcttgtgctagacattgaggggcactccttctccctttcacttgtctgtttttgttgagctacattttttccttaagtcagattgttcttttcctgttacttttgttttcacttgatttgtttatttatatttaaatatgtactttaacagtcttgaagcattggtctgaatgaggatggtgatcagattgggaaaatgccccttaattttggtttaaaaaaatttattttctttaaattatttgtttattgataggggccacccactccaggtgagtggtttctctgtgtgtatggcagaggaatgctctgtgtctggaaaaaaaagtcacttagcttgaaatattatgaaagctgaagagtacaaatgtcagagagaaaggggtattgggggggaagagaatgagaagacaagacacagtcagggccctgtcacccgtgtggaactgcaggtccctggagagatgatgcatttatccctttttagagatattgccattaaaagttgatcttgagcatgacacagaactgaaagctttgatgacaaagccagcatctcagtttagcaataaccaggttagggaaaaaaccccagaaactcaacagtgagattcagctcagcaatgtgggcggggaacccactgtcccgccttgggcagggagcagccccagccgcttcatctgcctgatgctgggttttatccgcttcacaattaaatttcctttttgttatgcttgcgcacatctatatttggctttgcttcttattttttaagaaaggggagaagtgtgggcaaggtaaaatacagcttgcaagctcccaaatggcaaatgcaccagttagagtctaagtggcctcccaaccttaaggtgaaattcatttattcagcaaatatgtaccaagcccatcagggaccactgctcgagataccagtgcaaatagaagaggccaagggcacattattaggtccggagccagtggcctgcacagccatctgtgaccacctacctctctgcttgcagggaacttcagcctggtggaggagacccataatagccaagtcaactgataatagaattagtagtagtgttgagggacataaagaaatcagggtaaggccatcacaattacatgggtggatgatcttttataaaacagcacagttttgttttcttctgccatggtatctcctaacattttccagtgtgtctacttgcagttaatatggaagttgcggctgacactaggttagtggttaaaagaaaacaagaaaaccaacctttagaaatctttagaaacatcattatcatagaaagctataaactcttatgtatagaagggtaagtggccattgatcttggagcagaatgaatggatatttcctggaaaaaaatatttccactcatcaaagatactcaagtctcttctcatctaatcaatattggaaactaggaatatccacgcctatggaatatcctcagagagaattaattattctgccctctaagaggtatagtagtttagacttagaagtaaaggcctgaacttgaggctgcaccattgaaggcaaaagtgccctttatctcccagctttgtcatttgccaaatgcaattgtgttaaattaagtgacctccaatagcagagctctatgttttctcccctgacccccaagtcaaaattgattatagtaatccatcaaaccaggcctggcaaatgatgttttgcaactaaaggataaatactgagggggagggacgaatgtgaacgcatatgcagagcaacacagtcatgagaccattctattacttcctaaatttcttaaagcttttctgtcttttctgagcttctcaagtgagcaggggcatgagttcctgtgttgtgcctggggacagggaaggctttgggacctactgtggtcttaagtctgagcagtgctaatagcctcggctcaccaagtgctgggcactgtgctagagggtgtacaaacctctcatctcatgaggcctcactgctacagctgacagagatgacatccagttgtttttagttgcacatggcagagctagaaaacaaaccagggtgtgtcagactccagagcgcatgccctctgtgatgccgctgtgttaccctagatcaaatcaaccaagccatccgttaaaaaaaaaaacctgatctttgtcaaatatgcaattgttatatttttgttagagtctgcctctccagtgaacgatattaatttccttcaagtggctactcacagatatcacaaaatcagaaagctgcctaccctgcagcctgtatctgcctccacgtccccacatcagtcctccttgctgtgcttcttgtctctttagtttttatcatcttctaacactgtgaactttagtaatttattctggattgtttgctacctgtctccccttggtaaaatgtaggctccgcagaggtagagcgttttgtctgttttcttcactggcatatctcaggtgcctaaaacaaccatgccagacatgtagtggtgccagtgacaacttgttgaatgaagaaatgggagaaaaaagcagaccccggagacttaggagggtctgtgtgagggagtctccaggcagtcttcctgggggtgtcctgaaggacctcctgatcgtgattttggtcagtgtggaggctgtggtttcttctgagctgtcagtatttggaggtgagttgtctgcaggtcacctcatcccacctttacacattagtaaaatggaattcgctgggtgattcttaggactgtgcggtcagtcgaattaccagacgtccctgcatgctctgtctaagggctggagtctgctttccttgcttctcttctagaaagaggtctgtccacaagggattagcctcgcgaagttcctactgttgttcattgacccagtgagtgttttacccactgtgggtttttcctacctaattgcccctctggttttcagtgttcaacatgctgcagttacgtgttctgctgtggttttacttagcttaatcctttattaattgcctcttgttcaaactccctaagagcagattatccttctctttcagcttctgctccattgctgttgaacttttttttggtcgtgacatcagaaaaataaccaagtgtgagtctgataatagcaagtaaggctattttatttctatccaatttaccccaaatttgagcagtattacaccttaaaataatagagctggctcttgcccagcatgtgaaaagtgtatgcttcacgatggacagatattttccagtatctacttaccataaatctcaagatttaccctaccccactccagccattacccccatgtcccatttgcctaacctaccctagggccatctcagtgccctgtaaagcaacctttgttgcagacccactgtgtgactggaatgtgatgcacacaagtgaccaaggcatggccctgttcgcaaggagcttccagaccaatagcagaaatggacacataagtaaacaactgcgctactgataggcttctgccaacaggagtggagcttgagggccaggaagccttcccagaggcactggagcttgttttaacgttacgtgcatgccaggtggggggcaggacatttctagcagaggagaaagcatgctgtgctctgagaactaaaagtcatagtcactccacttggtgacatgtataaggcacatggaatagggccagagctgggcagaccgtgtatgccacaatagttcgttgtaggttacaaagaaccagtgcagagtgggtgaggcataggctatttgattaataatttggctgcattgacaagatacggaaaaggcgaggttgggactttccgtgaattttctcctcaaggtgcttaatcagtgaggttgggatggccggagggggccctcatttgcttgcctggtgctcaagcctgaggtcctggcctttaatagtcagggaggtctgtgtggaggcagggtgtgagccccctccaaggaaagctgcagtgtgaaaagaggcccaggatgagcgttggggagtatccacatacaacttgatattcctaaagtctcagttctttatgggaaagcccatgcactcttccacacttggaattctttgcaaagtgagtggtatttgagcttctttagagtcttgctactcccaccagctgtactggcatcaccagggagcttgttagaaatgcagattctcgaggcgcggctcacaactacccaatcagactacattttaaccagatcccaggcaatccctgtgcacgtgaagtgctagaacactgctctgcggtaaaacgactttgctaaccatggaagagggtgatttttttcccttttcctttggtgttttttataggacctatttaccttttagaactttttcagaattatggactgcagaatatatacagtgtcaatgtcattagcaattcattagtgatatttggctagaatacatagttgtttccacacaaatgccatttcttacattgagatggcacatgtctggttaggacttgggctcatttgtaaggagccacgctgcaggtaggcatgctcccgggacattagttgctcaggtttcaaactgctgccccagcatagcagatggcacggtaacaaagtccctgtgcactctcacattgcctgcggtgatctatcacacattttgtcccctaataacctagctgggggggagctcatgtctctgtttgtgctaatgctcgctgtatccccaagtggcagtacttaatataattgtcattgctctttaatattatctcattccacgtcagctgcacaaaaatttgaggttaatcacaatgaatgttttctcaatccttgttattgagagctgtttaatagtttattttgtatgtgaagattcatatctagattgaggcttatacaacttcatttaaagacagctttttcggctgggcgcggtggctcatgcctgtaagcccaacactttgggaggccgaggcgggcggatcgtgaggtcaggagatcaagactatcctggccaatatggtgaaaccccgtctctactaaaaatacaaaaattagctgggcgtggtggcgggcacctgtagtcccagctactcggaggctgaggcaagagaatcccttgaacccaggaggcggaggttgcagtgagccgagatcgtgccactgcattccagcctgggcgacagagtgagactctgtctcaaaaaaacaaaacaaacaaacaaaaaaggaaagctttttcaggttggaaaaatatcaacagcagacatgaaaaagcatgaaaaatgacgctaagaatgtaagcaactggaaacaaaaattataatggtgcatagtgagctgaagatctatatttaaatgtgaactcccctttcagtttataagtgattactaacagcctcatcaggtttctggaattaaatgttttattatttcctcccaaagttagtcctcaaacattagtatttcttgtgttcttttgatttgaatatttgtttttaacacacaaggatatcaactctataagtcagttaatatgttcatgcttttagttaatcgaaagtggcttatgatttcagtttttggtatcaggtgatgttgcggaagtgaggttcactgtgaagcttcttctttttttttttttaatcattttgttgtttctttgagtgtatgtgagcttataactcaagacactatgtgaaatgaccctgtgtttcctacattatagaaaagaggaaaatgaagcaagttcaagaaaattagatttatgtggaaaataaattctgcatctagttattcattatcaggtatgagattacaggcatgagccactgtgcctggtgacctcatttgaactcgattacctctgtgaagaccctgtttccgaagaaggtcaacattctgaggtgccattgtcaggtatgaggtaaacacactgagaataccacattttggcaactcagacaagactattttccaaacatgtaaccctgggaagaaggtaacctatcatagtgtgtgttaagaagtcaagcaaccaagaaatgttaattgaaggcccgttttgtacaaggttgcatggaaaagacacactagcgtaagacatggacagtggccctgagtgacgtgcagccggtttaggcgaattaagatttacatacttgaaaagggacaaacaagtctggacgtggtgactcatacctgtaattccaacactgtgggaggtggaggcaggaggatcccttgaggccaggagtttgcaaccagcctgggcaacatgggaaaacccctgtctctacaaaaattaaaaaaaaattagccatgtgtggcagcatgcccatagtcccagctactcacaggggctgaggtgggagaattgcttgagcccaggagatccaggctgcagagattgtgccactgcagcctgggtggcagagcgagaccctatctcaaaaaaaaaaaaaaaaaaaaaaagaacagaaaaggaacaaacaacagacacaagattccatggaaaagggagtggtctaagtattcagactgtaggaattcagagagtggagaggctggttattatgggggtgcttcatcctggggagttgagggaaaggaggtgctggctgcctggagcctggaagaatcaaagatttccaaggccatggggggaaagcatgaaggatgagtgaatagacaccagggctgagcaccctgaaaactgtgaagatactagattgacctgtttggaaaaccaaacagatgtggctgttattgacaagtggttttgtttttgttttgagacagagtctcacttggtcgcccaggctggagtgctgtggcttgatcttggctccctgcaacctccgcctccaaggttcaagcagttctcctaccccagcctcccaagtagctgggattacaggcatgagccaccatgcccggctaattttttgtatttttagtagagatggggcttcaccatgttggccaggctggtctcgaactcctgagctcagatgatccacttgccttggcctcccaaggtgctgggatcacaggcatgagccactgtgcctggccaacaagtggtttaaattggattctccatttcccacctaatagaaagtcggaagcatagggcaaaagtaaaggaaggaccctgtgttctgctggttaaatataacagaggtctgactccatggctattataggagaggtgcattttgttctatgtaaattatcttgatgtgtcccctgtgcctttaccccatgattatttagcacttttttctccacggtcacagggacagggagaaacatacacccataaaacagtgtcatctagaggcaaaaacttgtaatgctcaagcatgtgctctgacgaggtggggcagggtgtgtaggaacaacactctactaattattacagagcttgctctgcactctctgtagaagtccttcaatatccagtctaacacacacagtaacttaagagaggattttaaaaaatcaaaatgccctcagatttgtattggatttaaccaggctgagatccctgagatccaaatataataatgtgtcctttttggatgaatcagacacaagcaaaaatctccagtgtgtgtccagctttagaggtgtagtaatggattccacagttcacgctggtgggccagccaagacttttaatgctgatgtgggcttcattctttctataaactccctttcttcttgatagtgcatgggcccaggggttccaaacatgggtacctgccgtaattgatctgtgtaaccggagaaaatacatatcctatggcacccttgtgtcgggatatagggggcatcaccgtaatgtggctctttttctgttgattatagttttttctttctgtgatcacacaattgttttatcctcgcttaaaaaatttcaagaagtgcagcactcagaataacagaaaagtcaggtgtctggtggtttgtttgcacatttaatagacttgaagataaactctctaaacatttattttgcaagttgtttttctgagagttgaggggaaacttttgccctttggtctccctgaggaattctaggatttcacaggtaggcgtgtgttttggactgcaggctgaacgtggttggcagggtggcatgaggagggcacatattttaagcgttcttagggcagatccacgatcctttacctgccatttctaagtccaaaaagccctgaaaaccaaagacatctttacaggtttgtaggaaattgatttgagagcaaaacctgatgtgaacagatttgagagtattctaggcatcttgtataacacttcattcaatgctttgtgcctcttgctgcacagatattaacattcacttatgggccctgccccatcccctactggggatgctatgcaataatcagaataatcaaactaataataataataataattggaataatcactgagtcattgtattagtccgttttcacgctgctggtaaagacatacccaagactgggtcatttataaagaaaaagaggtttaatgtactcagttccacatggccggggaggcctcacaatcatggtagaaggcaaaaggcacatcttacatggcggcagacaagagagaaatgaaagccaagggaaaggggaaaccctgtataaaatcatcagatctcttgagacttattcactatcacaagaatggggaaaactgtccccatgattcaattatctcccactgggtccctcccacaacatgtgggaattataggagctacaatttaagatgacgttgggtgggaacacagccaaaccatatcagttatctttctaaagtgagacaaaaagtcagaattctgtaacacattttttcccaagcgtttccaaaaaaggttggctttaatggagtattagtttgctaggcctgccatggcaaagcactatgaactaggtggctaacaacagaaatttattttctatcagtgttggagtccagaagtctgaaattaagagtcagcaggattctgctgtctctgagccctatgggaatatcctttctggctcttctagtttgtgatgtttgccagcagcgttctctgttccttggcctgtaaatgacaatcttctcgttgtatcttcacatcgtctttcctctgtgcctgtgcctgtttgtttctgtgtctacctttcccctgttcataagaacaccagtcatattggatcagggctcaacctaatgacctcatttctttccttttctttctttctttctttctttctttctttctttctttctttctttctttctttcttttcttttcttttcttttccttctttttttctttctttctctctctctttctttcttctttttctctctctttctttctttccttccttccccccttcctgcctccctccctcccttccttccttctttcttttaaaaatatttttcttttttttcccttccttcctccctcccttccccccttctccttccccttcctccctttcccccttcctccctccttctctccctccctccctccttccctccctcagggtcttgttctgtcatctaggctggagtacagtggcatgatcatggctcactgcagcctcagcctccctggcctaagcaatcctctcacctcagcctcttgagtagctgggaccatgggtgtttgccaccatgcctggctaagtttaaaaaaaaaaatcgtagagatagggtctcactatgttgcccaggctggctttgaactcctgagctcaagggatcctcctatctcagcctcccaaaggggcgagattacaggcatgagccactgtgcctggtgacctcatttgaacttgattacctctgtgaaaaccctgtttccagagaaggtcacattctgaaatactgggggaacatagttccccatcttataagatagagaatggatcaagacgagcagctccattctttgtttgtgtttaggccagtgccaagttcaagatcttgcctcagggctttcctggtacccctgggaatgtgtatcagcagcagctgtgtcactgaatgggtgtcacctggggggctgcctgttcagacattagaagctgccacatcccctgttaactccatgtgagggaggaatcccttccctccgacaatttcgcctgtgagaatcaagtcagattttgcagtgagaactgagctgagtgtagaataagttcccgaggtacttctggcaccgttgttactcccccaccgagaagcccagaatgttcccaggtgtgttcaaagattgtacgggaagggcttaggacggtgcttggctcatataaacactcagtggcaaagaggttgatgcttaagtacacaggaagtgtttaccagtacacataattgtataccagtgagctccaccattcaatttactgtctgtccggtacattgaccctgtgaggcccactctcggtgtggcactgctaacaggttttattgttgcttactcacttgaaaagtgtctcccttggctagacctttgtcctgagcactggacacacataggtgctcagcagcgtccctctctgcaatgcaaaagggataccgtgtgcctctgcatgtcagctctagtcctggcatcccaggagcatacggtgacagtggaagtgaagtgcaagccgagtcctgggaaccaatgtctgccagaattaattaaaagtaagcatctttttttccctggttagttaatccaggatgaattccctgagtagttcctgccgttagaacttgctctcttttttagttagacacagctcggtgttgcctccactttgacatcacgttcatagttcctgtgcttggccagaactgttttcagttgcaaggacatgggtgagactggtcaaggaattgactttcagggttccaagggaataattagttcagaagtctgtccccatacttgttttccagtacaatctgtgtctctgtgggtgttttcttttaaggctgtgtgctttataaactggagatagaaggagccagtttattataaaaaggataaaatataattaaacaattaaaagtatgtctttatagccgggtgtggtggctcacatctgtagtcccagctacttgggaggctgaggcaggagaatcgcttgaacctgggaggcggaggctgcagtgaactgagattgtgccactgcactccagcctgggcgagagagtgagactccatctcaaaaataaataaaaattaaaataaaaataaacataggtctttggccaagtgtagtggctcccgcctgtaatcccagcagtttgggaggcagaggcaggaagatcgcctgaagctaggagtttgagaccaacctgggcaacatagtaacctcgtctctacaaaaaatttttaaaaattagccaggcatggtggtgtgtgtctgtagtcccagctactcaggaggctgaggtgggaggatcgcttgagcccaggaggtcgaggctgcagtaagccatgatcttgccactgcactccagcctgggtgacagagcgagaccctgtctcaaaaaaaaaagaaaaaaaaatttatgaagtactggttgggttaacgtttcttcttctaaccatgagggaagtaggtgggctgttctggtgactcagtgtcctcccagactcactcatgagaggaagtattcacggactgtggtgatcttgtcttggaatttttttctttgcctcctggcctcacagccgttccttttcttttacacatccatgaaagggagactctaagatcttccttgccaaggttgttgtagggatgagcgatgatgtctctgaggcaccaggcacggtgctggcacccagaagctgcttaatgatcctggaagttatgaccattgctcatagtttttcctacgtttcagatcatccttaaataattgtcattggctgggcgctgcggctcacgcctgtaatcccagcactttgggaggccaaggtggttggatcacctgaggtagggagttcaagactagcccgaccaacatggagaaaccccatctctactaaaaatacaatattagcccggcatggtggcgcatgactgtaatcccagctactcgggaggctgaggcaggagaatagcttgaacctgggaggcagaggctgcggtgagccaagatcatgccattgcactccaacctggacaccaatagcgaaactccatctcaaataataataataataataataataacaacaataattgtcatttatcagcttcttcgagctcttaatatatatatcgccacctttcacaaaggcaaaatctgcattagaaacactgttgtctgattttggttcctctggaggaggggtagacagtctttttgtgggcagggtctgtgtctgtttacctctattccccgccccccactttggtgcccaccacagtcccttgtgtatggtggatgctccttgactatctgaggaataaaatcaattgtgaaacagtttccaaaaagggaacagtttttgtttccccgtttccttatagccttgtgagttgctatctctcttggctctattattaataacataaaagaaagagctgttttcttaacctctggtagttgcacatatatggggaaaaggcataagaaaatatgctggcaataaagacaagtcacagattgtcattttctttggtgactgaagggatatttcagtaatttataggtgaaatcttcctttttgtgacttccactgaacaacatttttactaccaaaagataagggaacaaaattttttaacaaactatttaagcttaaatatttaaacatttttattagtcaccacatattaataaaatatttttattagcacatattttattagtcaacacatgtgtacacagctctgatgatctctatgtagatgcctatataaatagctatatagatatcatcagagctgtgtatatatgtgttagagatagatgcacatacagttgccccctgtctcccaggggtctctgtgacccaaggttgggaccctcaagtgactagttatggatggcaaggggggctgcaaggccagagttggtcctggctagagatttcaagactcgagtggctgggaaggttttagaatgcaggtaaaccactagttgctccaaacaacaaaaccatcataatggaagcatccaaaagtgtgttcttcggcagcttcagagactatgcctaagcaataaagttttaatgtcttttttagctgcttaggtgaagaatgcatttgactgtaatctaacccattaatctcttatttttgctggaaaattgtacatatttaagagtagtggctcattgccagtattggtgatgagtgatatattttaaactatgcttcatacctttcagtaaatcttgggctgaaagatatgtacgttttgttttcaaaatttttcagtagtcatctatttaggtcaattttctgggcaaacaaaatatttgaagccctttagggtttgttattgagatgtaggctggccatgaaattacagggttcagtacctcattgaagtgtatatgtaactgttattagttttttgataacttttttatactcataaaagtagtacttgcttacagtagaaacttaataaaaaccataaatggaaaaataaaccattcgtaaacatcatatagagagaatgactattaacattttagcctaacatgattttaggggtttataatattctagtatatgattgtaccataatttatttaattgcttcccaattattggactggaagtttgcttctaattttttcttattatatatgatgctgtaatgagtaccttttaccagtaaatatttacctgcctctctgattacttctttgggattaatccttagaaataaatttgatgaatcaaagggcatcaaccctttgaatgcttctgatacttctgccatgttgtttcccagaaaagatataataattattccttccagtagtagagtattaaatgtctgcctctctttagaaagtattaccttttttcaatctttgacaatttgttagataaaaacttcagtttcaatattattgcatgtattcatggatatttttcttctcacacattctagattttttctatattgtttataaatgttttataagtgttattactttattgaggatagaaattattatgtaacacttgatggtaacagtaaaagtggaaaagaatgaggaaaccttcaacaaaacaagttgtcattaacaaaacgggttttgcaatgcaactttctgtgggttagctaaatctttagtgtgtcaggtagtcgaaagaaatttgctgtatagtgctgtgaaatatgctgcatccatgagccctctgctctttgcccatagggagcaaagacacaatctttttgcaagctgtcccagtgccatattgaccatcttccttttacagcaaaaagttattgcttcctttggttaaggttgggacacccctctggaggcacacttgaaaaatgaagacctttctcgttgttcttctgttatccaagtatcttggaagaacacctctatagcaggtagacaaggcagggtgtcattgcaatctggctgcagactgaatgtaatcccccttgacattttgccccttggaggcaactcctgccctcccctctccccttacgaccctgcccccttaaaatatgtggagctcagcaaagactatttattctgataaaaatgagcaaataataggtgtgaaagaacatggaacacttcagtgaatcaaatggagaggattaagcattaccccaataatgattggtcaggacgactgtccctgtggagtgtgtcccagaagggttgagcaatggagcaaacccagaaaatctcattctcaactctccctgacagatgacctcgtctgcgctgtcttttgcttcatggtgatgaaggtggaacaagacccttgaataagatttccatctctgaattctttaaacccatttgagatcagtgcaggcctgcagtctctctattagaactggagcagaggcccagaagagagaactgaattttcagcactggattctatgttgagaatgaaagagacaataattgaaaagcttttctcttggaaattttgcaaaatccgagtggatttttgaccaggatttcttggtgacctctcctgagagagcaggtgcctgaggatttcctgctgagtatcttggcatctgtcagactccttatgacttcattttagttcagggagtctgtttcctagccattgatttcatgcacaattcctggcatgtctcatatctctaaggtgatgtcacccttgtatttttttttcagatgtaatcttttatgtgacagtgaggtgtcttacttgtgagtgaacagctagaacctcccaagtggtttttcttttggattttgtttactcagtgaaaaatactgaggaacctgagatccttcagggtgcattttggtgtctgcccaaccttgacgtggatttggaggccaggctcaatgctcgaacttcttgttggagtggcactaaatcattaggatccctgaggacagacagttcaggccatcattatttggtaggcccttgcacacttacacacaaatgcatcattatgaacatggagcagaagattctagggccccgtgtgtaatggcacaatttgtcaagaggcctgagacctggagttggcatggattccctctcctcctgacccacctacctgctacattcagttggccaccctgttcttttgagtccacctttggatgagtagtcagtcctttctgatttttgccacctctgcattcagagctttcttattctttggcgcggaggccttccgttgggtcccactgcctgctgtcttatctccttctaatgaatatgatcatgatttttctgtatttagacaactccacgatgaggaggatgatggcggcagctaacatttatgtatgtatgtatgtatttagagacagattctctgtcacccaggtgcagtggtgcaatcttggctcactgcaacctccccctcctggattcaagtgattctcatgcctcagctccccgagtagctgggactacagatgcacaccaccacacccagctaatttttgtatttttagtagagacgagattttaccatgttgtccaggctggtccggaattcctgacctcaagtgatctgcccaccccggccttccaaagtgctgagattacaggcgcctgcctccacacccagccagcagctaacatttattaagtgctcactatactcctgccaagcactattataatttgtcttctaacaggctttttataagggaagtgctactattatacccattacatagatggtaaaactgaggcacagagaggctatgtaagtttcccaaagtcatgtactaattgatgaagacccagggtttgagctctgcaggaatggccgactccttgtggtttgagcctgggctccctctccatctgtcttttctccctgagccctcctgactgcagccatgccagactttttaatgttctgaaccccagctccagcctatcactggagctctgcctgtgatctttccacctcatgcctcccggttctatgtgtgccttcagactccatctggcagtggtatctggatggaccagtgcatagaaatcacatgagacactcaataaatgtagactcctagtgattctgactagcaggtctggggtggggccaggtacccagatttgcacgggaagtcagggaccactgctgctgactgcttttttcctgggtgcttggcacactctgtcacaatcatgttttcatttctctatgttccatttcaactggatagggacagtgtcttttgtttctggaacctgtctcttttcttggcatatagtaggcactcaggaaatagaaggttgcttgaatcctagtaccagtttactatctccttggaaagactgaaaggtagaatgtgatgtctaagcagcttcactaagcagagaaaacaaaaagtttgcaaaatagaatttgccttttaatctacatgttcttgcgtagcattgagcttcctagagagtcatattcatgctagccctgagttgtatcagcagcagccactagaacggtaacttgatgccaagagtgaattctgatgagcttcattgtgagtaagagtcccagtttgatcatctctacccagatcccgtgggacctccacactgtatgaataatgaggaggcgtggaatacgtagcatgctgcagttggccagcacccagtgtgtactgtgaggtaatcagtgtcaaatcagtcattgtagcaggagttgggagtcaaaaggagcaacagagaacctcacacgtctcctaagagaggaagcaaagaacagttaccttggctgtcatttatggggcatttgtattgtatgtttggaatggtgctgggtactagtattaatacatgattttctctggtctttgcaaaaactgcctgagttaggaattgtcattcccatttcattcatgagcaggctgaagttaagagtggttaagtaccagctgaaagggaggaggagcctgagagcaatctgggcacccgttctccccctcttcttatttatgaatgaatgaatgagacagggtctcactctgtccgggtctcactctgtcgcccatcctggagtgcagtggcacaatctcggttcgctgcagcctccacctcccaggctcaagcagtcctcccacctcaacctctgtggtggctgtgactacaggtgcatgccaccacacgcagctacattttttttgtatttttttgtagagatggggtttcgccatgttgcccaggctggtcttgaacccccgggctcaagcgatctgcctgcctcagcctcccaaatggttgggactacaggcgtgagccactgcgcctaaccctctcctcccctcgagcttacatcctactgtcctgtagccagctccaagatgttggcctttggttctctcttcaggctgaactctctttcagggagtttcctaatcgatcttccatagagttgatcataccttagtacctacctggatgagcactcaagatgttacatattcccacctgacttctttattactgctggaagatatggtgtcccacacctaagtatcccacccacagtccccagctgcatgtgtcgattattgtgagctattcaagggatacagactgaggtaaatgaaccaccagtggaagaatgtggatgttctattacaggaaatgcttagctctttattgcagttatataatagccggcaatcatgatagctgaggggcataaaaatgagagcaacagagtttatggtattctttataactgtggattctgtatgtgcgtgtgtgtgcacgtgtgttctgcatgcatctccacggcacattatctggaggtaacatgatcatcaggccttgagctcttttataagcaatagattgtggctggaaattgaaaatttagtttctgtagctagaaaatactcttttcaaatgccatctagaacagtagttctctgagtgtggttcctggatcaggagccttggtatcactgggaatgtgttaggaatgcagattcttgggttctaccccggattgaattcagatttgggagcggggcccagttatctgtgttttaatcaccccctcccccaggtgaatctgatatgctaaagcctgagcctcactcccctggaaagtgacgcctgattcatctgccagcccatgggcacccattaggaaggtgcttatgggagctttgacctgggctaggtgccggctcttgatccatctttttctaaggctgagggtgtccatagaaggagaagtaggtgcatccgcttagatgttatttaaccaaataaaggtttacagcttacagaaaagaggcaagattaactaataccttccaaaccataatgtaaaaaaaaaataaaaaatatttactcataatggagtataactgaacaaatcatgttgctaatttttttaggatatgttttgtagcttccattcagatacatcttatgggtaataaatacacacgtgaacacacatatgtgtactaacaatatttttcagacttttgattttttagatattgagtatagccttgttactaccaaacttttatcatacttccttgtgaaaggatttcatggcatatttattatttgaaatatcaaatagaaatcagtacagtctcagcattttaagatacttgatgtaatctttggaaatatcttagacattgcaaaataagggttaatagtcatagtatagccactaacgggcagttctgaaattacataaagttaatctgatgaactgatagcaatcagtttttggctatacataactagataagtgagaatttagagattgaatacatgagagccctttttatgattttcaggatctcaagtatgaagcaaaataaattcttctataccctaaattcttgcaaagtgatattttgattagatttgagctaccccagggctagcaatacttgaaagtgtgactagacttaacctcttagtagatagtccgcagtaatcctttgaaatatacatcttgctaaaagttcctttcccaaggaaataatgattaaagataatgtgatgtgtacaaggaattctgggacttgtagtcgagaaacctgaactttaatctagactactcaaatttataactttaggcaaatctctcttgactttctaggctttagttttctagggttttgttttgatttgtttttttatgtttttgtttttgtcttttttttggggggagggtgttgagacagagtcttgctctgtagcccaggctggagtgcagtagtgtgatcttggctcaccgcaacctctgtctctcaggttcaagcgattcttctgcctcagcctcctgagtagctgggattacaggcacctgccaccatgcccagctgatttttgtatttttagtagagacagggtttcaccaggttggccaggctggtcttgaactcctgacctcaggtgatccacctgcctctgcctctgaaagtgctgggattacaggtgtgagccacctcgcccagccttgatttggtttttaatctgtaaaatggtaggtgttgggtcacatgaacaatggctcttttacctccactaattacctagacgctagaaataagaatatggataagacctaaaccaaattttctagctaaattttgtaaagtctgaacaaaatctgtgtgcgttttaatctttcttgtaatcttttcagactctgtctttaaaattatatatatttttagcttctaagtaaacattattggcactggttttgataggaactttactccaagtgtattgacttagtagatatgttaaaaaggttattgcttagtttgtggaaataatacaagctgagactttaactgatatttgtattttcatttaggttccactgttttctcttttgaatgaaaagtataatcctattaaatctaaaatattttcttacagtgatccgtatgtgaaactttcattgtacgtagcggatgagaatagagaacttgctttggtccagacaaaaacaattaaaaaggtaggtgtcgatctttaaccaaatgtcatttaagtcataatttaatccaattatgcacagtcatgtgctgcttaacacctttttggtcaaggatggactacttacacagtgatagtcccgtgagattataatggagctgccatatacaagtgcatcactttttctcttttttttttttttttttttttttgagatggagtctcactctgtcgcccaggctggagtgcaatggcatgttctcagctcactgcaccctccgcctcctgggttcaagtgattctcctgcctcagcctcctgaatagcagggattacaggcacctgtcaccatgcctggctatttttttttttttttttttttttgtatttttagtagagacagggtttcaccatgttggccagactggccttgaactcctgacctcaggtgatccacctgtcgtggactcccaaagtgctgggattacaggtgtgagccaccgtgcccagcccactttttgtcttatatactgtattttcattttaagtgtctttcagtattaaatctagaagttttccaagacttttcagtactaacccaagatagtgattcaggtttttacttaaatgcctacaaaaacagtatcctgaaaatgtcataagttgtaacattttttcttgcacagaatacagcaaaaacaaggatttgtttttgtctttgtatgtttcacaaagaaacttaaagtaatttaaaatacatttaatgaaatggagctgtttgtggaattggtaggcacaccaggaatagtttaacttgaaacaactatttctaaaggaagcaaaatacttggttagctacatggaaatagagaaaatatattaataataaagctatacatgtatgtatatatcttattttcctaatttttatgtacatgatttcattaaaaatttgtttccataagtatgtcttttagttatttatttatttagtttgagatggagtgtcactctgtccacccaagctggagtgcagtggcataatctcagctcaccgcaacctttgcctcctgggttcaagtgattctcctgcctcagcttcctgagtagctgagattacaagtgtgcaccactatgcccagctaattattgtatttttagtagacgtgggattttgccatgttgaccaggctggtctggaactgctgacctcaggtgatccacccgccttagcctcccaaagtgctgggaatacagatgtgagccactgtgcctagccaataagtatgtcttaatttgcctatctccatgtatttatagacatatgtaatatatatatatgtaaatattttttaccctatgtttggaggctttattgaagatgcatgttctctattaaaaatacttggctgcatgtggtggctcatggctgtaattctagcactttggaggccgaggctggcagatcaattgagcccgggagattgaggttgcagtgagccataatgatgccactgcactccagcctgggtgacagaatgagaacctgtctcaaaaaaaacccaaaaaacaaaacaaacccctttcatctgtgctttagtatcatttatgggttactatgatttttttccttacctcctttagaggcgggtgcttagatagtctaacactttgctgaacattttctggacagcatgagtgctttaaaaaattgtaactgtcttgctgccatgcaggcacccaggatgcagccaggtccttttgtgtaaggaaccgtaactgcagcgtgtcctccacttggcattgggactggcattaaaaatctgttttgcaaacaggagccagtcttttgattagcagggaggatgcctgcgagggacggaggccattgttccctgtgttaggcgttgttgctggttcagtttctaggcgagtgggggctgtctagaaggctcaccaggaaggcagctgggaaacttggttgcctgctggatgtggagccaggaccaaagccggcgactggggctattgcaatggatttccttccaaagggaggtcctccttctccctccctttccacggtcgagggagtagctctgtagctgggtttgccctccttctcctgctgcccgcctcctggttcgtatgcctctgctgcgttcgggtgcgagaactgccgtcatcctcctctccttgccgtgttgtgactggttcttcgttcgttttgtgctctcctgtcttgttgctttcctcgcctgtcatttcccatgtgcatttccgtgaagctgccctccgggactgcagccagaggcaggccaggcctgctgctccactcccctcccctcgttcattaccatccttggcttcattcacatgggagaaaagtatgaaccccattatttaggattgaattcactgtggagttgtgggtggggaaagtgctgaatttttgaaaacgccggttcagtgttgtgtgagctctgtgtttcctatttttatgttgcactctgttgatttttttcatctccctgaactgatctattaaaggaaatagattgataaatatcattttgactaaaaatatctatcgctgttggtgaagtgatggtttttttttacatacaatttttaagagctgtctttaagaggcttatgcatgtgcagatgcatgaacacacatgtacagtcttccttcctagaacatgcttcctcttagttttgggggatatctggcagtcctttcttccatgctgaggacaaaggtatccttgccatctccttgtgagatgtacatttaagtagactgatagaaagatgaacagatggatgaatggagaggaagactgaaggataagtagacaagtattttttaacctggttatttttggagaaaaaaataattcacttttggcttacatttggtctttttttttcttgttataaaatctgatcctcagtatagctctctataaaatgttaagatttcaatatttatataaacaatgaacacattcaactttcccccacctgcttcgttactctgcaaaacagatttgtagcagggagagggaagtcaacaaagttcatttccttcttggtagaataatcatatcaatgctaatttcttgaagaaattttttatattttcacgatgactctttccaggcctttgatgtttttccttctggtgatagaagcagtttaaggtttcatacctatgaagcatctgtttcataaatacattccctccccctccagtttggtttgtacgctagtctcaaataatcgactaaatgcttctcttagctttttttaatcaaaaaaatgtttaagcaaatatgtagactgtattgtactagtaactgctaatgtttgaaagactaaaagatactacaagataatttctcttccagacactgaacccaaaatggaatgaagaattttatttcagggtaagtttttcattgtttggtaataattgttattgatacgtctaggtcgattatcacagtcaattcatcttgaggaaaagctcttaaatttttaatgagaaattccttttaggatgaaaaataggtagcctcctaatgtgtcccaaattttgaaagactagaagtagtggtcacagaatccggacttgtttcattggggagtgttttggagaagtcaaaagaaaattatccaaacaccatgtttcatcttttgaattcaaacctttctttaagaaataagataaaatatcatttatgagaatggtttaattctatgagacgggttatgaaatattttagagagagtaaaacagtagaggcaacatgattaaaaagaaacataaaaattaccagttatattctagttagggaggaaaattttggtaactgaaacacttgagtgcatatatatgtgtataatataaaattacttctggaatctaaatacaacagaattaggtaagatttcctcaaccttttatatttaatatttagaatagctatatgtcgaaatgactgaaatatgtgaattagcagagatttctgcttattgagcatttgtggttgttgctgtgttttactactgacattttggaactattagactgcttagctatttaattgaaagaaaggactttctcttcaaaacgaaggtatcttaattgtatagctgtgatattaaaaactgcttacctccagaaataatccaggtcttctgattagtgcagatttccaaaggccagtattgccatgaggcccattataattggtcctgatttcttcctctcaatcgcaatagtattttttgtgctccaaacttgggctactacatacagcatctgctttccattatgctcagagctgaaatatggcactgatactttcatacttggtgaaatcctatgtacagcctccaccagatgtatttgaaattaccctgtggaggactgaaaagctaataggagctgatagatgctgttggcctttagttaactctgaaatatagctttccacttgtgaacctccaaagtgtttagactcctttcagtggaacactggcacagttacataaatgttagtacatcccatacttttttcagctaatcttggcagtaggcacatttaagttctatttttgttagtttttctgaaggttttttttgtttgtttgttttgttttgttttgttttttgagatggagtctcactctgtcaccaggctggagtgcagtggcacaatcttagctcactgcaacctctgcctcccaggttcaagtgattctcctgcctcaacctcctgagtagctgggactataggcccgtaccaccacgcctggctaatttttgtatttttagtagagatgaggtttcaccatgttggccaggctggtctcactctcctgacctcgtgatctgcccgccttggcctcccaaagttctgggattacaggttcttaaggtctttatatttattcattttacaaatctttattgagtgcctattatgtgccagctcctgcctgtagcctgtggttgcattggtaagcagtgtgacccttcatagagcttctaaacagatagcaaaccccatctgcttgttctgtcgctaggctgcaggcagaccacggaccagaagcacaagctgagctctctgtgcttgtatggtcaagtgttatttcatgcattccccaccatgaagcagccagggcctaggtcacctctctgctttaccatttagagcctttgtgaccctggaaaggccacctgaggactctcaatctccctgggatccttatctctcacataggagagagaatccttacctgcaagggttgtttcaaggatttgcatgcgatgatgtaaatgagaacatgtagctctatgtcacacatgtggttggtgcttagtaaatgatacctgagtttggaagatgatatgggccattttggtgaggttttggtaaggaaaaggaagcaaaaagatatggaaagcccagtagctctgtcattgcctcacagttccaggtctctctcatggttcacagtctaggctctggagacaggcagcatagacctagtgcaggtcctggttgccctacacattagctgtgggctcttgggcaagttacttcactgaacctcagggtctcggctcctcatttataaaattgcgtgatagttatacatcataggattgctgtgaagattaaaggagatcatgggttgttgatatttaataacaagacagtgcctaaaaagtaagtgcacaggctgggcacagtggctcatgcctgtaatcccagcactttgagaggccaaggcatgcagatagcttgagcccaggagttcaaaaccagcctggggaacatggtgaaacctcatctctacaaaaaaatacaaaaattagccaggcatggtagtccaagctactcaggagagtgaggcaggaggatcaattgagcctgggaggttgaggctgcagtgagccatgatcatgccactgcagtccagcctgggcaacagaacaagaccgtctgtctctgtctgtctgtctgtgtgtttgtgtgtatgtgtgtgtgtgtgtctctctctacacacacacacacacagatacattcttaagctattacaatcttcttcattatttttatcattactattactgctatcaggactaagaaatatcctcaggcatagacattttttgatctacagtcatgagaatgccttgtacagaggttaggaacccgtcaaagctatttacaactatcctttcttattttagaaaaacagctaagagccttctcttcttttgctatgcctaaatttggggcagaataatatagaaatcagtaataggaaatttgatttagtacacatagaattcccagaacagcaggataattgttcatattatacaattgagttgggcgcattgtaaagcagtatgttattctttctgttccttacgtcgctgttcaaatgattcctgctcgtttaaaaaatactatttatgttccttataggtaaacccatctaatcacagactcctatttgaagtatttgacgaaaatagactggtaagtggatgcctgtatttgaattttgcttcatttttttattaactggattttcagagcagcgtctttaaaactctgtgtttatgttgtacttaggacagtatatgtgcccaaaaagaagactgtttttgtcccactacgagtttgatgttcaaaatcctaacaaatagttttatgttgctaggataaaaaatgtatttgtatgtgtgtgtatttttattgcagttaatgttaacgaaagccactggtgatagtaccagcccatatgctcatgctctaatgttgggaatacagaacggtaggcagatctctaaagaggccatcaggaatgtaaacaaactttgctcggtttttaaatgaaagccagaccatagtactgggatgcattcagtagcaaatctatggtaattctctcagggaaaataacaatctaattaacaacgtatagcaaaaagtgaatctacatttagcaggtaaagtcaagccgtattttaaaagtggttgccttcttaagagagaaccttagaaagtacctttaaagaaacaaagatatgcctgaggcatataacagatacaaactaacattttatatatagattgatgtatatataatatgtttatgaagatcgacacatacataactgaaataattatgatttcattttattgtttttaattttttttagagagagggtctccctctgtcacccaggttggagtgcagtggtgcagtcgtagctcactgtaacctcaaacccttgggctcaagcaggactccaggatagctaggactacaggcatgagccaccatgcctggccagatttcattttagaaatggaatttttgaagcacattttgctttcttaactatctaaaacgtgtacatcaagtagctgtgaaccaggtgttccaactatgaaaatgaacactatcatgttaagtccttaaggtaccttcagaagtgacactataattcagtgcagtcattctcaaatttaccctctctgaaacttgtatggtatgttgactggttaaaaggtgttcttaagaatcctttctgcagtattcaattgaaactccagatttttaatagctggacgttaatagaatatttgaattggaggagccttatacaataactcatttaactcctgttgttgtcgatgagaagaaccaggtctagagcctttacataaacacatcagtcagtggaggtgccagggtctgacctgctggcctcctaagtcccagcccagtgatagtttgggaatgtattgaatctcatatgattagtattattctccaaaagagaaaactaacagattttggcctaccatcctagtatcttttccattaaagtatgggatgttgggtgatgaacagtcgtacagtgtaactaaaccacttttgttgtatgcatcaaagtactttcttgtgaaattggatgagagattctgctgagggtgcagttcttgtctctccatctctcatccagtgaggaccaagtgagttaagcagtattgagtagtataacagtacgttcctggagacatgggtgtgtctgtagactaatccttattctccaattattgagtataatatctcttgtttaacatgaggaaagggtcaaatttgaggaaaaatggcctcttgtttgatgtgttttagttcattattctcttctattaagagaaattcactgttaaaaaattgtttcccatttccgtatctgaaataatgactgtagttgaggtgatcttgccctgggtctgaaatcatacttccaaaccaaaaaggactttgaatacaaaacttttaagaaatcttgtatgaatacaagctatatctgaaaaattgtgttttataatattgatgcctagttttgccccaggccatctgcagtgtggttactatgcaaagaatgctggtgttgctgtttttttttttttctttgttggctattaacccagcggagacaatatgtggctatggtagtacttggaagttctagcattacacagactagcttccatttctctcatagaggtcatttttggcatttaaaacacatacttttagaaaacagatttggatgtatgtaaacacagggttaatccaccacactctggatgctagagctgttgacaaagtcatgctttgcagattttaaaataaactttttgttactcttacagcttggtattttcccctcctattttttttacctcctctaaataaacctctttgttaaataattgatgtttctggatcatagaaaatagtaagtttaaaatacagaatatttccaagctaactacaaatctgatgacagttttttgagtgtgcacttttccttttatttcttaggtcctttttggtcctttgcaaacatagtaagattccatatttgtgtcccaactgtggtaatattgctgacttcttactggaaaacagtcagctctaggtagcatttcttctgtgtggtatttaagttaaattattaccaaaaaaaaaaaaaaaagcccacatgcactcccttcttcaattttccttttgttttttgttgtttgtttgttttttggttgatgttttctttcctacctgacatatggaagacaatgttttctccagctgggttcattttctctttgaaaaggagacactttggtgtctgccagtcatatgtgagctacacacacgtatacaccttttaaatgaaaaatgctgtgatagcaggagggctctgcttggctaactggttgtgtagcaagtcgggccccctcccctccacttagctattttgttacttgtagatcctgctctaattatttagcattaaacggacactaactctgtagggtgtgtaatcgtatttatagtactgttttattagtttgcattccatcctggtagtgtagtgatgtcataaataacagaaacatggtatccgatgcttgggaaggggtttacccggtggccaagccatattttacttgtcattattccgtgtggcggaaggtgggaaaataccgtgtgtgctgttaaacatgccaggtccctgcactggttagacagagtctcagtgctgtgctccgttgggaaagaagtgccctgcgaatgtgatgtggtttagatttatagcagcgtggcttgcagtgtgtttgctgccttagtcagctgtgagagcgccctgctggggccactcctttctgatggaaaagcagcagctgggaaggtgctgtttcaggctcttgctgtttaaaaaaaaaaaaaaagagcgagtaggggaaaactcctctaagtccagaagctggcattggagggggagagcgcggtcatgtggttctggccaccctaccctctgtcacagtgtggatgagagctttttgctcttatccaatcatgcctggaatgccgcttgccacttgggttatttctgctatctgtcgctcccggtgccgcagtgctaacagtttggcagatgggacactttttcttggaatttgtgtctttggtttgtgacttctggcagtgtcgggcctgttgttgccgcttgccctagccctcctggcccccctggtcaccatggcccatcggcttcggtttcattttggctctggtcgcagcaacacagcccccgaatcagacatcctagaccaggagagagaagacgacttcttcatggcattccacaccctaccgcggagaagcagcccgcaccccttcgcccagaacggaggggaggacggcggcggaggcctgcagggaggcgtgggtgcgcttaagcggagctcgtccatgttcatcccgcagctcttgaccagcatcgacgcccgccccacgtgcagctcctccgtgcagatctccctgcagcgcaaggccacggacggggccacggacgggtgcgggccgcccgagggcgccgacgatgggcctccatgcgcaacgcccgaccccagggaccaggcctccgccactgccaccacgagggcctcgccccagagtggctcccgggagccctcgccgagggacacccccgggagctcccctccgagggcagcccgggacccagggctccaggtcaacggcacgtgcggccgccgcgtgcggtgctccggccccgtggactgcgcggaggaggctgccccgggcctgcgcatccagcaccgcgcctccagcgccgacgtgcgccaggtgaggctgctgcccctgggccccgatggccagggcggcccggccgcggcagagcccaggcgctggtccctgcagcacgttccagatgcttctggaagctctgggaagcggtgttttgtcttccagttgcagcagccccaacaaggcgcttcggggccaggcagcgacctcaactttggcttcacgggcacaaagggggacaggttggtgaggtatcctcgcattcggctggagaggagcacctcgtaccccacgcagccccgaagcgagcgagggagccccacggaagatcggggagccctggaggcatcgcctcgagctggcaggatggctcctgaaatccgcaggacgaactccgcggagaggactccgcagggccaggggtgcacatttaagatcaggcaggatcagaacgcggggcagcagcattttagaattcttgtaacccgggggccggaagaagctccccagaatcccgaggagaaaagcgccaaaagccctgtttccacgggagctgacaccacggtaagttcacagcgtgtttacatgtgtttactgatttcaacttcgatgcttactctgcggcgtaaccaaaataaaacctcaccctctgttccgggagtttccctgcttcaggccagtggatctgaatgtttggccgagttctggcacgatgatttgtggtccagtgtttggtgcgcaaaacaccatttctgcaaatgtcttctgtaggtcctcaaagtcaaagaactttgtctgtttgggaaatccaagcagaataccttccccctgcttttatttttctgaatagaagaatttcgaataaaatttgttactttaatctgccaaaaaacaagtcagtgccccaacgtgctgatgttggaattgcatttaaaaagctgcttgcaagtatagcctgtgacaatactttaaaaataatcagttctcggaaaggggaggatattgcaaaggacctcagtttcgtctcttaatagttaaaataggtgaacgtaaagtttagtggaatttgattatctgtcatggcctgtttgctgcaggaggtcaggtcagtcgttgttatataatttgctttgttttttgtcccattaagtaatactgaacgagagtagtgtcgcttgtgggatagtgacattactatcccacaagtgacactgctaagatactaacagatgcgtttttaaagcacattgggttatggcccaaggctaggggaaactgatggggactcgttaatggtcagatggcgtggcgtgcaatttaacactgcacacttgagtgtccaagccgaggatgctgtatatagaatagtaagtaccctgtctccagctgtggagaaatagacgccttagaacagattctggccttcctgtttctctgttcctgatcgctccctttcagtgaaatggagtacagagagacagctgcacgctccatcgaccaggcatatgatgactctgcagctttcgtggtttagagtggaatgaaaagtttaatcagtttggtttcttttactagtaatcactagccagtgagtgctttctcctaaagaacaagctccttatattttgaattggatattttttctcctgaatttcatgtgactgccagtttgaggatatgattagtaaatgtctaggggacttttctttggatttcacttatgaattgtgattttgaaaagtgagcgtctgagtattactctagaattgtattgtcttttattgctttgtgttcagaaataagtttcgtctttcaagtaaactttatcactcctccatcattggttttcatcattttgaagatacaatcagatgcttaatgaaaatttatttttcttcttctctttccttccatgtatctcctttctttcattatctcaaactcttctattgggaaatggctaagtgctttgtcttggtctgaacctataccatgtattacacaatggtacaaattttgacagtgttttgatattatagtagcctttaacgcccacccccaacaaattaccatcatgacagttgtaggctttgttcggcaacacaattccatgctgaacttggaccacttaccgcatgaagattgacaaaaatatatttcctaaagtttgataactattcaattatattaccaaaaactgaaatcactttgcagttctgatgtggaagacaaagggattcatacaattaaactcaaaaaagttcaaactcatttggtttgaactttcaaatgtaattagaaaacaaatcgaataaactaaaacttatgtgtaccttgcttaaaagggctattctaacttgcaaggcctatgtagtgaaaaacaagtttctacacatttggagaatataaattctggaataaagagcttttcttggagagtaagttccaactagtgaacagtagtttgcattttcatatgtatgtatttttgtacacatacataaattagtacgtggttagtaagctggttttcttttaagcaaaacgatttttctttaaaaaacaaaaccaaaagtggtcacataacaaaaccgcctgctccattcagcaactttgtatgcatttcatatggacaggggtgttaagtttaggcagcagctgccaccgccttacttatcttgaaggaaaacattcacttgggcgtctacagtctggctgctaccaagcttttttggcgtttcaaatatccactgctttggtctaaaggacattacattattaagtttacatgaaaaattagctagaatctgttgcagtttggtggtggaatgatacggaaagtcttcctagatttgggaataccgctcgggattcatttgacaacgtgctcatatttcataagctatactttagaccttattacaagattaagttgttgagtacttttatctgtgcctcccaaacatcctgccatgactaaatctaaaatgtaacatgactccaaaaaatgttaaccaactaaattattagaaaaaatacaggggaaacccttgtgatgataagttttccacctggtttatcactgtcagtagacaagaattcattcgtatagtcatcaattataatcagttaaaaattttcagaattgttagaatttaccaattcagtctgtggcagtcattagtagtcatttagtgagtaatttagttattttcttataaattagcttttgggttattgggttctgagcctcttaactgcattagagttattctgaggaagttggaccaccatttaccagcatttgtgccccctttgtatgccattttgtgcataataactgtgaaactctgcattttacaagcttgaggagccagttttctaatctcattggtgttatgaagtactcaaggtctactgtgtatataacattacacccgttacttggaaagtttcagggactatctcagtgtcttgctgacacagtttgtaatgtaaacggagggaggagggcccacccggacaaaagcagtaattctaacacctactgcatatgctattggagaagagagcgttctttcagctcaagctctctggactttcctctgtgtcctctcagtggacatgtacttcacaggagtagtgtagtaatctcttgtgattaaaaattacttttattgaacaacaaaggaatatccaaattcttttcatttggggaaactttgagtctcttttacagaagatgtttttaatatacggccattttttgacattaatattagtcgatgtctgttttttaccctaaaaataactcgagtatccaatgtattaaccacccctttattttaaaacataacaacacaggaggcgaaggtgggaggattgcttgagcccagtagtttgagattactgtttctaccactgctctacagcctgggcagcagaacgagactttgtctcaaaaaaataaaaataaaacttaatattgtaatggagaagaaaaacaagtagcattcttttcattgacctggtttctgactggattcaatcaactttctttcttctctcatgtatagtaatgctctctcttaatgtggtcttagaataaaccaatatatatcttcaaatgtcacctgttttcagggatgttttgaaaagttggataggcagtgcacaaggttgacaccgatatgtttgtaaacagaaactgtacatggcttgcagcatagctcatgtttctgtagcacttcacaatttgaagaatgctttgtttatttcacttaatatgtatggctgtcccattgtggaggcattatctcacttgaccctcccatgtgaaatggtgttatttcactgtttcagatgaaaggatgtgataccgttgttaggtgtaataacattatgtgtatatcatagtgtatactatgataccactttgtgcacctataatgggaatgtgtatttatgtgtgtgtgtatatttgcacaattaaaaagtatatgttaagccaaaaagcagtttaatgcttcctgtgatgtgacagtttttttgaaaagtttagaggtggtaacttcatttggtgtcttgcagcactggcctgaaggtgagagaaggcttctttggggatccaaagagccgtcctctgcagttcactagcttttggtcctggagtacttagactccctctctaagcctattcctcatcagtaaatttgaggataaaaatgtccagctcgtaggttcatagttaggtttaaatgaaagtgtccatggaagtacctgattcgtgaaccaggtatctgtaatatacaagtctttcccctagcaggttaattaggttaattgtgaacaaccattttttgatcagtatggcatttaacacaaggacaacatgcatttatggcatacctggaaatgtttaataaatagctttgatgctctttctgttgtcatctcatctttcctaagtatttgtccctaacaccaaatacagtcttggaaaagaattgcttcctgaactatgcattatagaaaaggactcgtaagtatatttactgtgttgattttgaagccttataacattttggcttgcatttctagcatattttttaccatgtcattttgctgtaatatttccagtggttgagtctactgttactttggtatagactgaggcttttgagaaacaatatagtgttatatctacaaaatttccacattgtatgactttaaaatgagggagatatttgggaatatgtcttattttaagatactgtcttttagagagttttcataaatggtgcagctgcttctcttggctaagcctggtggcagaattcctagtcattgaaataaatctctaattttataatacatactgataagaaacttgctatcttttcataaaagttcacagtaccagaataaatttactttatgtaaaaactaccttaaaatgtaataaatgttggatagttgaatggtttctggatagttgatgaatatttctgtatagttgaggcgaatctaaatggtaatgctacttgtgcaactgtcaatgatctagcacattttttaataaaaataattacctgcatattactgtgggcgatacaggttagctatcctaaatacgtttttacctttttaactcttaattatattaagccatttgcaagaatgggaaaaagcaggaaattcataggtggtgttgaaattgctgattctacacaaaggtaccagaatgtctacatttcctctgtaaatgtcaaaggaaactttggaaacccacctcagagttggctggtgattattcggacaggttatcatcctgtctgcaaccttctagttctcttagttcataccaagcagcatgatattccatgtcctgcacaaaggagagcaccaaaacagccttcacctgctgcgtatgccccactctgaataaaaaattaagaaggccaaaggacggaatgtgttaaatattagcaaaagcaggtattgcagaatgtctatacatttctgggcaggtggagattattgaaagatttttagaaataatcttcgttcaccacattccagtgccaggccctggacttctgtctctatttgtgataaaatgtttttaagaaatgctggctgggcacggaggctcatgtctgtaatcccagcacttccagaggctgaggcaggtagatcccttgagcccaggacttcgagaccagcctgagcaacatggcgaagcctcatctctacaaaaaatacaaaagctagccaggcgtggtggcctctgtctgtagtcccagcttcttgagaggctgaggtgggaggatctcttgaacccgggaggcggaggttgcagtgagctgagatcgtgccactgcactccagcctgggcgacagagtgaaactctgtctcaggaaaaaaaaaaaaaaaaggaaaagaaataatcttctctcagtgagcatgttgaatgcataatgttctcactggagttctcctttggaatctcttgattattctgctgtggcttccttgggccaactaggatacagaggagaataaatgagtaactcagtgagacaggtggcctgatgtgagtgggcctgaaagttagcccctgatgtcctggctggtttcatgccatgtcctaaacgggcactttcctggtctctaggcatcaccatgttttgacaggaagcttagtttctttcaggatggaggatggaatcaattgtatttcaagaagcctgttttttatgccctgacaattttagaactgtggactgttctgacacttttgagtacagtgattaaatctctgtgaagggacaggtcatgaaatcaaataaaaggacggatcataattgagctggaagggggccctcctatctctgatttgactcgttgctacactttagtattcggaaactttgtattggttcccttaagtgcctgcacaacctccctatttctggaaaccattcagtgtttgttttaatgttaagcattatgccacgtatccagtaagcagagcagagtaaattcctccaggtagcaagagactggaatttcccccaggcagatcagcttttcacaggttcctagagtttacacagccttcttttgtgacttaatttttgtagatcacagtgagtcaagtgacttttacttccctgtataataactttgaggagcctacttgcaacccacatcatcactcattatcttgcttacttctttcttgggggttagatgggctggggttgttattaagcatgttaaatactttgaaattcaaatcgtttctgatagatttagtttctctttcttctattggtcattcgagagctggtagacttttaaaatacatttaatgactcacacatgtcataactcatccatttccttgacattttcaagcgtgataataaatcctacttcttaggcttttttttttttttttttctctctctcatgttcttttcaaatgcatggctaggtagttacctcatgaaggaaaacaactgttttggtccagattttaaaaattgagttgaatagaaaaggtggggtggaaccagcaatactgaaatgtaataatgtatattaagctccaaccaaacaatccagcacttcttcaaatccaggaggtcttctggctaggagttacattgcagaactaacatggactcttaaactttgtaaggaattagtcacagttgaacactggaaactatcagcatacctctgggcttcttttatatggtcttcctcatgagttaaaatgccttaagcatagtatctgttccataggaccttactgattatgcttttccacttgaataaaagagatattaagttgtaataaaactttaaatattttaatttagtttgaatatttaagttgaattaacctcttactacagtaattatcttttttgctaacttcttactacggtaattatctgcttttataaaatccagaaacgatgttatacacattagcacgcattattaggtgcccaaatgccaaggctaaggacacagcaatgctaaggacacagtgtgcctccggcctgcttgcaccctcggttgaaattatattagcaagagaagctcctgcattctgcagtatggcatttttctccagctaatgtatgcaggggtcatttttaaatgttagattcacagatttgcagagctgtgagttgccttggaaattatgctggccagttcctttaattttaaagatgaggaaagtgagaactttcctttttaaaaattgatacataatagttgtacctgtttatgggggtacatgtgatatcttgtacctgtttatgggggtacatgtgatatcttgttaacatgcatacagtgtgtaatgatcaaatcattacatactgaaatatttgaaatatctgtcactgcagacatttgtggcatctgtgtgttaagaacatcccaaatcttgtcttctggctgttttgaaatgtatagtaacttcttattaactgtcgtgctgaggacatggactactgtgctgttgaacactagaacttactccttcatctgaccgtattttcgtacccatttaccaaccctgagagctttacttttgcagtaatagagaatattctttttctctcttgagtatgaaataattatttttgaataatcactgcacgtgaagccctatccttcttgacgttggacatataaatacttagggagcttggtttatagagctttcagtttcacaaacagatgggacagctgaggtgaggcctgcctagcagaagaagccttactcctgatagcaggcactaagcaaggcattgggtgacagattgcttatgcacaggctgggagggacaggaactgtgtcatggaggggcaagactggaactagatgctgaaaagtgaccagatttgtctcagtgggccagtgggaggggcctcattgaaagactgaaggtagatgtgcctcccagggatgtggtggtcatattggctccaaattgccttgttcattattagcaggtttcagcaaattatttttcatgtgaaacgttgctgaagatttcttgggtgtggctgtcatcacaaacaattcctctcttttccatcaaatgtggagttggatgaattccttccttgctggcctgccttccacaaagctgctctctgaacacctgccaggccatgctgaggacaaggaaataccaaggcacagtttctgccatttaatggtggtagcagagacccaggaatgcaatggattattgtcactttcattataacatcatagtgtaggatcataactggaacagagaggatgaagctttcttttggggaattgagggagggagacagggtcttgctctgttgcccaggctggagtacggtggcgttaagatggctcactgccacctccacctcccaggctcaagtgatcctcccacctcagactcccaagtagctggaccacaggtacatgtcaacacacgcagctaattttttagtttttgtagagatgggggtcttactatgttgcccaggctggtctcaaacccctggcctcaagcagtcctcctgccttggcctcccaaagtgctgggtttacaggcatgagacactgtatccaactaagtaggctttatttatggagtttataaagaaactgtttatatatacaggggagaatttatcctgaagaaaaactaaagaaatgaatattttaaatacgtctctgcatttctttttgttggatatgacatttatgtaagaaaaatgctaatctgtatgatatgagacatgttaactacatatggtacatgtatttaaatatcatatgtatttagatttagcaacaaaaagggaaatataaaccatatttccaccatttgaacaaatcgtattcaattatatgtgcatataaccatttgaaaaaattataatgttgatcggatctgcaacctaaaccaagtgccaaattaaattcaggatagataatttcatataaaatgtttcacatcatagaaaaagcagtgaaaattgagtatcagatctgtgaaggatgatacatttctaaccttagaagcagaaaaggaaatcacagaagttggatagattcagccatataaaagtattaaatttctgaaccatgaaaaaaataactaaaatgagggaaacaccagatgtttttcttagtgattcatgtaagttctcatatgtatatcttttcagtgtctaattatgtgcatattttggccagtgggtttgtatctctgtagaaagttctagtaaatactggagaaatactgaggttcccccactccagctctttcactccattgcaaagtaggtcttgtaggtgaatcacacaaacggattaacaagaaagacagaaatgtccagctcccaggttcttcattatgctgttgtgttgtgccaatagaaaatacaatatatcaaattggagaacttgtggttgaaaataatatacgcagattgctggtggcagtattcatggatgtgactttggagtgatttttaaacacttaagtatttttaaatgataagaccaattataggtactaagagtcttgtgttttgaagtgttggagttaatccagataaagttacaaatctaagcagacaccttattaagagatcattattctctgcttttaaagtggacttgctttctatatagttatgaagaacagatagaaatgttttaagattactggctactattaaaataatctggtgactgcagttatatctgggtctaaggcattagactttttggaaaatggatgcttttaatctttccttccgtatatttgtcacccagaattttaaaatttggaaatttcattcattcagtccagatagagaattgatcaattggcaattttattatttttcgctcatgaaaaactctagggttacaagaatatgctcctgaagttaacatagttacttttaaaatgtctcaattctaatggttaggtattagtcctctgagttccggttgccccttaacttggatcttaatttacagtttacagaaaattgttcatatttcatattttaagatcatgtactctaaaaccctattatacttgaaatgaagacctgttatgttatactagaatctctcatgaaaatgtaacagttcccaaggaactttgtttctgtctccatggaccacactggctactgtactggatggagggcaaggcgggagctgagaggcctttgcagaagtgcatgtcgccttagtatgtggcagatcctggtccctggcctgtgctgtttccctccacaccctttgatttctccgaataccaggaaagatcatggattgtctcgggagttagtctcccccttagtacttagcctgtcattttcatgttgcaatgcctagaaaatgggaggtttttcttctccttaaggaagtgttatttcaagatgctttctgctgcctgtgtcatgccagggcgtgggtggatatatttttgcacttttgcaccagcgagtctgcttctgatttgcagattgcatttattataaggcgtattgtccattgatgaataatgtgtgggcattaaagcaaagctgatacatagcttttaaaatagctcatttatcctgcaagcttcacccccatagagaggcaggcccttcagaagcgttttccaggagcaaggtttctgcatgtttccctcagttttggaggtcgtcgttttttgcccctactgtgggggccaagggaaaattgctctgcgccttctgatggtcccctgaaaaatcaactgtcaaaagcccaattaataggagaaatgccatacaactttattaacgtgcatgcagattgattaccccaaccccccaatggggttcagaagcttctataccatcctgaggttataggaagaatggggctcagagcccgaccaaaaacagggtatggtggtcaatcaggttatggtggcaagaaagattcttggagggagagaagaggaggcctggctagcagaggtggccctgtcgtgtagatgaaacctcctaggtagcagccctcacagagaaggcagatgtttctttcagacctttaaagatgtcagactctcagtcaatcttccctagatctggacaagggagggccttagagaaagatggcctcccatcagtgcagtttcctccccaggtgcaaatctccccccacagacctgccctctgaacagccattcacagtgtatcaaagaggtatattttggggtgaaatatttttattcccttcacccctagtttatcatgtgtttccttgatgggctgagggcttgacagatgagcagatagacacaatcttagttcatggaaaaggcaagaatagagatgggtagcggagagtttttaagttgctgctgatgaaatagacactcctttgtctcagctactgaaaattttctttagaacgtggatttaaataaagaaagaaatagacatcatgctttgtaatgaagtcctttggtcatcgtaagtggtcacagccagtttatcctcaggcttctttaagctgaccagttaaggtttctgcagaggttctgtgtttgagggaggagaggaagtccttggggaggaggggagcgttctatgggagacagtgctcttgggagcattctttcaatctgatacccatgcaagggtgatgacaaggtatggccttcagtgactcagagcctcctcccttcccaagcctcaggcctgaaagtctggtgatcctccctggcagaaacctcactggggatcattttttccttttgaacaagtttcttactttgcctcatatgttccaatcttctgtcagtggccaggtgacatctgttggaatgctgatgtgtgttgccaagcaaaacagatgcaggaagacttgcccaaagtgggggaagagagggaggaaagggaggaaaagtgggaggtagagtgtgttagctggggagatgggatcgagcagtatttatctatagaacagatatcaaagattgggtaaatcatggcttaaaactctcagaaaagcattctaggttcttgcacatctttgcaaggctactgaatggctcatttttatttcccaccctgcattcagagtggtgtttaaatggctcaccgcagcaaaaaggattaggtattacccttgtgctcaacacaagtctgtggtcagcagatttttaactttatcctagtttattgatatttctgtcagtgaacaggtttaactcttaatggaatagaatctaccaagaataatgcagactggataaaaagaatttcactgattttgattatttagcacattaaaggggacccctggccagaagtagatgtattgcttgggagaggagggcatagtacccaggtggtacttcagggattctgattttcagtcagggttgagaaaaactgatttaagaagttaatgctactgacagcctaaatctgggtttccttgataacctttggtgtaaatactgatttaatgcatttttttttctcacccacttttccttcatcaccccaaatctatattgtgttcacatggttcctctttctagaggtgggagatgtccttttatggctcagaggtccacaaaataaacttgcattcaagcaaggttgtaaaatacctatgcattaagagcagtccagttgaatatttgcaaagcatatataaaagagcttctctcctaaaataactgaaatgaaaggattaattttctctcagtttcctactgcaagaagtaagtaaaagtggaattccaattctagccatggcaagaccggtctatcctgttatgtcttgtgtgccaataccacttttctccaggtaactaaagtatctccctgctgtaaatattaactgagtgcatttttgtggcttttgataactccacgtcttgaaagtgttggccagttgtcaaattttcatgaatttcagagaagtgggtaataggtggtttctctcacggtatttaaagcgaagtagtaaagaggaaaaagactgaaaaggtaacctgggtcaactcattttttagggcgcacagaagtgtggtagcggagcctggacatcaggtggcctgaagcccaaaccaccagctcccccagcacaggagagtgcaaactgtagctcagtcttggccatctggggtcttctgcaaatgaactgcccatagtctggccaataattcacactgttgtattgctgtctttcattctctcttaagtagagcgttctgaacatatctgaacaattttttgacacgctgttactctcctagccacaggttattttatgacctagtcattctttacataaataaacatttatcaacagtgctgtctgggcctagtaaggtatatagcctgctttgtttctgcattaaagttcttagaccgccatgatcttgagatgtttgctgcttattgtttctttctgatttctattgcttatcagttactactacttgtggctccaaggatagaggccgattccctcttctaatttgctgcctctcatctgcttgaagtttaggtgtttagtcaagctcactagcattgtttataaaggaagaataaataggttgagagtgaggacttagggtagttacctttttaataatgtatatgatctgtctttggtctttctccctcatatctctgctgattttactctcgtcctcctggaacgtctctggaatcagatagatttttgtaagatttggatgtaagaattcagtggaataatatatactagctgtttagcctagtgctcggcacatattaatgcttaataaatattagctcttattattattgtttttttccctgaaagagaaaatcttaattcctcacagatgtttaggaattggatatgtagcaaccctatccactgaattagtatcagcaaacacatttttagttcatcttgatttttatcttcattgggattatgcctttatccctttagggttaatgaatttcctactgtgctgttatggaagaaccctgaaaaaaaaatcaataaaatgtatccttaaaaaagattttatgattcacttgactaccaggtgtcagcaacttttatttttattactttaagttagaaggactttgaaggttttcgtggtttattctcttcttttttaaaggccaaaccaagatcactttttggtaatggctacctttcctctgaatgtatttctcaaaaagttctttctggtttttattaaacccaaacagttgttataatttaaaagttacccttttagagtgagattagctagaaaagaaattaaggattattttaagtaactcagcaagtaaccttttccaagaagcttagattataaattaacgaaaaccaaattataaaccaaggtgtatggttgattgtgggttaagaattttatcagcagttttgctgttgtatgtaccagtcgtatattttactactgagtagaagaaaagtctaaaaatcaagtgagtagtttttccttagctggttatcatgtttgtttgatcattatattaaagtgctccttttatttttcgttttgtatgttttcccaacttaataatgaatgtgcttctctctaatctaatctctgaatttcaggagtctattaataaagtatgtgtaaagaattagttgctaattttggatgtggctgaaatgagattgtcagcaaattacaacttcaagcctaggactgcagtgttatggattgcacctcatccttggttattgaagatatattcaaaatttatgaaaaatagaaaaaccttattacttctgaatttttccacgttagactttccttatacttttaagatagtgaaagtgttattatataagatcatggaaagtttgtctttccagacctattttatgttaggattttacaatattaaattcataagataatagtagagactagaaaacaaatccttactgataatgaatttcctaagtagtaaatacaaatgaatatttatttgtaaacctgggtgattaagtaatagctgttcagtgatattgatggaaggaaattaatattatttaatccaaaggccaggcgtagtgactcacacctgtaatcccagcgctttgagaggccgaggcagatagatcgtttaagctcaggaattcaagaccagtctgggcaacatggcaaaaccttgtctctccaaaaaaatgcacaaattggccggtatgtgcctgtagtcccagctattcgggaggtaggaggtaggaggatcacctgagcttggggaaactgaggctgctgtgagctgtgattacaccactatactccagcctgggtgacagagcgagaccctgtctcaaagaaaaaaaaaaaaaattaatcccgaccttcctccaaaaaagaataaattaagtccagaaagtttggtgattcacttgctgttgccgcctttataaacataaaagtcagtaaggctaagggacacttctgaattccttctgctgtccaggtactgtgccgagttctagagatgcaagtagtacataagacagatgtggcccctgcccttgtggagactgcagaccatggctctttttcatgaatggtagagacactcataagtcaaatacctacatattttcatgaatgtgccaaaggaggcaaacaggaagctgagacaggaaatcatggggaggcctacttgaagagaggtaaggaaacccccaactcaggagtggcctgtaagctgaggcctgggaaggacccctgtgggcatggccagtggaactgcagcggaagcagccgttcgcccaaaggtcctgcgctgggaagagagtcagagatgctggaggatcagaaagggatcatccaagtgagtggaggagacagtggtccaggatgagcttaggggaaaacaggggcccctggattgttcacgctgtagaacacagtcatgcatctgatatataaatagcatggagataccctcagtagatgcaaaactcaaatgagctcagctgctctgaagcctgggaaaagtcagcaatttgtaaaattatgacacatccacattttcacaggaaaaacaaagactagtatgtaacatctcctttggtatttacagaggatctctctctctctcgttgttactcttacaaatgataggaggccacttttgttttccaaattctgtgccagatatcttgcctttcctgagatatagacacggtagagtcaggagtgtgtgtgagggcttgcagacttctttttatgtctttagaatccttcttcacttttgaatcatttggtccaggagtttaaggccttttcatttggcttttgttgttcatttgttgaacataaataactgtgttcattatgcagacaccgtgtcattgttgacaatttggtgttgtagattaaggcaacgtgaccatgtaacaagttgggcaaatgcacttatccattcagtgagctctaacctacaaggtgttttgcttcagaccaaaatggtagactgcagaaccttcggcgcggattttaagtccatctttaaaaccataggtagagattgtatctgtgtgttcttctttaattaaaaatgggaaaatgatgcgacagagcaaagacggccatggatcctttttatccctctcccatccacacagagagtttatttcccctcccctggagtccaggctggccttggggttgccctgaagtgatgccgggccctttctacacgtagcctttcaaaggaccggcagcttccacttcctgccttttggaaaagcttgctttagggatccagctgccacctaaaggccctgaagtgagccacgtagagagaagttccagctttctagcccatctccaagtgtcaggcaggtgagtgaagccatcttggatgctccagcccatcaccatccaactatagtcacataagaggccactgatgggcccagtccgtctccacactcctgagagttagtaagtggctgtcgtgttgggctctgaagttgtagactagtttgttagtgacgtataaccaaaagagagagtgtacttaacatttagtcctgggaggttcgaactttgcctccgcctgtacgtgagctccctggagtgtgggatgaaggagtgcttggcccagttgttttcccggaagctggaggagggcagccatgcacaggttgtgtagaccaaacagttcagggatgcacttggcttagacagctgataaacagctgcagtgcccccaagggagttgaaagagtgggtattttgttgtcaggagtagaattattcaccttgaagaacagaagatttgtagtttaaggaaattcaccatattcttaaaagttgcagaaagagaagagttcttagcctaggcctgcaccaagatccagttcttttgaatctgatttaataggcagatgatgaaggacttattcccaataataaagaatagttcaataggaggttggtagtcttaattgtcttccttgtcaaatcctagtgaatttcacatcagatactgtgccctgtgaggctctatcaccttagcacttggtaatacgttttttatgtagtaggtgctcaataaatgggttgagtttctataataatttgatttctgtagcatctgatttaactaagtttgctataaaacgaaatctgctattgtattcaacatcacaataagcagtatcagttgtaaatcatacctacatacagttaacccttgaacaaagtggaggttggggtgtcagcatcttaacacatagttgaaaatcttttgactcccccacaatttaactagtaatagcctactgttgacagaagccttactgataacttaaacagttgattagcatatatattttatgttataaaaattaaatactgtgttctcataattaaactagagaaaacgttaaaaatcataagagaaaatatatttgctatttattaagtggaaatggatcattgtaaagtctacatcctcactgtcctcacattgagtaagctgaggaggaagaggaggggttggtcttgctgtcacaggtgacagaggtagaaaatccttgtataataagtgagctcatgcagctcaaacccatcttgttcaagggtcaactgtacttgaatggatttttttccctgtcataattaaccacccacacacatcttactagaccaaaaaagaaaacttgtcaagcaaataatctcccatttcttgggtcatttggagagataacacaggccaggttatatgtcctgaaagatgagaatgtgtgaagtccccagagagtctgatacgaggccttcttccagggagtagtggtctggccgctgcaccagcctgccccctgccatgccctgactcacctgcacatcatgggtgctgctgatgcccaggcttcatggctgagcatggcacccttagcacccctcacctgttacccaacggagatttgtgggtcggaggcatttcaattggagaaggatggaatggctgagggcaggaaaacttaacaagcaggaagtctgcaccctggctgcacatgagaatcccctatgggcattgaaagtagggggagcattgaaggtagggggagcattgaaggtagggagcagtcaggtcccatttcctaagcggctctgcaggcctctaagcttgtcagtcatctttttggtgctgtgtggactagtgccagcaggaacaactggatagttttaagtctttggcctcttctgacactttttaaaccaaacattttattaaattctcattcaagttaatagcaaaaaaatattactactggtttcatgtttaggtctcatttgcagtttttaaaacaacctaacggagtatagtaaatacataaagtactcgatttaatgtgcattttctttttcgttttttttttttttttttgggtggggaggggggtggttttctgagacggagtctcactctgttgcccaggctggagctatctcagctcactgcaagctctgcctcccaggttcaagtgattctcctgcctcagcctcctgagtagctgggaatacaggcacatgccaccacacctagctaatttttgtatttttggtagagatgagttttcgccatgttggccaggctggtcttgaactcctgacctcgggtaatctgcccacctcggcctttcaaagtgctggaattacaggcgtgagccaccgtgcccagccctagtgttcattttctgacaagttctatgaaacctggtgacttaacttttctgaatctgtttccctatttgtaaaatgacaatacttgcagtagagtttatgtaaggaattaatgagggtaactttaagatctttgtaaatgctaatgtgttttacaattgtggtcagctataataataataataatattattattattattattaataaaatgcttactaggcgaagttaatagctcccacccattcccaaactacttaaggaggattttaagctggaaacagttaaggaaagccgcatgatgccatgagcaaagccttccatctgcacttggcatattgcagggtctgtagttgctggaatgcctatgtccctggttacgagccttgatataattgtgctaaggcattttggtggagtggaccgtgtcctgctgttgatcaaacatttctgtgtggagagactttgtttttcccttggggagtatttattttttagtgccaggctccgggttggctgtgctacgcttggcttttcagtgccaggcatacaaccatgtcagaagggggactgcatggtaggtctcaggaagaagggccgaggaagaggagaaaagggacttggctgtggacggggaatcctgtgtatcttggcttctctgagccagctgtgcctcagaactttgatttgatctttgtaccccatgggtcctgccaggtgaggggcacaatggagaagagaaaaaaaaaaatgctctgctgaaaacataagcaacaaataaaatagaggatagtaatcctaggataatccccgaggcagcagagaaaggcaggctctggcttgcatgtcaggagctctcttcctgggggcaggagggagggtggtatagtcccagatgagtgcttggcaggttgtttagagcctggtagcagtgaaaagaaatgtctaccaggcatcttgtgcatgtggtagatcttgacttgtaattgtggcagtctcccctaggctcctcggcagctaggtgacagttgcctgctagttcatgggtcaccttctcaccctctggcttgcttctcagtgggtgtaaatggggtaattaaaacctgtggttttagactttgctccaaagactgtttctggggttctgcagacattgacctgaaatttatttttattatttttaacgtttaccacctgtgaagatactgtacatttaaagatataaaatgtatcatattaaaataaaatagcctgtatgttttacattttgagattctgtttatgctgtttttttaaaaagttagaaatgtattggcatgttctgatagcttatttttaactacttctccattgttgtaatatcataacaggttggactggctaggctatggtcagaaattgcttatcagtgttttatacatacccaagggattccaacacagggtgtccatggtcctctttgagaaaactttgtctaaaagatattgaatgatgcctcattaaaaactcctcagaaatattttctcctggcttgttttcgccttccgtgtcattgtttgagaaatatccaagattccttcttttttacaattaaaaaaaaaaattgaagcaagtccataatcccatgtagttctttgatagaattaaacttcagataggcataagaaattcagataggctttctctccactggaaatgcatgcctttcgcaatcaacagtgtatgatgtggtctgttctggagttggggtctgacccttcagcatggccagcgctatctgaagatcagaaaccctggaagccccttgtctctttttcatcttccacatctgtctggcgtccaggccctgcccctcctgcctcttcactgccactgctgtggccagcctcttattcagaggagtttcctacctggttagacacttaaccacctccagacggaccccttctaatccacgtcccacattatagctcaaaagtatggattttacagatcttatcctctcctgttctgccaaaaccccatacggtcctccattaccaatcaggtgaatcgacttgcatttcccagcgtgtccccacacccacaaacactccatgacactgggcccgtccctgcctttattccctgtggcccctgtgtgcaggagccttccctcccctttctatcagtccctcatgtacaggccttcagccccctcactctgccctgttcctacctccatcattgtgccatttatgtttgcatgtctgtcttctctgtcatatctatctcaaactaggttgaaaattttttgaagatggagattttcagaataaaattgttcacacagttatatatttgactgattatacttttatttttatttatttattttttttgggatagagtctcactctgtcacccaggctggagtgcagtggtgcagtctcagctcactgccacctctgcctcccaggttcaagtgattctcctgcctcagcctcccaagtagccgggattataggcatgtgccaccacatccagctaatttttttttttttattatagtagagatggggttttgctgtgttggccaggctggtctcaaacgcctggcctcaagtgatccgcccaccttggcctcccaaagtgctgggattacaggcatgatccaccatgcctggccgattatacttttttaatgtgttagttaagatgagagagtccaaagtgatacagcccctgcccccacagagcttccagtctagtgagagaggcaggtaccaaaaagataatgcacatgacagaatggactgaactaagtagtagtagaagttcaaacgaagaagaagacacaaatggataaaagctatggattctcaggattgaggatgctgaaaggctgcacaggatgaaaggtgcgaccaagggtcctgaaaaaggcataggatttatacttgcaaaggagggcatttccagcaagaaggcttggaaatgagaaaatctcgggagaataggcccatgttagaaattcggtacacgattgagaggaaaagaagtgccactggggaagtgtgttgaagcaggtatgtggatgttcttccctatgcagtggtgtcagtaggattttttgttggtgtgagatctgggatctgtttgtaagccgtctgagagctgggactttgcattgatcaactttttgttgcacatgctctgtgatgtaattggcactgcatgatttgacaagaatgtgttttatgctctaaatcaggagtgagcaaactttctgtaaaaggccagatagtaaatattgtggcctctatttagtccattctgaatgtacattagacacaagtttctaaagtacattcacaaataagcattatacacttagttgtaacatacacggatgttgagcagagaaaaagctctctgatttttgtggttcctgctctaagccaggctaagtggtgttgtcagggttccaaccccttccatccctgaagcacactcagcaaaccatctagtttataagccacagtgtgctagtaggtgctgtgtgtatttttttgcggggggaggaggtatttattttgtttttgagatggggtctcactgtgtttcccgggctggtctcaaactcctgggctcaagtgatccttctgcctcggcctcctgagcagccactgcacgtggctgcatcgcttttaaaggtagatgatgcctctggcctttctcattgcctctgggtgtgtggcccatgtcactgtccagcgcattccactgtccagcccattccactgtctggccccatgccactgtccagcccatgccactatctgtgtgttccgtgccactgtccatctgtgtagggaagagagcaccaggggctggcctggtcaggagagctttctgggcaggggttgagggaggcacatgtgagctggactttgaataaaaagaaaggaaagccaaggagcagaccgggcgaggctgggtgcgaagaccagatgtggcagggatttaggaggcagagcgagcacaagtctgtgcatattggtaggttctgtagacttgtcggttgtgcagtggattcatggagcctgtcgaggaagctacctgtgtgcttccactaggaaagcacagccacagagagaagatgaggggcagggaagcagtattgtggggaattcggagtgagggctgaatctgagaaatattattttaaaattatgttaaatacattattttttgctgtctccaaccatcattactatgttcactgtagaaaaattaagaaagtcagtatggcatatagtcccataaccaagaaattcattcattgtgacctatttgagggtcatttaaaaatgactgatgtaatttggtaaaagattaatcaacaaaatgacttatttcataattaattactttccactaatgtgacatttctcaaactctgcagtatttccttttcttcttttcttttctttttttgtttcctgagacaaatctcactctgttgcccaggctggagtgcagtggcatgcaatcatggctcactgcagccttgaactcctgggctcaagcgatcctcccgcctcagcctcctgagtagcttggactacaggcatgcaccaccatacccagctaatcttttatttttttgtagagaaggtgtctcactatgttgcccaagcagatcttgaactcctgagctcaagcaatcatcctgccctggcctcccaaactgctgggattacaagtgtaagctgctgtaagctgctgtgcccagcctatattttcaagtctctctccttttttttttttttaaactggaaaggatagctgtgatggaaatggaagacttccaacagaataccttagttagcataactgtgtagtacaagatgtaaaaacctgttgaagtgggtggccttttgttatcattctgtctttctgcccaccctgtggcacagttctcaccatattttctgtcaactgctaccacatggtccccttctttatgttataaagtctcttaattattaggtaattattcattgtcctagctctccatgcttaccaaacaatattaacaagagcacggtattacaaatgagtcaataacaacttccctaaccttatggcagctgttttggaggaaaaagaaaaaagaaaaaaaaactgcctttttttttcttaatgcgttacaattggttgatcagaacagttttaaaactataaaatgttggctgggcgcggtggctcacacctgtgatcccagcactttgggaagccgagacgggcggatcacgaggtcaggagatcgagaccgtcctggctaacattgtggaagcccatctctactaaaaatacaaaaaattggccgggcgtggtggcagtcacctgtagtcccagctactcgggaggctgaggcaggagaatggcatgaacccgggaggcggagcttgcagtgagccgagatcgcgccactgcactccagcctgggcgacagagtgagactccgtctcacaaaaaaaaaaagcaaacaaaataactataaaatgtttaataaacatattttaaattaaaaggtaaggttgtatctagttatttatacagctatttttaaaagtcaggttggcaaaggtctctctgagtttcacaaaatatccgcgtgagtggtgcatagtttgtgctggcttatttccatttgttcgttgtgtttatggtaaccagtagcattttctaatttggttaaaatgctgtcattagctggtaaatgcagtcctgtcacctcagaggaggaccaagaaggagctctttctagaaagggagggatcgaattactcctcatcctcatatctacttatctatctgattttaagacaccactgaaatttatactgcgagcaatttaaatgaatgcagtaattgattgcaaaacatgtttgtaatatcagtgactgaaattaaataaaagataagtcagtactttttggatcaatccagttgatctaaaaataaaaagtagacatccactgaatggttgggtaaatgaacgaatgaattttggcttatgtcagtgaattggcctgactgggccttgatctacatagcttctcttgacattttgttgcccaaattgagtttgagtgtttttagtaggcagggtaaattagcggtatggatgggtataacattctacatttagttttgctactgtatatgagctcatgaaatggacttcccttccctaataatatagaaaaaagaaaaacctaaggaaatatagagaacacattcaatttgggaaattcccgtctgtatcagtcaaggataggctagatcatgttgatcatgctgcgtaacaaaccacatctcagtgaattaacccacaaagggggattttcttgctcacaatacacaatctgtgtcagcaggagagcagaattatctgtcgtcaccaagagtccccaggatgatgacggctaatcccattgtgccttcaccatcactgccataggtgaaaggaacgtgataaattgcacactgccttatttatttatttatttatttatttatttatttatttatttagagactgtgtctcgctctgtcgcccaggctggagcgcagtggtgcgatctcagctcactgcaacctccacttcccgggttcaagcgattctcctgccttagcctcctgagtagctgggattacaggtgcacgccaccacacctggctaatttctgtatttttagtagagacggggtttcaccatgttggtcaggctggtctcaaactcctgacctcaggtgatccacccgcctcggcctcccaaagtgctgggattacaggcgtgagccaccatgcccagcccatacactgcccttttaaagcctgtgttcgaaagtggcacacatcactgccgctcatattttactggccaaagcaagtcacgtggccatgccatttcagattgggaagtacatttttaccattgcccagaggaggagagagatatgcaatatttgagaatagccctaaagactacaatactatcccttagtccacctaaatgatcctgaggctttggggcaattaaaaaatccttactcttaaaaaatgtcaggcagtaagtcttgaagccagctgctggtgctacacaacatacccttgtcttgtgaggaatcccttttgaaaaggtaacttacctcgtcacttcattattgctcattgctacaggttgaattgtgtccccccaaaaagatatgaaatcctatcagtacctctttgaaaatagggtcttatttgaaaatagggtctttgcagaccctcttgcagatggagtcaagttaagatgaggccatgaatgtggaccctaatctgactggtagccttataaaaaagggaaaatttaggctcagaaacagacatgcacactgggagaatgccatggaaagatgaaggcagagatcaggtgatgcttctacaaggcagggaactccaaagattgctagcaagcctccagaaagcaggggagaccatggaatctccctcagccttcagaaggaaccaccctgcccatatcttgatcttggacttccagcctccagaacttttaaaccatcaatttccattgtttaagctactcaagtttgtggtactttgttacagcagttttagcaaactaatatgctaatcaatatatatttttatcatcttctttggacctagcaaggagaaccacttgggaaattgaaacaaggaccctctcgggaaagtttggtgaaatcctggccaacatgatgtctaatgctgattgcagtgaaattgagtactgttgttgatttttttttcctcaaagtagcttttggaagtgaagagtaaaatgtgttagtgggaactcagtattagcaagaagagaaataagggactatgctagcaaaatgaataatctgtctttattatactgtcacaggtggttatcaagatacagtttttgtgagacaaaaagctttgtggggctggagttgcttttgatggtggtggcagagggagagttatacgaatagaagtaacttctggtagtgtcttcgttgcatgtgggtacacccagtcttatgggcaagctgattttatataatcttgttcttttcagtaaattttgtatatcaaatatttaatcttacttctttgaaaaactttttagataagtgatgtttgcaaattgaagcatattgaaccatatatctggatattttgtttgattataaacccatttttacaccatggccatagagaatggtgccgtgggcactatcaggagtgatgtcattaaccccacagggctatgtggaaagcgtgtggctgggactgctgtgtggttgggacaaggcagtggtgcacatgggccagctcctgtaactttcctgtttgtggctctcatggggcactcctgctcctgctctccccgtcctcatccatgatacatactctctctcatctacgtgctcataaatttcagcagcaagaactgcatgatttttaaaattctgagtagatgcttccagcaaaggatttcctaactgatcactgccagagaagaagaggtgctaaatagttgccaagttacatgctttttttcccaaatgaagtacttcccctgctactgcttgtaaagccctgattgtgtgtgtgcgcagaacccacatctggtgctggaagcctaaggactagtgagtggtcatgtggtttatggcccctataaaaggacccattctaaaagtctccaagaagctaactccacaatgagatgatgtgtgtgtgggtgtgtgtgtgtgtgtgtttgagatagggtcttgctctgtcacccaggctggagtgcagtggtgtgatctcggctcactgcaacctccacctcccaggttcaagcaattttcctgccttagcctccccagtagcttggattacaggcatgtgctaccatacagaattcagattcctctcctacccctagcctgatgccctttcattagctatacaaaggtggttgagtttcaggttaggcttattatcgtttaaactataaactaaatattcaccaaagctagcccagcctaagcccaggaataatcaaggcagcttgaaacctaaaagcaagaggaggctgggttagatcagctcactgtataatttttgcaaaggcggttttattgaaacctgttcttttttgaaagctggctctttctaacattcaaatgcttttgatcaacctattttatggaagcagaatattgaaattaaagtaaatattagatgaactttatagccagttgttttcctcattcttcaactctttaccctacaaatcttatttaaacaacatgttcagcaagctgttatcttgcttacgcaatgaatagaacattatgttctaaggtacagtttgctcacctatgaaaagaatttaacctcttttctaagtagctatacacaattgtcataccttaagttcttatttagatgcatttcagaatattagagcattttgcaagtagatgcacgttcttacccagtgtcagtgtttatagacagacactcaccatgggtatatttaagtctagggtggtaaagaatataaatgtcatttattaaaacctgaacatagccaactatgaattatttgtgttaatgtaaacgtcgaatgagcactgcaaacatttgatgtttgaatatttgcctgtagaagtgcagtactatgttctatagaatataagtagatgccaccccagtcctcaaggtttcagtgaggtcatcattgtatcaataaaggtgccaatttaagatgctaactggacattggaaaaaatttgttgtcctattctgaaggatgagtcttatataaagtgtttttaaaatactttattgaaactgccatgttcttttcaattttggtagctcccctgcatttaatttagtcataagcgtctgtattaatgggtgtgttcaatatgaaggcatcctgtgaagacaataaattatattatacttatctagtctgcactctttatcatgttgataaaatggcccttaccagtaaaaaaactgtttcagaatgtgtaagagtaagtctgtctcagctgactgagggcttcatcatgttcatgataatcccagcagcttgaaatgtcaaactggtagctgatccatagcacacagtagtgctaattgagataggttggtgtggataattgaatttaattgaatattaaacaccagtaagtgctatgctagatgttgggaccacagtgatgaagatgacattatcctgacccgggaggcgctccttatgtgcataaactgcatttggaaattttcatgatttgagagtcatctatggttgccagtagagattttcccagaaggccaaggatatatggggacatttgactgttctttgaccataattatataactttttatttgcccagaatgaacaactgcagggtaacatttatacaaaaggaatttagtgtgcttagagtgctgataatacttgagaaactaggagagctgttttaaagcacttctttttcttttttttttttttgtttttttctgggctgttagaatttgacattgttcaactttaactttgtcctcattgaactttatcctgctaaggagctaaaaggtccatatgatcaaaaaggcagctctcaacccagcacgaaattccaggctcattcatttctgtttacctactgccaaataagtcagacaactgcatacttgctttacagacgaatagaggacagcatgttgttcaataattgtagtttaaaaagtatatgtaagatacatccacaagaagaaagatagagggagcataccgtttgtcttctagtataggctccctgcccatggagatcacagagtagaattatgatgggtgccttagagaccagcctccctcaggatcatgagttcacctcggcaccacagctctgggcaacgtggaattagacaaattaaagtagttaagttctgacttcatagaacagaatctaaacttttgttcatactgcttttgtgttcttgggccatctgaaaaccttttctgtgtaaatattcctgcaatatgcggtcttacagaggtcttatcacgcatatttccctttgcttccttatgtatcgtattttttcaagaagaagacattcaactttagagacaatggaatcattgtgttgtggctttaattcaggtcattgtccttttgtgagttgcacgtgtgcgcgagcctgtgtgttttgcttggaggaatagtgaataagcaaggagcagagtccatttgctttttctaacagagggtggggcagattctctcacaaccattaaagaaaaaaataagataccagcaataatgataatcagtcatgcatatgtaatcgtgtgtagttcatacttcagattcatatacagctgagcatgatcttgaatgttacaggaagcaagcttgaaagtcaagttacagtagaactttgctaattcatgcctgactaatttgcccacccagtagttcctactgaaatcttgccattcctctaccaactttcagaaaaatttgatagcaggctgtggagaaggctcatgttacttcttatgtcaaggtgtaaacaaaaaagagagcacaaaatacatccatcagaccacatgaagtgaagagagagaaaacatctgctgaaagccggattctctgtttttttcctgctttttaaatgtaatctgtctttgtttatgcatgccctagaaacatgcataagtaaccctgagtagtctcttagtttaagaaaacctactataaaatttcttgttgtaaaataaaattctaaaaggaataagttgtggacatataagtatcagacagtttatgtaagactttacataggatgcaaggtaggctgtaatatgatttggtaattgttttatgggggaattttgttttgtatagcgaaaaagaacagtgagtgatttaactgaattttatagtttaatattgttgttgttttaactaaaatctttggtttgctattgcaaaatgaaagagaaaggaaattttggttaatgttaactttatttccaaaaccatgtgatggatgctgaccaaatgtgtctcaatagtgccattgaggtctgttgcctttttttttctttgaggtgctaagtgaaatgtgttttgaaccttgaatgttcactatgcgacgttctttgcattacaggtagatactgcaaacttgcttcaaaaaaactaaaaagttcaaataactaatggttcatatttgttccagttagtaaatatcacgacaaggtatcatcgtcatcccatgttctcagtatagattcagcttcatttcttacaccacacacccagaggcataaatggaagtacacagacaaaaggaaaggcctgagtttaaatgtagttatcatgttcagtgttcgacattttattctgagaatttaagtgtttctactgcagtaccacaaagtcaatctgcatattactttaactagatcacttgtaaaaataaatgaataaatgaccagtgatggttcagtgacaagagtgccagatgagtcatgaatgttttcacaagtaaatttgatagtaaactgctaagtttactgtatacgctgtgtacaaattagctcagattcaagatttttgctctaacaactgaacgctcagttgcatctttaaactttttgttgcgtgagaggggctgaggggcaggtgggaggaagtcagcctgcaggtgggaggtttctgtctcaggattgctgatacccctgcatgctgctgggttgcagccttggagtatatggcctatgagacatggcatgtctgatttgatggaaaaagcagcggagaaccagtgaaccaagctattccgtgtattgactttttaatacgtttactacaagaatctgccttttaaagtacttttaaataaggttataaacataagtgtgttttggacacagcctgcagcaagcatgcctctcgaggtgtaagatgagtcagctacacatgctcaggggcccgttccaccagccacagtagctgcagagggtgagagcaactgaagcaagagaagctcttagtaattaggggaaggaagcctccacttgacaccgcatcaccaccaagtatttattgagtgtctttggtgtgcaaggcaggagaatatcttctatggattctacatatttcagggttaccagagttataaaatcccttgaaatctatatgcacaaattgtaaatacgtatgcagctttttataagtgttcaaattctgccttaattgtgctcaaggatcagggtctcaccccagcattgtataccattgatagtcatgatttccttagtgaaattaagtaaattgactttcagagactttatttcatattcatcatgtccccatgtagccatgaaaaaatgatatgtttaatattcatctatttgtatgattaaaacaaaatatccgcaactactgacgattcaatgatcagatattttactgtaaattaatatcatcataaactcctagacattagacttcagacattcagagcccactcgatgcttggcacaaagcaggcaccaaatacatatttatagaatgaatgaacaaatgaaggaagaaacaaagaaatgactaatgcaccaaccatttatcaggaagtttaacagggaaattcaacaaccagatttgttttgctaatcttattaaagtgcaacatgtttgttgtaaaaatagatccacattcgtcattgaactggacagtctaaaatagatccaaacccattgtttgattatacttcacaaatgtaaggtaaaatagatgatactatctgtcatttgcttgatgctattggcaaatgtgaagcagttaccagcataaaagcttggaggttactccgaatgtatataaacaacagtggctaggctcacaagtgggagagagtctaaaaataggtaggcgatcccttatctcgttgcattgaaaattgtgtttatatgaagtgatattattagaaatgatgtgtgagaaaagaatttctgcaatgtctcctacaaattagagtgagaaaatgtatctttatgcagctttgaacaaaggattattattgctggactgtggaccaaaattttagtcaagttttttttttttaatgaaaagaaactgttcatttatgcagacatacaactttgtgtcctatagagacttgtcatctgctcttaaagttagcaccctatttttcctctggatgtccactgagaaacccactggtgtgatggtcattgaaaaagagagttgtgtcagaatgccctaaaatcttagtggcttaacacattcccaagtttatttctcattcacactacccgtcaacataggttggcaggcattcggatccacagggtcacacagagaaccaggccgaccgacccacatggtcacacagagagagaaccaggccgaccgacccacatggtcacacagagaaccaggccgaccggcccacatggtcacacagagaaccaggccgaccgacccacgtggtcacacagagaaccaggccgaccagcccacatggtcacacagagaaccaggccgaccaacccacatggtcacacagagaaccaggccgaccgacccacatggtcacacagaaaaccgggctgactgaagtttgcactggagcttttcacagcccccactcagaggtgagataggtcaccttttctcattagccaaaactggtaagatggccttccctgaccacaaggatgctggaaagtgtagtcatcttttctctgtgcctggagaggagagagaagtgaaaattggtaagcaatatttctattttaaaagtggttagagtgtagtgcaatgaatctagcaccattggttcagttttaaatggactgattccatttgtctaattctgtgtcagttggctgttttctgacccctgagaataatttagtctggctgattcccccattgtaccaattgcctggcatatgacaaatgcatttttgcctgtaagacaatctttgcctaggaaagacagccctaatttttatgtcttgtattttccagtaagctaatctggagtatcagtttttaagactgatacacaattagatgaaactaattaaggacaaaacatttgccacttttaactgttgataagtgaaactgagatttccccccaccccatggatacagtgaacatttgtcagcagctggtaatggctagtataaagatgtattcagttttcccttcccttcctctccctccagccttccagccacccccttcccaaacatttatgctcatttagagaaaagcaaccccagttctcttacctgggatatcaccagtataaaaagcacattcgtataaattatctggcctttaattacctgtaaccctgtaggaaaccccctgggaaaagtaccacaaaagaacgcagctctgggggtctgtgagaggcacccagttcacacccctaaaggacagagcgagcactcaaacgcacagctttgggtgccctctgaggcgtgcactggctggtagcagtgggtatcaaccatggaagttcacggaagattaaaccgcaagttcccacgcaaggccaagtggctgccaggacttggaggcactgaccctgagtggtccttccacctcagcgtatactgtcactgctgcctctgtggcttcccctttccctccaagtagagatagatgtctcgaggtgctccccaccccagccaggttgtcctctcctgggtggcattttcctttctactctctggggctttcaccaccccactgggcataactctccacaggctcccctgggaggggtgcccccacctcacccgccacctcacttctcagcccctcttcccatccaagggctccctgggctgcccccaccctagtcatgatctcgctcctctactctctcgtagtactttatttttaccttgctcctggctcacattacatgcttatcttgtatttatagatggttctatatatgtctccttttgcatccttttctcaaagctcctgtgaggccagggatggttttatgccttttctcatccccttatgttctagtataatgctttacacatgattaaattctcatcagatgttgaatgaatgagcttattatgcattacttcttagtacaaagaaatatttggaacgtaagctctgaaatgttgatattctgtggatgcttggattacatacaatgtcctaaataaacacttgcctgttaagtagaagtcagtctggaaagtgatacctttagatccataaaatgtttataaggcacatgaatggacaaccacgttgttttttgctcttttatatgtttaggttactgacagcccaaaatacattagcttgtctttgggctaggaggtacctaaagttgtatttttctctcatgtcattttcctgggtttttatcatatccaacttcgtaatgtccaggaatttgagattaattcctcaaacttgtcgaataatacaagaggaaacttgtataatacagagcaaacttggttggtgagtagctgctagagcaaacttggttggtgagtagctgctacagcccatacatggatttgtttcttcaggtggggggataattgtatccatggactcttcttcattaactgacggatcaaattattttatgaagctatgatgagaaatggcttgtgctcttgggaaaatcaatgccaatgtaggtaatgcaccagtctagctggtttttaatttaaagaacaaattatcttctggaatagtaataaatccccctttggaacagcaagaagacatcagctgttggatatgggataattaccatatgtttcaatgtcgtaaaaaggcacagcaattttaataacccaggttgtgtacaagaaagctcttgcttctgaagaatccatcaaccatgcgctatgatcatgtaataataaactgctgtttacttaatgctgtttttatttaaagttttaattaacataacctagtctttgcaaaacatctgattacctttgactcatatgttttctggtatataataatgggttctcatgagttgtttattttataagatctcctgtttactcagagtaaggaaaattttttttgaggtaaggtcttgctcaggctggaatgagtggtgcagtctcaactcactgcagcctctacctcctgggctcaagcaatcctcccacctcagcttcccaagtagctgggaccacaggcacatgccaccatgcctgactaattattgtattttttgtagagatggattctcactctgttgcccaggctgatctcgaactcctgggctcaagtgatccttccaccttggcttcccaaagttctgggattacagtcatgaaccaccatgtccaaccaggaaattttggtattaggaagtttcccacataccatttgtctttggtgccatgaacacctattttgtctaatttttataccaacctttcactttggcacatgggaaatctgataaggaatcgatatcacggaaatacacatcacactttctgcttgccgctttcttccaaaataaacccaaggattccccttttccaccaccaccttaatttagataaccaagataaatgagaaggttttcgcacttgatggtgggatttcttatcaaggctattgaatttggtttggcactgactaattttggtatccatgtgtttttagagtaagttgtagctagggtggtggggtgatggggagactctcactgaatggctctaaattcagtattttattctttaaccaagcagctgttcacacacatttcttaggaagtggctaaataaaaatatggcagccctggaatgaacagaaactgttgctctttcaaaaaccagcagctacaaatagtgatttttcttccacaaatacttgtttttctgtgacattctcattggttttattcagttaaactcccagaccatgttgatttttttttgccttttattttttgagctcataggtaaaaggagttgaagtgattttattttctgtttttgtcttttttttttaagtttttgtagagacaggggtcttgctatgttgcccaggctggtcttgaactcccgggcctcaggcaatcctcctgcctcagcctcccaaagtgtacccagtctcaagtttttttcacattatatatttgtgttctttctgtttttaactaatggtctccattatttaggctatattaaaataacaataaaaacagagcagatacaacagaattcatttggttggccattggagctgtttttcctttttctttttaaactgactttatttttttggagcagttttaggttcagagcataattgagaggaaggcacagaaatttcccatgtatttcccccacacaggcacagcctccctcatcatcagcatcccccaccagagtggtatgtttgttacagttgatgagccgacattgacacatcatcacctaaagtccatagtttacactagggttctctcttggtgttgtacatgctgtgggtttggacaaatgtataatgacatgtattcactattatggtgtcatacagaataatttcactgccctaaaaatcctctgtgcttcatctgttcatccctaccatgcccctaaaccctggcaaccactcatccttttactgatttttacagttctgcctcttctgggatatcatgaagctggtggaataatgcagtgtgtagccttttcatagtggcttcttttacttagtaatatgcatttaaggttcctccgtgcctcttcatggcctgatagctcatttctttttagtgctgggataatattccactgtctggaaatgccaccgcttagttagtcattcatctactgaaggacagctgggttttggcaattatgaataaagctgctatgagctttttaaaaaatagtttaaatgacatatcaatactttaatatttaaaatatctcagtgatcatatagcctcagaaagcacagttttctgagctgggtgtcatgttgagtggtgttagagtgccgtgctgcgtgctcaggtgctatgctgtgaggaaggatgataggagcagattctgtataagcagatgcacaaccacccacagctgcactttggcacccagggcagacaaataaaaagggggcaagatttttttaggggagattcctggcagatagagattttcttcagaatgtacagatttatttttggggggtggttaggggcgacagttgttttaagcagagttttgaaggagtttggtttggtgagtgaaacagtatttcatttttgattgcctttgtttttccagcaagaaagctactcctggtctgtgggcacacaccaaaaggctttgggcaagacagagggagcttgtgtgtgcccccagaccggagtcataccacagttgtcagatcactttgcggcagaccttccgacagtctcctcatctctcttgtggaatttgagtttgacccacaggtagcattttttattttggtggtaccctgatgtttataaggaacctcaggacactattagttaggaaggagattgtcccatgcaattcagccttgcaagagcttcctggttgatctagggacaaggtgtctatcactcagccctccaggtcttttcttcctaaagcaggctttggagcaaagcctgaccggtctttgcctatgactgagtttcccagggctgctgtaccaaactactaccagttcaacttaaaacagcagacatttatcctctcacagttttggaggccgcttcaaagtaggtgtcactgaactgaagtcaggatgtccgcagggctgcgctccctccagagcctctaggaacacatctgccccttgcttcctccagcttctgggggctgccagcgggctccagcctctgccgctggggctgccttgcctcctctgctgtgtcagatctccttctgcatctctcttacaaggacacttgtgggccgggcgcggtggctcacgcctgtaatcccaacactttgggaggctgaggcaggtggatcacctgaggtcaggagtttgagaccagcctggccaacatggtgaaaccctgtctctactaaaaatacaaaaattagccgggcgtggtggtacgcacctataattccagctattcgggaggctgaggcaggagaactgcttgaacctgggaggtggaggttgcggtgagctgagatcgtgccactgcactccagcctgggcaatagggcaagactctgtctcaaaaaaagaaaaaaagttaaacgagtgtcttggcactcccctgtaatcccagctacttgggaggctgaggcacgagaattgcttgaacccaggaggtggaggttgcagtgagccgagatcacgccactgcactccaccctatgcaatagagtgagagtctgtctcaaaataaataaataaataaaaataaacaaggacacttgtgactgcatttagggcccagaacaatcccccatctgaggacctttcatttaatcacatctgcaaaggcattttcatgtaaggtaacattgaaaagtttcaggggtcaggacctaataaattttgtgggccagtattcagcctactgtcccctagttacaacaaggatggggcagcttatggacgagagtgtcaaaaaattcagattctgtcctacagggatcatcttaccctgcagctgagttgagtgattattgagaacatactacgtgttgatgctgttgcttagcactgtgggagatacagagatacataaaactctgcttgccctgaggttgcttgtggttttgttggaagagaagacgtgtgtgtaaaattagtcataagaaaaaggtcgtgtttgatcctgagagccagatagtggtacccagcagtgagcatccaagcccttatctcccaaataggagactttgtaggctgaaaactggcccacagatttattaggtcctgacccctggaacttgtcaatgttgccttacatgaaaatgcccctgcagatgtgattaaatgaagggtcccggtatggggggttgtcctggatgagctgagtgggccctaaacgcagtcacaagtgtccttttaagcccctgctgtgcctgttctcttggtaaatatctctgtgtgctggaacatttgaccagagagagatttcggtgatcatatccatatttgactgtttcctattccataatttgtcgctgtctccgagtcttttcccgggagccccctattacaagtgcacctttctgtgtttattcttccctgttgtgcttcgatgatcccttttttctattcttcagtggctttttctccagtaaaatagcagtttaaattcttgaagggaaacaattaaaaaataatgtctctgggttaacaagtatgattaccgtcatctaaatcagtgatactacatgagaataaaatcaaggagacttacatttacagtagatgaatctatgataatatgccctaccgttttgggtaatttaaatttatgctagttcactctgtctacatgcatgtcatatcttagtgtaaattatagaaatatccctataaaagaaaaaataatttttttctgtatatgttttaagggaacctgaatttctttgggttgtaatgcatgatacagatagtattctgggaatacctgatgttcagcttatccctggaaccctggttatcttagtaaaatatgcagcaacaatatagaagacaatcctgaattttccactgcacaattagggcttgattcaccgtatgacttgggcaaattacttaactttttgaaaccacacttttctgattttcaaagtatgactaataatggtttctgccttaggattattaagatgattaaatgaaataatgcatgtgcaacgtttagaacattgctttaaagtttgtcttttccttctctctccccttttttcctttaaaataaacaaacatgtttgagggctgggtgagttgatgggctccctttagtgcagcacttctaagtaatcactgttccctctggttcattccattgagcacatgatgacaaacatttctggggatatcatgtcaccttggatatagaacagtctcctaaattacattttatatgacaatgtctcactgtatttttgtcctcttgaattgcagcatagcatattatttcttccagcaaaaagcaaaattaaataaataagtgattaagttgctggctgtagctgatactgattcatgacatgactgaggattacttagccatcacattgaattgatgacagttgccttctaaatattatctttagtcacatccctcgaatgtttgcagtgactttcactcctcaactagaatatgcacgtttacatacacatgcgataaggctgaagaaggcttgtggctcagcacaatttggtcttgtatgcacagtaatcattctgaagtgtatgattctgttttattagaaattctcacttgaatttcaagagaataaaggaggattcctcctacacaaagctgctaattgtttgcacactgtgtgcatcccgcatgataagcgatttgagaaggtgccacatcagtgcctttatccaagtgtcacctcctgtctacagttcccttagcagggtgaagggagaaagatgcaaagactgagcttggctgaaacaaatgtatttttgtccccttgacttcttgaattgcagcagagcatatgaataacattgatatatttcttggctgctagacaacaacgtatttctttgacagattgacgcctgaaaagaaaaatacagtatgtactaatgaatcaaaacattttttagtacctttgtgtatactaaatgtattttagtttctatctggagctagttgccatttactgtgggtttgaaatgccctaagttatcttctatggatgggtagaatcaatttacccacacattgacagcttttacagataggtcctgtaacagatataattaagttaaatttcataaatagataggcagtctcctccccagtcctggtccctttgggagatgaattggggtgggggtaatggagagtttcaaaaaggctttccggtgtctttttttaaaaataaggttttaagagtttcatggtcagctgttctcagtttttctcaagatggtatccaaagtaaggctcaaatttatgatttatcttccaaatgcttaaatggtccatttatgatctgccagatgttacaatgactagctccccaaggaacgatcaagaatgtgccaatgtctgggcaagatttttatccagcaaaaagaaaaaaaccataagaattggaggttttactttgaaaagtaaaatcagccacatccatgacttaagagactgtacatattgtcatgggtaaggatttagatcttggctccactgcttactcacagtgtaccctggacgagttactaggcctttctgtgttttactatgctcttttgtaacacagggagagatagcatctatcttctaaggttgttgtgaggattaagtgaactaacttgtgcaaagctcttagaatagtgctgggcacagagtggtgagtgccttgtatatgctaatagttgttgatttatagcttaaaattaattgtgtgatgcaaataggagggttaccaccccaagcttaaatggaagttttgcagcactttgcactcttgaggatgtatctgggtttaatagtaccttccatctagtgcacaagtcttctcccaggctcatcctcccaaacacctctcagtgttatccccactttgcaaatgcagtagtagctgggctcacagaagttaaataactacaccaagtcaccatccaaaaaggttcagggccaggaatagagcgaaagacagaatacggagccatgctctttttgctgtctttctcagtgctcagttctcagaattactcaggaatgagagcagagaaactctgtataggccatgcctggagttttttgcacatggcagtcagagagtcccagctcagttcagtgcagtattaccgaattccagtatatgctgggctctgttaggtgcaaggggttccaggatgaatgagtctgtggcccagtggacaaggtttgcccctgtgtgcagctctgtctgctttactagatttgctcctcagattctaaattggaagtatgtgcatattgcttgatttacagattattagagaatttttttcagttaaactttgtccaaaatagacactaagggcaaaggaaactggtattattacagcagggtgtatctcataagctctgagaattgtacatgtataaagaatctttgaatcgccgagtcttagccccacgttttatacagcacagaaatacagcacagaaagtttaggtgatttcccttgggttccatagtgtgttagtcaccaggttcctttaactctctcagtactctttcctttaaactatggaagagctcaaatgattaaatcaataaaagaatgacaacttatagagctcatttacgtgtctgaatatatcagtttagcccagagtatctgaactcctgggccattgctattcactgaccccttctcctcctcgtgttctagtaaaattcagcccatgaatatagtcattagaagttgaattttaatgaaattgggcgctttgatcaatgggaaggttgaaagttatgtgggaatcatctatatagtttatagctgtgactatgtaggccagctcctaagtgccccctgcaatgtgtcactctctctggttttctttccagggaggtaccctgtagaataacagtctaatttacctctcagacatctgctgtctttcagaccttatgctagttttgtgcatatcttcatgattcctctaataatgcattggattataaactattatctccacttgagagacgctcagagaggctagggagcttactcagggtcagagggagtgcagctgaacagttctgccagggtccctgtgattgttggagcagcctgtgttttttcaagctgttgtctgtgaatcgtacggtagaaacatggtgcgtatttctgcagccttagttctagccattgaaatatcatggagttgaatgcagaatacccattaatgtttaggatgaccaagaaactgtgcccaggccccaagcccagctctgtcatcagaggtgagttaccactggtgccatgccctttgattccctacaggcgccctatggaggtgcccaccagtgtgcacttggaagtgtgatggaacgcatcacatccccttgttgcccctgccccggtgatagggggattcactaagaacttcagcatagtgagagaatgtaactgaagctcctgggttagtgctgcttggtatcccagttactttgtagatttcggaatcttttgtcgtctagcctgaggattactgttgatgacacaattttctttgggattataggcttcatgtttcatacaaccagcatatacgtaaatggcctcttcagtgtatcatgtatacacattggtgaatagcttcccactagataatgttttaaaggggaaaaaaagaagtcatttctaaaatcccaagagagtgtccccgttttgaggttagagcacgttttttagccttatttagtcttgcatcttgctccttatgctacctttcattgctttatgaaattattttttaagggatactttctaacattccatcccactttttttaaagctcgttcatatactttgtcctcacagaatagaacagggtttctcaaattgcacacactgaactctgcaacacaacagttccttcattggagaccagatgaattgaaccactggctttctgaaaataactgtatgctttccagttggccagccttggcagggacccactactactcctatttctcaacagtcaatttaaaatattgacagtagcttaataacattcaatagtaacttgcagcagcctttcatataccctgacatctgagatatgtaccagtttatgaaatagaacacgcagatggtcttagccccattttccagatgaggacccttgtccagggaaggattggtgcccatttagctagctctttcccagcaagcaacagtacccaaggctccatgccccaggcctgggaggacccctcccacggcgtacttcagatctccacctgtgactttgaacacatgcttcgaggtgatgtacttcttggagatagtgctttcctcatctcttctaccttgtagtcgtcagtagagggcatgcagtgcaacagaagtggatttcaggactgagactagggtgaggcaagagaggcatcagaatgcaaaagtgaagtagacacctgccgtcagcactgggcagccctgctcctggggccttacttgactcatcctggtgggttttccaaatggcagaggtgcacaaccacttcttgcaagcatgggcacttgaattgtagcccatgtacacagtgattcttggaaaaagtcatgagtaatgaatggaacttttctctcccaggttgatcttgtgttttgagacataaagagtcaaaggttggtgcctaggatgctcattcttattgtttttggtagtttgattgttgaaggcttttgacacgacattgaagtgaatatttggggcattttgctcctctgggcttttctctaaagcaccctcacatttcctctctcatgttcctgggctttcctggctttgatgctagccccactgtgtgttcccattaatagccctatgtagcctggctccttattctggaaactgtgtaacttttgctcttgatcttaaacacaactcagtcttgcaaggagctccgcctttggtctcagcttcttggggatttccctggcagccacatagtgaactatgtcacactctctgttttacccgttaataaggaaatactctggtacatggagctttgcttgctgatctttttctaagtactctgggggcaaaaggaaaagcagctagaggataaggatgtaactttcttcaaattaagccatcctgacccgtggtagagattagccactaagaaatagtggaaacaaataactgtttcactcttgagtgttagcatggaagagattctggttgaaatcctagtcctgccactttctggttacagaaacttacattacttttcttttgatgtttcaaggagataggagttaaagaaaaatgaacaccagattactagaacattcttatagagttgcccaaagatggaatggacaccttccagagtggaggggagggagtaggattggacagtagtcctcaactgggagcacttcttccccctgaccccacacctgcctcccagggacgtttgacagttttggattgcacaaaactgaggggtgagagttgctgctatatctagtgagcagaagccagagatgcttccaaataccttacgaagcataggacagccctcacggaaagaattatctagctccaaatgttaatgatgctgactttgagataccctagtcagaagtaacatttattggccaggggcagtggctcatacctgtaatctcagcactttgggaagccgaggtgggaggatcacttaagcccaggactttgagaccacctggacaagaccctgtctctacaaaaaaaaaaaaaaaaaattagcctgatgtggtagtacatgcctgtagtcttagctactcaggaggctgaagtgggaggattgcttggacccaggagtttgaggctacagtgagctatgtttgtgacactgcacttcagcctgggcaacataacaagactctgtctcaattaaaaaagaaagaaagaacatttgttgaatctaattttcccatgtaatatcaatgactgtgcaagataaagtggtttttatcctcactttggatgagattggcctttggtgattgagaaaccttcctttggttgttcagctacttctagatagacatgggattttaaactagccatctatatgtccaaaacccatccgctttccacaaacccattatgtagttagctccccatcactgatgatgttcaaagctaagcagggtgagcaaccacttgaaagaggggatggatgaggatacaagcctaagatgtatgttgcactaaatgacttttgaggtccctcctaaagatcacattctctggttctattttgaaatgggatttgtctttttagccccagtgttagagtggcagccagatatcccttggctatgaccagtgaaatccctgtgctttgtgcacctgtgaatcttactcctattaatatcccagccctatcaggccagagggctagggttccaaacaggggcagccagaaatgcaccatcttctgcatcccatctgcattccgggcccaggcagttatttttacctccatatgtaaatgggcccagcgatttctcatttaggagaacagcagaggcacaagtgaggagagctggagaaggaggggaacctatcatatactctgagattgcaatttagtatcagtttgctgatcagtgtcactccactagtttaataagtaattatagtttctcttttgtgaacaaggaaaacgggtagcttcacccagtggttgtcagccctggccaaaaattagaataagatagagggcttttaaatcacacctacaactgagcccctccaccagaaatttaattttctgaggtgaggcctgggtacagtgatttgagaactttgcagggattccagtgtctaagcagcctgggcacctctggttaatggcacacctcagtgctgcgcattctgctccagtacctgctggtgttactctgtcataaagagactagaaaaagagtgagttgggccctgtttctcagtgtgtcttcagtggattgtagggagaaggaggcccatactctctgcctaaacgagcacctgctagactccgaaatctagttaatggaagtttctcctcatccttggacatccttgttttatatggtatacgttcaaaatacatataatctttggtttaatttgttttacaaagttttgaagttttcctctccacacttttctcatcaagctggtgtgtggaaagaaggaatttttcttttccattgctgtcatctaaaattgttgtgtcgggtggggaggggagggagccgggagacttagctttaactacttagaagttttcagggaaatgtttttataacaacctagttaatagtttgactttatgatagattctgttccttcattattttgtcctccagtggcttttatacccagcaaagtggaccatggtgtatgattcaagaagggtgaggagtatgtctttctttggaaaggcagggatggagggttgtgatttagaaagggtaagcaggaaaggagagccacagaaggcaagcactgttctcatgccagatcggtttcaaggaagaggacatatggaaggatctagaaaatgatttctctagaattgtccatgtccaagtcccctggaatgtctttgtatatccccagagctgtgcatgctccagtttgaagagctctgctttaaaagatatcaggggtgggggagatgaggggggtgaagtaaaagaataaaaactattcaattccatttgttttctctttcaagctcatacgttactcatttcatttttatattaaaatatagatgaggaaggaagggcacatggcaagatttggcaagcataatccatgaggggatatggagttggggatggcagcatagcatactaggatttttgaggagggattcggggagcctgttcatgttttccttacaactctggtacatgaagtacaggttctgcatcatgatggaagactgcctgggttcatgtttgggccactacctactagctctatgactttgggcaagtttctttcttcttttttttttttgaaatggaattttgctcttgtcacccaggctggagtgcaatggtgcaatctcagctcactgtaacctctgccttttgggttcaagcaattctcctgcctcagcctcccaagtagctgagattacaggcaaccgccaccacgcccggctaatttttgtatttttagtactttagtacagaccgggtttcaccatgttggccaggctgttctcgaactcctgacctcaggtgattcacccacctcagcttcccaaagtgctgggattacaggcgtgagccaccatgcccaggcaagtttcttaacctccttatagcagtgtttggcacatgatagatgagctacaggttggcttgttattccttgcaatcctgagtttctccccagagtaaagctggagcttttcccccagccaactttggtggagtccactgggcagagatgtgatttcagccaaaatatggctaaaggaggaaaggatctgagacagccaggtggaaatggctccccgggagagcctctgaccgacccgcacactgggaggagtgcgcactggggtggagccttgggaagttggagccatttgcagcagggaggagcctggcccctcgtcttcttggatggtacctaggattcagtctgcgaggcaggaagcacactagcaggactccagcttggtggagagttcctgctttcctttttttcctttttgtccaataaatcccatttttctcaccctttaaattgtgagcctaatttttcgtagtcatgtgacaaggacccctcttaagctgaactaaggaaaagtcctgcagcagatctaactagaatgccaatgcctacattgaggctgtttaatggagagtttatgaaaagttagctagtgtccttgtgtaaacctgtatgactctagttcagagtcttcagtaattgcaattcaagaataaaaccacacggcacttccattcccgtgtaatttgttgttgctggcttgtgacattctacatatcccaactatgagacagccaggcagtgggatggactgtgaggttcagatgcccggagatatgtgaggaagagcttttagcaataaatatgaaaatgaaatcaaagtaaaaactggcattgaacccctggtgtacttaggcttacttttacccaaatccaaatcatttcttgacactgcatggttaccaagagtgtctgtcattcaatatttcagattaagatctgttctttggtagctaagttcagagaaaaaaatataggatctagaagtatcattgctattttttccttgatacatttagtctggtattaaaattgcttgcagaagatttgattttaaaaaagtagaaaagagacacttatcctggtaaaattatcctgaaatcttaagaaattaagacaaattgcaccataaaaccagaagcacaaaattaaacaatattatattaagagaacccagtgacacattttccttctaaattaactttaaaattaacttttaaattaagttcaatctcatatcagtttgctttgtaagaaatagaatatatgtacatgtttgccttatttttagcatgttatattcattaaaatgttttagtttattcagcagatacatttagcatttctttcacaagaaagacagtgaaggaacaattaataacaggaccccagtaatacctggggggtttctacatctgcattttttgcaaaaatagaatagccttctaagaagctgtcagtggcatttgtgcagctggacagctttgcagcagatgtaacagtaactgtgatgccaggctgtgccccagaacctgtaagcatgacaagctctggcttcttccctcctctgaaaaggtacaacattgaagaggcagtcgtttcccctagatctgtaaccaagcacatctgggtgaaaggggaagacatctcttcacagagaggagaataaaggcggtgaccatcagggtgacaggcagcatggactgttgccacctgtgctgcaggcagcttcagtgcctggatggtgggacagctggtcctgcactcagcacgagtctcaggcagtggtctggccgcgcctcccttgggctgcttcttcctccaccgtcctccacttttgctttgtgtctgcgtcaagtcagtaacgttggtctgcagctcccatccctcctgatgggcactgcactgaggccttagtgggcattacctgatgccctcatcacccagtgtacaaacacctgctgacaagaagcgtccctgagcggaacccttctgctgggacaccgcaccttccgtgtcctgagtgggctgcaccctcgtggtgctcaactgggtgacttcacgctgtcctcagcgctgtcctcggcgctctctctccagtcagctctcctgctcaggcacctttttgggacacagtccttgccagttattccctgtttaatgtcctcatgtgtcttcacttgccctgggagactgtcgtcttgagagagcaagccatatgggaccctgaggcctggcctcagtttccctcccccccactgccccacggggccacgcctcatcagtggcatggaccttttagtcagcgagccctcagccggatgctcccgtgctggccactcctgtcatccctgctctgtcctccctgcaaactcctccctcaggaccctgcttgaagttacgtcctgcacagtcatccctggccttccctcagcagaatctgtcactccctcaaggtgtccctgcagtattctgctcatgcccctgctacgtggcagaactctgttgtcctatcctgtccagagctccaaagcccccagaccctgtggctgctgagcacttgaaccatggacagtccaggtgaggatgtgcggggagagatgcctcctgcctgtggctgagccctgcctgaaggagctgatgaggaaaagctcctaagcacaacagtgctgctcacctgggcatctagttggcagagtcctatcccagtgttcgcacccccagtttcctgggtcttaagttcagattatcaagtgctcctcctgcaaaaaaaaaaaaaatggtgattcttgtggcccttagttgaccccgcacctgggatatgcttatatttggtgtggggcagagaactgagtgttcttgaaccacttccacccaaccagagggaggtggggacatcaggtacacctcatcccctgatgtcacagccaagtacctggagccaccaggactccctctgagcccacaaaggagtgtcttctcaccaccccgattatactggtctagttatgctttggagttaaagccaggctgctattgcagggctgctgcaatccttgcaagcacagttgttctttgcttgcgcttgctctcgctctcgctctcactctcactcttgctcgctctctttctctctctctgacttcagtttaactttttaaacttcagtaataagtgttcctcaaaatagatggtcttcctggttgtaggtacagccagcagggttgagttctgctgccttccagcatggttttcctggggcctgtaaaagtcctgcaaatttgctctgacactctgttgacatggaggtcctgtttgttgttataaataaggaccagtgtctctaggacacaccttactgtgtataactgaatggcagattttgtcccttacttcttaaaaattaaatggcagaggagctggccatgtaaaagccctgtgtgtgtttaccaaaaagtacttgaattttgtttgggttttgtgttctggtgcatatgaagtgaattttggtaggagtatgtgcattcagagaatatgtcatcacacttttttctttatttgagtgccacttggctcttatttgattaaggtaatttcagtgacatattttgaagcaattcaccttgaaaggcagaggcaccacccaggtgcagaaaccttccttgggttatgcaacgcccagcgtgggtggaaccgcactcacactttacctcttcctgaaccacagccctgctctgattgcatgatggaagctgaggtgcctgacaagtggaaggaggaaaaggaacattctgccttccttttctctgtaatgccaaagctggcgtcatgcattactgagggcctctgtcagcactggggccggccagtggcacagctgatggggtagctgcactcgctagtcctctgggaaagcccaggttgtttttctggcttagtgttagaggcagctgtgatgtttacctcgatctgtaacatacaaagatctgatcatatgctgtctttgcttacattctattattgtctgacttatgttctaaattctctacaattcccttccatttgtcttaagaaactctaaacctttttttttttggaaatcactacttaatgattttgaggatggaaccccagacagttggtaatagtggatggttttccttttctgtagttgagtggctttctaattcttttgatggcacacaaaaagaaattaaccttagatcacaacttagtacacacatttatgtatgcatgtaactgagatgagttcctcaaaatagcacatacctgtgttttatgtgaggcactgatattttctgttctatattatgcttaactttaaaaaatacttcctgtgtaccatttgtgggactgtaactcacaacttaaaaaatattaccttgatacatagctccagaaatacacatgggtcattttaccaagaatcaccagtgcttttgctctgttaccccggctggagtttggtggcacgatcatagctccttgcaccctcaaccccctgggctcccagctgggggtctttaggaccccagcgtgacctgtgggtagcccttacttcctttaatacttttcttctgcacagtcaggtgctctccctttgagcttccgtgtgaagttcactgtgcacccagctctgctaccaccgcctctgtcttgaaaggaatagggtggggtggtcattggtgtatagtaagattcgaatcacatccttcaagtacagttctaccctaaagataagagtccctgtggtttttgttgttgttgttgttgttgttgtttgaatggatgtgttctttgagaaattgagtcttgagtattttgtgaggacatctaagcctggcgtccacgtcagtgctgacagatttgacctagtgtgcactcccatctggggaaatgcccataggctataatctctttcactggagcgattataatagcccccgggcttcaggtcccagtggcatccacccttggtggcagcatacccctctgcatgaacagggcgcccacttgtcccctccttcttacttagtagtgatttttaaatgggagggtggcagtcctgaatgtagttcatcagtatttaccgcacaagctctaaaggacacagtgttttatttgtgtatttatttaacttttccaatatcggaatatgaatttttgtttcacctgataggacacgtttcaggggctccattctacattgtcatttcacaggaaaaatatttgatggctcattagaagggaacatctattattttgttactgaaaggcacattttcaaccttgagaattggatggcaggtaatggcatggaaattgacagcattttaccacttaaaaataaccacaagaaataccaatgttcaccgaatgagttgaagttaatttggttttgtaggctattgtagttaacttgatgcttgatggaaataattttgtattggaaatcattaaaaattgatttgattaatgcttttataatgttggtatgaggtgttgcactgtggtggtgatgacctaagggtgctgtgatggcctcaaacgttgtccctccggggcccacaggcaggatcccacacactagcacacctcccagttcctcttaccatcaaacagaggtgttccttcaacatgcctgctcctccctgtggcataaaggcaccaggaggttctctgatcccctgttagatctcctctgcagggttgaagacattttttgtttgtttgtttgtttgtttttgagatggagtcttgccctgtctcccagactggagtgcaagtgacatgatctcaactcactgcaacctccgcctcccgggttcaagcgattctcctgcctcaacctcccaagtagctgggactacaggcatgagccaccaagcccagctaattttgtgtttttagtagagatgggatttcgccatattggccggggtgatctcgaactcctgacctcaagtgatctgcccgcctcagccttccaaagtgcttagattacaggcgtgagccaccgtacctggccatttttgtttttaatcggtgtagtgtccctaacctaaatatttcacatggcctgaactttctgtagttttagcagcaatgggatgctttgaaacctagatctctcaccaactacatcttccattgactggtgaaacactagtttaagccaattcattttgaccatgtgcatttttgtgcttgatccctattttatttcaaaaataatttccatctctattcatgtaaactaataagagccttccgtttcctttaatggcaaattgtctcatcttttactgttttaaaacatttttttaacatcatgagaaaacgtgataaaaggtataagtgtagtttcctggcttttgcagtacctcagggaattcggtaaactgtattccatttgaggaaaggaacggttggagtaggaggtagtgtaaagataacatagcaaataagcattttaccagaaccctctgaagtctcatcagactgtgccatcatcagaatccctcccttctcatctacaccgtttaaagccagcatccagtcagaagcccagagctggtaccgccttgctttcctgccagttgctgacatatggcacacagtgtcagttaagggcacaggctgatgggcagcttggccacatacctctctggcttcctatctgtaaaatgggcacaatcattgtacctgcctctgaaggttgttgcgagaactagacgcagccttggcacagagcccacagagagtgagcactgtgtaaagactggctgccagccattagtactgggtgcctgtcttttggtgtctgggcaaagctttaacctgttttatcagtttagaactcagatgtctccctggcaaaacaacacgggcatatagatattttgtgaagttttgttgaagtgcacttaggttaatgattcatgggcagcctttcaaagctatcaggctgtgaaacagctttgaataagattgtcttgtccttctgctgattgtcttttccttcccacattagcagccatagcaggaggaggagaggtggcaagtggccacactactctgctcacattaagcagacaatttatggtcaatattcagtgaatttcttttttttatagtacagttaactgatatttatattagctttaaaattatagcaaaatcaggccaggcatggtgactcacacctgtaatcctagcactttgggaggtcgaggagggcagatcgttggaggtcagatgttcgagaccagcctggccaacgtggtgaaaccccatctctgctaaaaatacaaaaattagctgggcgtggtggtgtgtgcctgtagtcccaattactcagtaggctgaggcaggagaatcgctttaacccaggaggcggaggttgcagtgagctgagattgcaccactgtactccagcctgggcgacagagcaagagactctgtctcaaaaaaaaaaaaaaatagtgaaatcagccaaatagagaactaacaggcacactgcctaattccttgtgtaactgtcattggtgtgagtcactggggcagcgtgattaggtctgtgagctggatagcaaggctgtcattattctcaaggccttctgctgactgctgctcttggtaagacatacagaatctgtgggcacctcctcttaccgctctatgctagatgaggcgtctccacgttgagttgtagtagatacagctaagaaagtaaaagaaatgaaaatctcatcaaaaggattggggctagtctcattcttcatgcatacccaaaccgtggtaactttgatttttttattatccagaatggattgtttagaggagacagatggctttccagttcatcaaattttttcaattatctaaaaggaattcctacgcttggagcaagtcatttcaataaatctcattcatatttacctgctgcttccttttaaatggaagaagagaatgtttttcaagtacacttgaaaaatagcatatgtgaattagaaacttcctctgtaaactagcagagtagaaataagaggccaggattcagcaccaggtaggctggattccttcttaggtggctcaagctggctatggggctggtctcatcatatctaaagaactgcccagcttttacgcattttgaatgtggtggaaccagctgcatctttttatatgagagcggcaaatagtcattgtgttccagtttgcttctcgggtcatctaaacatcagaggccatgccacaagcaccgtaactgagggatatagtgtgactgtggtccaggccagtgacctctggagctgaatcatgacttcccagatgactcccagagcctgagaggggactggtgcgtggctccaaatgattttcacctgggcctctttgaagtcgggagagatacgtgcagtatggtagatgtggagagggagaggcatggtgtgtccaaaaattagcaggacctgatccatatacgtggactctgaagcagtgcacttactagattaaaaaaaaaacaatgtacttactggatttaaaaagtgtgtatttttttgtgagatgcagtttgtaagatgcattggtaactaggccatatactttttccattggctctcagctctcaagaagctctttagtttttagcattggatcagtaaacacttattaaaatgttcccagcatttgtttgccatcttctctttcagctgggcccagctgtgccctcaaaccctgcctgtctcttccctgactgatcatgttctcccagcttctacagaggcttccatagcattgtgcttggtagcagacaccagacagaatctcagccagctcagtccaggcgcacgggctcctggtctcccggggtgtggttactcgtgtctcctcggggccttccgccctccacattccagtgccaggccctggacctttgtctctattcatgataaaacatttttaggaaatgctgacgctcagtgaagaaatggaaacactaactctttgttctcttcctaacagacacgagacgacttcctgggccaggtggacgtgccccttagtcaccttccggtaaggacagtctcatgtttgatgcttcgtgctgggggcgggggtttctaattgtttgtagtcagtgtattttcagagtggcatttcttcaccacggtgaagaaggctgaaatgaagcacgtgtgctgtggccttagtcctttctggaaagtggtcctttcaaggggatggaggagaagctggctgtaagagtagtcaagggtgcctgagtcgtgcgcttgcgttcccatccaccagctccctctcttttctgcacttcagctgctccacctttgtgtatcacatcttacaaaacagacacctccttcactcaggcctcccttcttgtcacttactgtctctgcttcctaatgcatcctccgggtcccatcagatgtttgcactctttgtctggaaccgcacatgccatttctcttggattcctgtacacaaactataatagcatttcccagattttggtgtctggctttctcagtcagcatggtgacaaaagaagagcctgttcattctgagtgaacttgtcagctgggaacacccaccctcgctggaacacgcactgagttagcatgtgtggtgctgccatttctctctgctcaaagtagcggagcagtcgaggctgttgactagtgacgggcattagggctgacacccgaaacaggaggcagggcagacagaatgtgtaggtaggacctggaggccttgagaaaggtggatccccatctcctattccagcttcagttttccggcttgtcccagccttcctcctggccttcttccctgggcagcacaacgacgtgatagaagtagcagctgagagaggaaaggcgaatgtttctgccttacaagggcattgtgttatttttttaaatgctttgtgtgagcaaatagcataaatagtctataaagtaaagtgactttactttatttactttatttaaagctatttaaagctagcataagcttcctgctgtgtggaaattatggctgtttccatatgttaaataccaagtaagctttgaagatgtgttgtgaaggaaggtgatagcaagtaatttactcttactcactcaggggagctgttaaggaagaaagtcgcaaggttccaaaggactggaagtgaaagtgatattcttaaaatatcttgtttgtttctttttaaaactctgaagctccagggtgccacgggaggggcctgcccagggcttctgcgtgagaactactccatgagccatcagaaacctgactgctcttctcaggtcacgttgggaggatgtgactatttcaccttttgtgagcaaagacctcgcatccttctacgttgggaggtcttctgtgtatgttcttcagactgaagctgcgatcctctcacacttttagacagtgttggttgatgggccagctcttttatggacgtctccagccaccctttccctaatgtaaaaaccacatcttggccaggggaaattattttctgagaggcaaatattctaatatttggtaagaggcaaaagtgacatgtttaaaaaccttgctctgacaagctcttttttgagtgagtgagcagcacctggtcttgaaaggttgagtagggctcccagaaaatagaaaaaggttcctcctccgaggccaagtcagtataaagaatagtttagctttggattctgagtggaggcagggtcagtgagccttcaaagaaggaagcggtgcagaggcacagggcaggaatagaagccagccgattgcagagggtagagccgtgaacgcccagagaggaccgagtgcccctagttactcgtgtgcccagagggtaacttgcagtggcgtgcttcacctccatacttcaaactgactagctgttcacagccaactatagtcagagagatggaccacaaagaaaacaaaaggagaggcgtgaaggtatattctttattcatgtggcagtagaacccaagttgcgtgttctgaatgcacgtggcttttgaatccaggatttcaggtgctttcgtgtgtatgtttggtcgtgtgtataggatgctcatggggaaattacagtggcattctgtttgtgtgatagcacacaggtatgagtgtggagagggcgggagcatatgcgtgtattttgtggatcgaattatggatgctgtgttcttgattagtatatgaccattgtcaaggtggattattaacagtctgtagattcaaaatttgtcaaaaccaccaagctttagataaaaggaaatagaccaggcacagtggctcatgcctgtaaccccagcacttttggaggccgaggcaggaggatcgcttgagtccaggagttaaagaccagccttggcaacatggcaagaccctgtctctatagagaaacttaaagattaacccagcatggtggcacatgcctgttgcctcaactgtttagaaggctgaggtgggaggatcgcttgagcatgggaggtcattactacgctgagccgtggttgtaccactgcgctccagccttggagacagagcaagctctccttttgcttttacattcagagaccaagagcaaacttagctgtaactgtaccatcattgacttttcaactgccgttttcacatttgtctgttaaattcagtgcatcgttgtctaaaaattcatatgatatttgataacttgaatctattaattatttagcgataaagagaactctgagatctgtattaacagagtgagatttctggcaggtgtctgcctgttgcaccttcctcttgacttgtcagctctgtctccccttcccctggagccctcagtaacccacctttgcccagccacaaaatctcttcgtccctgggaaaggcagtggggcagagagagctattttaaaacattaagttttcctaaatcccagtcatgtgccacttaagacaaccatggctgactctggaatttaaattttcctagatgaggcattttcagggtggtggtattatttgatgccctgcctgtacttggaggtagctcagctgaccaacatccttttaccccttttgtgtttatggctgatggctggtagcaggtagcaggctgatggttccctctcatgagtgcagaattcaaaatcatggagtttggagggacttcagagacactgattcactcccagtattttccaggtgaaaaagcctgggcccagagagggaggggacttgcccagcaataagcaggtcattggtggtgctggatctgaccctggctctccagcatcattgtgagcctgtgatgtggtcaagggtgtgggcatggggtggattcgcccaaggcttaggtgcttgcagtggttgcatacaagtttcgagtctagggacccagcagggccctctccttccatttgcctgcagaatcctttatctcactctattccatagtgaatgcacctaggctgaaagcaactactctctttcaagatgaaagtactgagtatccagattttcttctgaatgcttttaccctggaacgggggcagcattgtggctattgtggctaatagcactgtttgcagcagtgtgtttaagatggctttccaccaggagcaccctcaaagccatcctgggaggctccactcagctctgctccagggaacaggatcagattggaacctggatgaatgccaagaagaatcttgtagttatctataagatcatcttctaattcaggctagagaatttcaatgaacgtgaactttgattttaatgccctacctgttactgcttggcattgagttggcagtactgacaaatgatatgaacgtgtagaattggccaatgaacatggctagtgtttgttgagtgtgccaggtgcccttgagaactttatagaaaccaactcagttgattggtttgatcctcacaacagccctgtaagttatggttactgccccattttatagatgaggacactgaggccaagagagataaggaacttgcccttagccacttggctctgtaagtaacaaagccaggatgcaaacctaggagatctgccttttgacctgtgtgatatcagtcatttaagctgcatagggtatggacagactcaggttcagagtccctctaagctccgtggttttccctcttcactctcttgcatgttctctgctgctcctagattgctcatgcccactggtgatcctgtaggctttgtcatactgtttgatttcctatgtttaaactgtcctttctccctgttctctacctctcaaagccttcccatcaccctgtattgtattgaactccacatccaaaaccattttgatttccaagtcagagtccgtctgttccctgtaccccaagtctcacagaatgtaacctctctgtgtcagtgaatttgttctgccttagcttctagtggattgttgacatgatggctcttcccttgtaattgtaaccataaggactgctataccatgttgtatccacatgtcgttgacataatattgctctcaaattatttgttggttggcagggcatggtggcttatacctgtaatcccagcactttgggaggccaaggcaggaggacgtcttgagctcaggagtttgagaccagcctgggcaacataggaagacccccatgtctataaaaaataaaaatattagccaggcatagtggcacacacctgtggtcccagctacttgggaggctgaggtgggaggatcacttgagcccaggaagttgaggctgcagtgagctatgattgtgcccctatactccagcctggacagcagaagaccctgtctctaaattaaataaataaatgttggtttaataaatgaaaaaaggaaggaaaaccagcaatagttttcttaataaattatccatttatttccttatatatatttacaaaccttttggtagaaaatattttcaaaatgtatgtttattactgcctcataagaacagtctagaaaatataatttacttcattcaatgatagtgaattttgagagcctccatagtttactacagatcagatgaattgagtgcttacgtgagtacctacttggtgccaggcaatgttcttggcaccggtgatccaatggtgagcaaattcaagtctctgttctcatgggcttacattctggaagtgatggataataaactagtatgtcaacaaatgaacaggtactttcagaaagtgatatgaggaagatacagcaggacgataggatggggggtgataagggtggctgatggtgggaactctaaaggatgagacctgggatctcacacttggatggcaaagtggaaacagccatgccatccagagtcagctgtccagcagagggacctgcctgtgcatgggccctactgcagtacatataatctgcatccatggcagatgaggacaggatggttgggagtacaaggaaggaagagagagactggttcccaatgaggttaaagttgattcaaggccagattatagttggtcttctaagtcataggaaagaattttcagtttattatgagaggagtaggaacccattgagagtttaaagcagagaatgacataaacagataacatttcaaatagcagtgcatacgtacatacatgtgtgtgcatgcacgcgcacacaaacctgatacagtaaatcactggactggtttatctcttgctataaaagtatttgaaattgtgtttaattgaagggtctaggtatttgaggttttactgaatatatagtatttaaagattaatgaaatagtcacacttatttatccaatttcctgctttggtaggaacttcacaatgaacttcacacaatcaaatgaacactgatttctttaaaaatgaacaaatactccacttgtactcatagcttcatgaactgaacctcagcagaaggttgatcggtgctgcttcctggggtgatctctgtgcaggagatagtctttcaattctcttaggctgatgttgtgagattttaatacaaaaaacaaagtttccctcaaagattaaatcttgtatattcttctgtttactccacccatatgtgtctcgagtcacaggcatatagcaaggcactggtgaccgctggttctccgaagtgaatcagctctgtgagactgaggccacaccctgcagttagaaattttacttggcaatgacagctgtaattttgtcatttgtctgtggctggggctggctcctaaaacccggtgtggatagtgacatctagtggatctctagtagatcagttccgtggactgtcaggtaccaagtgaagaaacacattcagcggtgccacattctaaaattcaaaatatattctctgtaatccagttgcctgtatctaaaacatgaaattattaggaatattaaaatttaatttactgttttttccccacagacagaagatccaaccatggagcgaccctatacatttaaggactttctcctcagaccaagaaggtgaggcttgtgggtatgggtgggtggggatgcctgccctgcatgctgtaggtataggtggggatgcctgccctgcgtgctgtggatatgggtgggtggggatgtctgccttgcttgctgtggtgtgggtgggtggggatgcctgccctgcatgctgtggggatgcctgccctgcgtgctgtgggtataggtggggatgcctgccttgcgtgctgtggatatgggtgggtggggatgcctgccttgcatgctgtgggtgtaggtggggatgcctgccttgcgtgctgtggatatgggtgggtggggaggcctgccttgcatgctgtgggtataggtggggatgcctgccttgcgtgctgtggatatgggtgggtggggatgcctgccctgcgtgccgtgggtgtgggtgggtggggatgcctgccctgcatgctgtgggtatgggtgggtggggatgcctgccctgcgtgccgtgggtgtgggtgggtggggatgcctgccctgcgtgctgtgggtataggtggggatgcctgccctgtgtgctgtgggtatgggtgggtggggatgcctgccctgtgtgctgtgggtatgggtgggtggggatgcctgccctgtgtgctgtgggtatgggtgggtggggatgcctgccctgcgtgctgtggtggttggcttttgctgaagacgattttaagtgtcctttgaagtcacaacccttctaaccaattttcttccattatgtgtgcagtcataagtctcgagttaagggatttttgcgattgaaaatggcctatatgccaaaaaatggaggtcaagatgaagaaaacagtgaccagagggatgacatggaggtacgtggagggcgtcaggcctctctccttgccttgagatcatattcatgttttgctttcaaactttataattgaaggaaataaaagtttagaaagcttaaatataaaaaaaagtacatatgtccgcaaattggtcattgatagtctaccagtgcagttatttgttttggttaaagatgaactttttatgttacaacaccaatcctcggagagatttctctttagacaatgccatgcctattccccaattttagccccacagctctgtgaaagtctcctcacacattgaatcctattattgctatggacttgcaactctttgtaaattctttttagccattgaggtcgcttcaaagtgggtggaggaatttagaaaatcacttttttttcaagtttcttactcatttggccacaggtgacagcctgcagtagaaaaaccctcctctagaaatgccattctgcaacgagctgaccagaggaatgtcccttttttccttcctgacagagccgcctgtatttaccttgtcacagactgatgctgtgggtcctatcgtaccttttcagcacacacctcggccagtgctgttttgttaggcaaattctcatattctcaaagtgtccattaaacgagacctctctagggcttattctcacatctgtttgcagctgttgcatatatgtgatatgtgaataatgtgtgtggagaagttacccgaacactcctccgcctgagagatcatatttccaggcattatttcatttacaagccttcatctctctatatacatgaagaggaataatgtgggtgatagaaatttatgaatgttaacatttcataagcatgtcaacagattttcatctcaaatccaaggaattttttacactcttcttgccttccaaccgcagtaaccagtgaattacttaattttccagtgattttagcagaggatgttaggaagggaatacgtaatgcctaaaatacgtgctgtaaaaatggaactcgaattttggtaccatgaaacccgttggtgtggacacagccagtgtagagggcctgagtagaaggcagcagcttccagactcctggctcctgcggttgtttgggatgcaaagaggaggcttctctctcaaagcccacctccctggggagcaacaggactctgggcctctggtcccctgtgccatgagttctgttagaacacaggtgcagcgcagctcatcttccctgctccctttacctcatagaggtgttgaaaagatggcagctgtactgtgacgcacatcattggcagggctttgtacagccttggaggccctccagtcaaaataacaaacatgacgtatggaaagagtatgatgtgacttaagtagtgtcaccgactgtgcagatccaaattgtgttgtcctgcaatgtagtcatcttagagggcagcacaattaattggccattactcagaagatttttgaggcctttctagaattgatatatatatatttttttggccttcatttgggaatttactcaaatgtggccccgaagccatggctagagccagagagccccagagcaaggagaagggcatgcagggcatgctgtgatgacctcttactcacagccgaagaaccaacctcataatcgtccctttaactttattccgcagcatggatgggaagttgttgactcaaatgactcggcttctcagcaccaagaggaacttcctcctcctcctctgcctcccgggtgggaagaaaaagtggacaatttaggccgaacttactatgtcaaccacaacaaccggaccactcagtggcacagaccaagcctgatgtgagtaccgtgtgatggtcaggaacacgtgcacgtgcactgcacagctagggacaaatatggcggccctttgggacaaggctgggaaataaatcatatgtctataagagcagatggtggtgtggtacgagattcctctccatttacgtaaagcatgcaagagcagtcagaacttgtatattgtaagcgattgcctttgagtcacatgctgctgttttcaatatgagctgatttattttctatgtcttcttttatgtcgattcctgaaatacaaagcagaggttgtttttcttagacttattttacatttgttgattatattgttttcttcttcacctttctctcccaactgacccagaacagaaccggcaagcaaattggctttgcaattttctgttttctctaagtttttggatgtttactctcttcaatgcattgatttggaaacctcaaaaatttttttttctttaaggaaatttgagccccttaatataatcagaaacacatgggagagttgcaaaatcagaattagtaattactgtgtattttaatccctcaccagcctcagggatgcagtaaaccaattcctgttttgttccctcagcaatttgtggtttgattgatagcaaataaacactggttaaaactcatggactttaaaaatggttttgtagcagcttgtttttaaatcattttatacagcaagatctaagtctattgataatacatcgaagggcaaaaagaaagtcttaaggaaaaggaattttatcctagaaattatgagctgcctagcagccaagacaaggaggaaattatcaatgaactatacaactttcagtatgtaataaaagcaagtctactgggtagtataattttcttgtctactcgaactctgaaagaaagtggctaatgatacattttagacaacaagcagtatgaggtatcatgttcttaaaaaccttttatctttagaaattgtaaagatactccacatatgactgtgggtggggagggtggccaagttttctggtctaggttttgtttaatttagagataaagcttgcagaatctggaacaacgaatagcctgtcttctctgagcccccaggtgggttctcgtgaatgtcagctgttcgtgatcagctttagactacccagcacgggcattagctcaggacagcaaaatggtctcaggacagcaaaaatatcagatcagctgggtaatgctgaactatcttttgttaaagttttttcccatggaaatagcttggttgattctttttgttttttatattattgcttactatttccttttgattaatgcccatagctattagaattattgtaatccattgtagctatttgtagtaaaaatgaatttggacccaccttgggcttggttacatgtagtgactagaagaatcttggtagcaatatcctaagcaaagcaccattacctacctttgctcaacagcatgagaaaggagtactgaaaaggtagatcctcatgcgacctctgcagaaaagtggccaggagcaactcacaaaggaaaaaatcctgatagctaatatgtatatggaaaaatattcaacttcataaataaggatcatgcagattagagtttgtattttggggacaaatagggataattgctactttctctgcctcacagagttgtgaaactaacgagggaattcttgagaaaacacttcatacattttaaaatatatactatttttttgatggctccacaggtgtagacatgtccccacactcatcaagaggtgtacgttaaacatgaacagctttttaatgtgttgattagacctcaataaagtgatttaaaagagaaaccatctttggtggcagtgtcccagaaactaaaacaaaaggtataacttgctggctcttcactagtctagagcaacaagggaaaaatgcagttctttttctgttgttgtttgagacagagtctcactctgtcacccacagtggcaccatctcggctcactgcaacctccgcctcccaggttcaagcgattctcctgccttggcctcctgagtagctgggattacaggcgcccgccgccatgcccagctaatgtttgtatttttgtgaagatggggtttcactggcttggtcaagctggtttcaaactcctgacctcaggtgatccgcccacctcagcctcccaaagtgctaggattacaggtatgacccaccacgcccggctgaaaaatgcagttcttaatccaagttcgggctcacatgtagttttgggagaaggcagaggcataactgccccatcaaggaggcagcaatgccaaagggagaggctgagccaggaaggacacagcagaacttggcagaacctgaggagcgcctccttccaatgggcataacttctagaaggcaagaggaaagttagttaaggaaaaagagtttccaccacaacctctgctagcaggccctttattgggatacagtataagttcatttcagaatgtgtgagaaaactttaaaatttgtgttttagaaagagtctataatgagtgttcttgataagtactatatttcagttagtctgaaatgacgatttcaacttttgagatactgacttgtgacataatttttgttaatgggatatgttatcttattgaaagtatctgtgagagttttccctgaaaaaatttttggcatttaaacttgtacactaaaagcctctgactagtatttcccccaaagtatgattgcctataatttactgcaaaaaaaaaagttttcttttttctttttttttttgttttgttttgttttgagatggagtctcactctgctgccctggctagagtacagtgacatgatctctcagctcactgcaacctctgcctcctgggctcaagtgattctcctgcctcagcctcctgagtagctgggactacaggcacgcatcaccacactcggctaatttttgtgtttttagtagaggcggggttttgccatgttggccaggtacgtcttgagctcctgacctcaagtgatccgcccgccttggcctcccaaagtgctgggattacaggcatgagccaccatgcccagcccaaaaaagtcttccaaattgaatcaaaacttttagatcctgaattgagaacatcacatgacaaaaaatagggtatgatgttttggtgttcttcagaccccggctgacttgagaggttatctcctgatgttattaggatttttaaagtagggtaaaggaggtaaatgcagtgtcacgattttgagattctgttaaaatgagctagaaagcagctgaaaaaaattcatgttggatcaggtgtactttcctccagatgacagctttgaatttgtcccttttgtagtctttggtcaaattgctggtgaccagaagtagctgccttgtcattgctggacttctagaaggattgggactgcccagctgctgtgtgaacttgcctgtcacctctgcttccagaggtctgacttgtcactgtggcaaatgggcagaggactttgatttctgttttttattaaacactgaggtatattttgaaatgtatgcctgaaagatgctcaaaatggtgtgactaatgcattttaaaactgcatttatttgattgaaatgaaccttaacctatactttagccgtaatatggtgggagaattctcacattggatgaccagctagttgtcagtgtttgacgctgacactttagtggccatctggccctccgtgagcattgaactgtcatgaagggcccgatctcaaccacttctcttcttctctttccccctttcctgcatgctcagggacgtgtcctcggagtcggacaataacatcagacagatcaaccaggaggcagcacaccggcgcttccgctcccgcaggcacatcagcgaagacttggagcccgagccctcggagggcggggatgtccccgaggtacgatgtccccagaatggtgcaaagcccggcagctccttcttcccatgttctccagcttgattttatatcataatttcttctgtcagtaaacattgttgagaatgtaaagattacagtgacgcagggaattaattaccatctgaatattaatttgaaagtgcctataaaagccgtatttgacaagtataggtggctctatattatagaaatgggaataacattatttttatttttattttttttgaagacagtgtcttgctctgtcgcccaggctagagtgcagtggtgcagtcttggctcactgcaacctccgcctcctgggttcgagcaattctcctgcctcagcctcctgagtagctgggattacaggcacgcatcaccacacccggccagtttttgtatttttagtagaaatggggtttcaccatgttggctaggatggtctcaatctcctgacctcgagatccgcctgctgcctcagcctcctaaagtgctggggttataggtgcatgccatcacaatggctaattttttttttttttttttttcctagtagagacgggtttcaccatgttggccaggctggtcttgaactcttgacctcatgatccacctgccttggcctcccaaagtgcttagattacaggcgtgagccactgtgtccagcccacattatttttcagtatgaaaatcttaagatatttttagtttgtaatttatttttcacaggggtctaaccatgtctcattaaatgacagcttgtttttatcatagttgagctgttgaatgagccctgtaacttgtttgggtatcatatgcatatttttattgagtcgctttgacacttggaagagatttattaccatgaaaatataaatttaggtgaacagaaatgtgtaattttccctttaaatagttatggtatgttacttaaaacgttatgaattaaacaacaaattagccataatcttccatgctatcttaccagctctgtttatgtactaaaaatccattcttcttagacattgtgttaggaagatcatttagaatgcggcgattcaacttggaaaagcaaaagtaatgattccataacacattcactctaagttattttataccattgtttaattacagcgtatagcttctatgctgctcccacggtgaatcctcagtggttaaaagtaaaagaaaatccatgacaattgtttataaactccagagaagtgtgtgtgtgtgtttgtttttttgcccacacatatagtaacaagtgctggaaatcagtcactgttcagagaggcattgttataaagtggttaagagcacagcctctgtctggaaccaggcctctttgattcacatcatggccctaccacttgctagatgttaccttgggcaggttattttctgtgcctcagtttcctcatctgttaattgggggagttatcttcctcgtgattattgtgaaggttgtgtgcctcatgagaggcacttagtaggtgttaattatagttatcaccggggctattgttgttacatggtttcattggggagctgggtggatccctacttctttctagtgtttaccccagtgtctccttctctgaaagccttgggagaccatttcagaggaagtgaatatcgctggagactctctcggtctggctctgcccccaccaccggcctccccaggatctcggaccagccctcaggagctgtcagaggaactaagcagaaggcttcagatcactccagactccaatggggaacagttcagctctttgattgtaagtagtggccttgtttgaaagaaaagctgagcaatgttttattgttttttgttgcttaaggagaatctcttacgtaaatagtgaccaagggtcttccagctcccagctaactctgacattttccaaagttcctccttccctaggagaagcaggactgtactaaaattagcccaagcaggtgagaatctttcttgatttggaaggcagctttgctcacccttataccactaacactttcttggtttataaagaactcaaagaagtaaaactccatgatgtctgtaattattagctttaaccttgtagaattcctttcccagccaaaaggctcatgaaaatagtacctttatcacaaaggtagtatttcacagtaacaattaaaagccatcaggcctaatcagtcctcttaagtcatattctgcaggatttatcattctcatttcgctgataagggcacaatgcttaagtggctcatccaagacaaggtttgagtgggagatagaagacgtctcctaagtcccagagtatgaacccttgagaaatgttgtgaaattgtgacactgtcatcaaggtagcattttaacttgggctctcaaccatcagaaacatactttctagaagcttcagatgggcccaatgcctgagcccaatggaatcagtcacaaagacttccatgtttgacaatacaaaactgtgcagaaataacccatagaaaatccctgcttgtgcatagaattaagagcaaatgaagtctcagtgtttctcaagaaactgaacttaaaaatgtacaatagtaaatgatgatagtcactccactgaaaatggcatcctaaaaaaaaatagtcattactatgaccataacaaacataaatgatagcactgcatacaatgtaaaagcaagtaagtactcacaaaattgttactttttggttatggtgtttttattttaaaagacagtatacgcctctattacatgagttgcatttatcattcagttaatgtgatttcactttgaaattctgtgactttttcaaaaagagatgtgtcgccaagatgaaaatgtagtactaaatggacaggataaaagaaattgcatatatatgggatatttgaactgataaaactgttgttatagaaacaacataaacaatgaagccttgtatttaaaacctataaaagcaaggaggtaccacagaatccatggcagtaacacacctttagtaaaccaagtaaacactgtaatttttttcagcaataatcataagttagcaattctaattatttaaatgaggagctcctgaatttaattattctagatctgtgaaatatcattaagacccaaatacaatgttgtattatttcacatcgtgttcactgttaaatgagagtcaaatcggatatttgctcattgggattaccctgtattcaaggggaagaacatgagctttggctgggcacggtggctaatgcttataatcccagcactttgagaggctgaagcaggcggatcacctgaggtcaggagttcaagaccagcctggccaacatggtgaaaccccgtctctactaaaaatgcaaaacttagccgggtgtggtggggtgcacctgtagttccagttactcaggaggccaaggcccaaaaatttcttgaacccaggaggcagaggttgcagtgagccacgattgcgccactgcactccagcctgagcaacagagtgacacttttattaaagactgattctttcacagtaaccaatgtgggaagatgtgaattgtcccccatccctaccacagagtcttcttgtaccatttacttatcacaaaatattaaaaatgagtaaatactagaaactgatactatggatgaacttgccgataaggagactctggcttctgtgtgtgacctgctgctaatcttcattcatatcaattaggcttcatttaaccacatagactaatacaaacaagttagaggaatattaagacactacacagtagatctttttttttagcttgatctcactatttttaatcattcctgtctttactacttgaagtccacttagaagctaaaattggctgagcatggaggctcacacctgtaatcccagtactttgggaggccgaggtgggtgaatcatctgaggtcaggaggtcgagaccagcctgaccaatatggtgaaaccccatctctactaaaaatacaaaaaattagccaagtgtggtggggggggcttgtagtcccagctactcaggaggctgagacaggagaatcactggaacctgggaggcagaggttgcagtgaactgagatcatgccactgcactccagcctgagcaatagaacaagactctatatttaaaaaaaaaaaaaaaaagcagctaaaattataaataccagatctttcagaagtaggccaagatgatgtctgagctcctctgaatataggatgcaactgactctttttcaattgtagtaatcaataaatgttgggtagccacatatcactatttcttccgtctattcacatcacattaaaatttaccctgagggtgcatcttagagcaaactacaagactgctagcttctttctgtttgtaaagcagcattagagtgttgcagagtcctgttgagtctcctttctgaaagttttggtctcctcttacttttgccactaattctaaggaccaatcaaaattccagtctgcttaactgaaaattaaagtgaaagataactttttcaaggatgactgtccttgctctgaaaagatgtttcatttaattaccttctaatatcgaagagcggtgaatatggttgagtgatatgtttgttaaaccaatgaaagttgcttttaagaatatatttcttgatgcttcctgtcttttcctctccttccagcaaagagaaccctcctcaaggttgaggtcatgcagtgtcaccgacgcagttgcagaacagggccatctaccaccggtaacccatgctaatttccagtcatcagttgactttttgggctttcatttacaatcatctgggctgctgcaaaaagagtttttcctgtgtaaatttatttacaatataaatgagatgtttttaaatttcctggccaattgccctaggaaagtggatttccaatacagagaattgttactgccacccatctctaaaatgctggaacctccattgctttagtttttcacccaaatttataccaattttgatttgctcacttaaacctcttggtacattagttagtaattccttttaccttattgagttactatagttatgctccagtgatctgtactttgaaaacacattgagtccctttaaccaggaagaactcttctgggcgaccgtccacatgttcctttcccttcctaatgacctgaagtctgaactctacagagcctctgtaccttctctttaaaggcagctctgctcaccaggaattggctataattctttccaactctctcatcattttaatagctatcagcaaatgtagaggtgtaggggattttgtaacatctgatgtatgtaaaaagaaatattcaagttggaaggcagactagaactgccctgagagatgtttgatgtacacattaaaaataagaaattttacataaatttgtttcttcttttggaggtgaaaatatgtggttttaatgtgttcaatttgatattttaccttgacagtttttgtctgttgctacaaaaccttgatcatttttaagactaataatgtattacgtatgaatttgaagggggaaaagtgcatttaaggtttttgaaatcacagtgtcttccctctcatgtatgttttttcttgacttcaaaggatattttggcctaggttttaattttttatgtttgagaaaaaattaatgagtatactagtcaaggaagcagtcaaaataatagagtcatttgtgacttacactggagagacttaataataagcttgataagagcgtcttttctgggatggtttcagtacagggctcccaaaaacaaaataatcaactgagatggactggtaggatccttctcaacctcatgatctgtgattttccttgaacgaatggcactttctctccttttcaaaatcaatgtcaattttatttcccaaagaactcactttcctggaaactggtgattcctccctctttctttgtactttctgatgctgtaaactcactgatcaccagtggcctcttgagttttgagtgtggggagatttcagaatctgctaattatttgacaatggcaggcaaaaccagaccagctttccatttttctctaaggcagctcactcttttgaggttgtcattgtttacccaggtcaaggatgagccaccttggggggcataggggtcacgcttcctttgtgctactggtcatcagcgactgctggctttgtctggatagggtgggtttcagggattctgatctcacgtcacctgccttacagcgctgccacagcagtgggccctgattcagacagcagggggtcatcccctaagtgcatttcactgatgtaaattatcattcacagcccagtgccccagctgggagagcgcgttcatcaactgtcacgggtggtgaggaaccaacggtaatgatccactttatcagacatcaatagcaagaggccgtgaggcagttttaatatttcgtgtagtggtgaatatacgctgtttttaaaaataagattagctcctttgtgctacagagctgcacacgtttcttattttaagcttctcatttggggattgtttaaaggtactgggtaaaatagaatgatttttttagtcccacataattttattaggaatactatcaggctttggttaagtgcatttaacttgaccatttagaagatatttttgacttttagtgtttgtactcctgataagtttttccatttcattagaatgcttggttaaagtaatttggttggaagatcatcaaagaagccacaggaattgcatgagactgtgtgtgtgattcctggatgtgcccagggcccttctcttttctgtatctcccctaccacatttttcacagggggttagacttttcttgtccccagaatgcaccatgaccctttctctgccaccaggggctctcctcacacaatgaacaagtttccgtaattccaagggaacataattaggatatataagtgatctagaaaaatttatgtttctctaagccaaccattcttattcattattttaaagaatgtatggtattcctgtctgtgggtgacttagatttgtattttaattgcctgttttctacttgatccctaaagttaggctagcttatagtttatgcttcgcactgcaatagctgtttaaagaatttcctggccgggcacggtggctcacgcctgtaatcccagcaccttgggaggctgaggcaggtggatcatgaggtcaggagatcgagaccatcctggctaacacagtgaaaccccgtctctactaaaagtacaaaaaattagccgggcgtggtggtgagcacctgtagtcccagctactcgggaggctgaggcaggagaatggcgtgaacccgggaggcagaggttgtggtgagctgagatcgcaccactgctctccaccctgggcgacagagcgagactccatctcaaaaaaaaaaaaagaatttccttattgtttcacctgtgttgtattttgctataactgctcattacttgtggataactttacgtatacaattgctgattttctaaagatgttgatgacttcaatttaatgctcagcattgtacagaggaaaatcaaactggcaacagtcagccccagaacactcagctcaggttaagatattgagctacagtggtttacatgagtcatgtgttgagtgaggcagcctccagtagaattcaagaaattctacatgaactattacccaccgtgcacttgtaatttctgtgggagtagtggagctttgagggggacaagatcgttttgtgagataattttagttgaattcagtgctgatgaacatcatctgtatatcacctatttttgtattttgttggccttgcaacctgcgtgtagctttggagtgttgtggtagctgatgtagtaaatgaagtaggaatggaatcattgcagtaccaggctccatggcaagggtcacctggcaggacaaggtgacccctctgaatgagatcccgggtggcacgttagactgccattttcttgccttcttgcctgcactctcccctccccgtcactgagtttcagcatgggttgggtgttttctttccacaggcttggcaatattcattcctaagtgtttcatctactttggtagatgtagatagatctccctacctacttaggtttgaaaggatcacatccatttctcttctgctgtatcctgcatgtttctcttccacatcctttgtcgtgaatgcccttgacttcctgtcttgcaattctgtctcttcaccccgtgtttccctctttggcatcccctctgttcctctgcacatcactcacactgaagtgtattgtcctgggctggagccatcatggtattatatcatctcactgcccctgtgctctcacagacatacggctgtgtacacataggtacacattgtgccactttattttattttttttaaatgggatgtcatgtatacattacttagcaacttggtttttttttaacttatgttcattcttctgggacatgttaataattacataatattcactgacgtaaaggcactacagtgttaatttcccgacattcaaggactttctgctccccctaccctgccctttcaactccatacgctgtgctgaagtaaccgtcctgatatagctttctttctatgatagtgctttcattcctgtagtctaataaacaggccctgattctcagccaagaaaccacagccctttgatttatggcaaataaacgcacagtggtgtcactttctggcagactaagccagggccctccccatgagataaaaggagagggatagcacagtcctttcagtctttgttgtatatattctaaaaatacacgagccaccattactgggttggtgcaagtcttggcaaatctgtgatggtcagtgtcaaagtggttatttttaaaagcatattgaaacttctgcagtttacaatcgtgttctttattttaatgaaagaaacagagccactaggaagttctagctaatggcttttgggcatcacaaagcagtagtgtattcagtctatgatgaaaagctgtgaaatgttaaactaagtcgccatttctaactggtttgattacttttttgttaagctagggtggaacatgctcacaagcacagaacagcagaaggctggttttggcttcctggcgggcccttccatggcctgtctgtagaagctgagtcctgccccctcaactagccgtgcagggtgggaggcagtgtgagttacaaatggaatcatcagcacaagttgttctatgtggtcatttggagagaacactgtaaagaaacatttccaaattgccctctcacataaatgtaactaaattacaggttgccagttcagttctcaatagaagagagaatgagcattttaatcaaattcagcgttctgtactacactcctaattttccacaaactgattagtgctattcactgtggctgtatgaaagtaacctgtatggccaggtgcagtggctcacactggtaatcccagcactttgggaggctgaagcgggtggatcaattgaagtcagcagttcgagaccagcctgaccaacgtggtgaaaccctgcctctactaaaaatacaaaaattagctgggcatggtggcgcttgcgtataatcccagctactcaggaggctaaggcaggagaatcacttgaacatgggaggcggaggttgcagtgagccaagattgtgccactgtactccagcctgggcgacagagcaatactctgtctcaaaaaggaaaaaacaaagtaacctggttgctagaattcatacagctttaggattcagttctgacatgatctatgacacatccatgtgctttcagttgatcagttgcctcccaagtgtcctttccagagattgagtaactgcaaaaatatccttaaggtttccagagctaaggtttccggagctgagttttccaggggcggggccagggggagtggggagttatgggagggaaggggcctgggagagggggaagtggatcaccagaacggctgaaggggagggctctgggcggagggagctgagaatgtaacacattccatttagtatttcattgattgtataaacaatagtaggtcaaaacttgatagcacatactttgccagagatactaattgaccaggaacttaggttacaacttagctcagcaggggagtccattgaagtgcccggatccacgtagctctttgtgttggcatcgctgctagaggaggaggggaggaaggagcttcactcaggctgcatgctaattcatcgatgtttaatattcatgaaaggattaagtcagtgttgatgtttcttctgctcctgctgagtctccacacctggatccagaatgctccatgatccgagtctttgtgtctttataaactatctttagggagctttaggactttatctcgggaaatattaaggaaatggttttccttaatatcagcagaaagttttcttacacataatctaaaatcagctgcttcatgatcttacccaggtgatctttctctgaattgtgcttttaagcctgggaggttaacatactgcttctctgtggatggggttttcaaattacccggcagcatccttgttggtgctttctctaatttgagatcctggagtccaccagggaactccaggtgaccaccttcaccaagacacattgctggtagtgcagggaaaaggtggcataagcacaggaagaagttaggttcagaggaaatttgtatcctcagcctaatagcaagaaaacgacaactgctaaaatatctggaagtaaaagaagcagcttccttttgtaacctcacgtgagaggttattcctaaggcatgggctcctcctatacctttagattcccctaggagccgtggtatagctgtggtcggcttctggtttctgagcttttccccacttagagctctttcacaggcacagatattacatgcatcgcctatgcattcaagccctcctgggacagccctgatctccagcatctgtcccagtgcctccatacatcatcaacacatccttgtttttcagtgtttctccatccacactgcatttcttagactgcttctcagggatcttcttgtgatcaaatgtggactgtctaaatacagtcactctatgcggggcaggtctctaaacccaaaaactgccaagctgtgttcaccttcaaagaaacacactcctatcagcagacttgggtgcacatagcctggggtgtgaggctgggtgctgggagacttcctgagctggggcacacagatgtcctgggtggtcctccagattatatgctactgtgtgaccatcagtatcctagagaaggggctctgtgttgggattttaaaattttgccccagaagctacagtgttagggtcctaagctgatggaggaatgtaggcctaagctagaagagcaccccatgggagctacatcgaggagaaactcagagcatccctctcatacacagtgacactggacagtttgaaatacctttaagctctacctggtttggcagtggaatttagtagctagaacagatgataatgtttttccctttccctgtgatcaccttggcagcaaccctttacgtttgagactacggggtcttagaaccaagttctgtaagaatttggactctgcaactgtatggggttcatttcacagtagatttgaagctgttggaaatctattgctgttttccagacacttgtaagtgttttctatataaatagatctaattaactttgtctagagaaaataattatctgggtgtaccttactttattaaactgatcagaaaacaaatgcaaggtattaaataataatgatttcttgcacaaacagccatcagtggcctatgtacataccacgccgggtctgccttcaggctgggaagaaagaaaagatgctaaggggcgcacatactatgtcaatcataacaatcgaaccacaacttggactcgacctatcatgcaggtacgaagattgccatccaacttaaaaccgcaggccatagaagccgaaatgtacatgaccgaactcctttcctggtgtttatgtattgttctgaaagacccgtatttgtaaaagctttctcacaaagaaaatgcattactttaaatacaataatagcctaaggaagaatttgcttttcaaatcagtttatcactgaatatattttaaaaatgtgacgtgaaagatattttcaaagtaagagcctattgcagtgtgtagcttcttccctgcccagcccccactttaatccgaggctagtttttatgctgggctagtgattcatttttatttcccttgaatgtgtttccccatcctttcccccatcattatgtttaattatttcctccacgctttaaataggccagacctcttattattgctgtttgcgttgttgtttgggttcgcgctcctaatcacacacaccgggagatcctcctatgaagctaacttgtttttgcctccaaaatagcttgcagaagatggtgcgtccggatcagccacaaacagtaacaaccatctaatcgagcctcagatccgccggcctcgtagcctcagctcgccaacagtaactttatctgccccgctggaggtgagacggctacctcatctaactggactcactctgtcctgtgactcccattctttcttctctcttaactctgccttcagtttcgcagccacctcctctctctgatcagtcgttgtgttggtagtgaagggtgttcttgtgcagcctttctacctgcttctctgtctcgcccagttaacattcctggactctctcacctgattctcattctcatttggctaaggccgtggtgacttgtgctggacgtgggcactctcttttcaggacttccaccgttcttgttgtgtttcgcttctttttgcctgttacctcattagaattgcgtaatccctctttcaaataccaagtgctgatattgagtttttaaacatagctattgctttgatcatttgtttttctttcgactgtagggtctttcattctatgggcatacatgtttctgatgcatatttgcatctctgcatcatggctgggcatctgcttgtgctctctgtcgtgtttgtgttgttttggtgccatcctttaacatcacaaatgtcagagttagagaagccaaagagcaaatgtttgaggtcctaagcttgactgtgtcttagagacagctgtgggcttctccacgccctgggtccagatgctgataagtgggaatggatgctgtctcttccacactctgatatgaatgtcatgggtaacaactgtgagattccagatcgttgtatttattgatgtagcttttttcctttttgtgctctaaaacttgccaatctgttcttcattagactgtgagctcattaagagcaagggcacatttttctccactctgtaaaatctccatccataatgcttagtacagaacagtatttttggtacatactgagtagctaccaaaggatggtggttataagtacttaatattgttgtgtgtttatccaacagagaaaatgtaaagttagattgatttaaaagtaaatgaatgacagaaaacaggttttggggatcttccctcttgtccatctccaaagagaagccttctgcaatacccaggtacattttggcacattggaatcgcacatgctaaagagttctaatcctcattgttattctttagggtgccaaggactcacccgtacgtcgggctgtgaaagacaccctttccaacccacagtccccacagccatcaccttacaactcccccaaaccacaacacaaagtcacacagagcttcttgccacccggctgggaaatgaggatagcgccaaacggccggcccttcttcattgatcataacacaaagactacaacctgggtaaggctgctgcttttatttggctccattttcatcatgaagtctggcattaattccttgatttccttagtgtttgtagttcttgcagaggaattggattgactgtaaagggtgtctccagagggtctcctcagcctgcatctggcccctgcataaatgggcgggtgggagtgggtgggcacaggctggtagctgtctttggtattggtgctgggactgccttttctcctgggaagctctagtttagacagttcaccgtgctggatggaaaggtattgctctgtgctgttaagattttgttaattgatcccgtctcacaaagtaatctcactaggagttataatcattttcaaataattttttcttttgtcagtttcttcttgcactttcattggcattacccaccttcttttgatttgtcgctttagtttttaccgttcacatcagatcagtattcacacatctgaggtacattttcatgcccttgatcatggggtaggggatgtactgagtgactttggttgtagatctgatagctcctttttgtgatcattttgtcaaaattgatttttcttaccatgcaactctttcatgtactcctgaattgtacccaagaaagaatctgtacattgtattatcttgagcaaaatgagattaatcaaaggcaaatatgcatatctttgtatttctgtgtcagttctttatttctttagccgaatcggtggctttttcagtgtagtatatgattcttttaaaagtcagttggtattttcctgctatataatctctatacctgtaattacactgaaaccggttcccgtatttctggctatttttgatgctgcagatggtttttcttccggttatgtccccatcgaattgtctagctagagttaactcagagtttaacttggtcctactattatctgtgctacttgctcaaaactgatgttatgggaatgctggttgagttttggtgattgttattggccctagctcttcggtcttggaccaacaataaacatacaccattaattcccatttctagtgatggacattaagtgtgtccatttgatagaccagcagccttatattcaagaacaagccctgctcaaggggatttgggctgtcattttatgccttgcccattgtgtggtatcagttcagtccagcaggtctagagggcgtgctcctagaatcctttgaaccgtgggacattgtgtcttcaagggcattcttggcatttggggcagggacatttgtgccttcagttgcagactatttaacaaacttggcttctgctaccaggtgctaatggtcaccattacccccaccccaacatagtgatgaccagaaatgccctacacatttcaaaacagccctaagtgagaaccactctaagagctctttctattttgaagtaagggaatggcctgccaagagaatttctcatttagatctggtaacattcatttggtaaactgataactgcttctaaggcatataataacatgtaggtttgactcccctactagtctgaagataatgttacagatttgcaagcaagccaagagtaagagacgggcagctcgttggaaaatatagtaatggagttctttttttttatgtctttttacttattaccatggaacccctggctgtcctgccagtgttctcatttactatagcactgctgtaatttcaagtccttagccagaaacaggctccagaaataagggctaacgaatataaaagtagatggattagtgtaaggagccactgtggcttgccaacataagctatgattttagtaattttaactagcttggtaatcaaatcccctaaccttttcacagcctttcaagccacaacaacagtgtaattgcagctgggcagattgtattttaaattaaacagcactcgctttatttattgcttgcaacattgctgaatgaaacccatttttactttccagttgcgcctgtttacccagatacttgttattgactaatttactgatttaaaatcataatctgttagaacaacgttttgttgctgctgctagtgtgggaaatcctcaaggtaacaactggaaattccacaagctactccccttcttaagcgaattcagatgtgctgacacagctgcgctatcgcttctaaacaaaggcctaggcaggattttccctgcggaagacacactctaaattgcctgttcattttgacaaaagatgaagagccggagggaagcatgaagataatttgcaacttaaaaatctgttttgagttggttttagggtttgctttgttttttatttttgaaagaagaagagaacaaatgagagaacagcatagctattcttagatttgagcattagaatagaaaaaggaaaaaaactggtaggacaggttgaaaatgatgaaaataacactccttcccccatcggcctgggcactgttgattcttacaccaaccagaagcctgaaaagtatcaggacatttcccctctatacattgagaaattaaaaaatttattgaaatatgtcatgaaagatgaccttttacacacacacagatactgaaggcagtatgccatcagtatttggataaagtttggcctcattctcttttttttaattattattttttttgtttttgagacggagtctcactcttgcccaggctggagtgtaatggcacaatctcagctcagtgcaacctctgtctcccgggttcatgcgattctcttgcctcagcctcctgagtagctgggattacaggcacatgccaccacaccagctaatttttgttgttttttgttttttgttttttttagcacagacagggtttcaccatgttggctaggctggtctcgaactcctgacctcaagtgatcctgccgcttcggcctcccaaagtgctgggattatgggcatgagacaccctgccaggccaagtttagcttcattcaaagaaagaaagaaagattggctttgttccccgcctgggtcaggcctttcagggaatgcatgctggagaccaggggcttgggagggatgtaccaaggagggatgttccatcctcagcagctcagagcacgtgtatacgggttgagtatccctagtttaaagattcaaaatccaaaatgatccaaagtctgaaaccttgtaagcactgacatgacactcaagcaataaatgcttattggagcatttcagattctcagattagggatgctgaagtggtaagtataactgcaaatattttgaaattcaaagcccctctggtccccaagcattatgggtgagggatgttcaacgcatattagtatatttgtgcctttcacaggatgaagcatgggcttgcttttgtagcaagaaagattacaccctagttaagttgcaggtttgttttccatccaagttcaaactaatgaaacttattactctaggtgtggttgctggtctcttccaggatggaaaagataaagaaaaaaggcacttttttttaatccctgtgttttatatattttgaattaggaaagccctttttaaaaagatactgctctttgcatcctgtttaaaaacactttgaacttgatggagggaagcaattttatattacacatgaaagagttcccgttatgaaactgaagaaaggaagaaacaaccaggcacactttatgcgttggatcatttattttcattgcatcagagccctcgttagtattccactttctcatcagctctgaagttgtccataactaatagagagccttgaccgccacttcatgtgccctggcaactaaggagagatgcctgcctccttgagtggctcggtgggagtcagggcttgagggtgaccactagccttagccctcagagctgattcatggcagctgctgccattatttttattatttttgataaaataatattataagcctcaaggcctctggccctcacagtctatgaagtctaggtttccatgcaaggccactttagcagatctttgaaattcggttgactttatacttcatgctctgcccctcactgcctccctgacacttttctctaatttcagcttcttttcacgctacggccccccccgccccccccccccctttaaatcaccagccttttaccaatagggctgattgtctttcacggtagcctacatgtgattccaaggtcaggctggccttgtgtgtagcattcagaagccctgccctctttcatgtaatagcagtcctcagctttctctaaatctggcatggtcataggctaggtggaagcccaagggtcccccgctggttgtggcgttacctggtccggatcagagttagcattgagtgggtagcttttgagaaattcagtgctttcagtttttcctctgtctgtagttaaccagtcatgaatgtttaccagattatcagcttcttggaccttctcaatcctaaatcagcttagcatatttctttatgttctgtgtatgtcagtgtactgcagaatactggattattttgtgcctctgcttagccttttaaaaaaatatattgggttcagggtcaatatgcatcacaaactgctaacaggatttctttcttcatttaaaagttcacctagctagcaagaagcaagggttgatttttgttgttcgtggtcttttttgattcttgccagttcccaagatctatgattatgattcagtgatactatgacttacacggttgacttgggaagcagaaaaatctagtaatttggcagcagcaaaggccctattataaaattgaatgaagctgatatcaaatgtcttcacagtttactttttttaatcttaagcttatttggttgatagtggttttttttttgagtataaagatatggattctcctttttatgtttttggaggcaagactcactgcatcacccaggctggagtacaatggcacaatcacagtttacggctcactgcagccttgacctcctaggctcaggtgatcctcccacctcagcctttcaggtagctaaggcaggcatgcaccaccacactcagctaactttttgtgttttttgcagagatatggttttgctttgttgcccaggatggtctcgaactcctgggctcaagcagtcctcccgccttggcctcccaaagtgctgagattacaagtgtgagccactgcatctggccttacactgcatttctttttcttttttttctttttttttttttttttttttttgagacggagtctcactctgttgcccagcctggagttcagtggcacaatctcggctcactgcaacctctactttccgggttcaagcaattctcctaactcagcctcccgagtagctgggactacaggcacacaccacacccgggaaatttttgtatttttagtaggaacggagtttcaccatgttggccaggctggtctcaaactcctgacctcctcagcctcccaaagtgctgggattacaggcatgagccatcgtgcccggcctacactgcattttaactgggtctacataagtgagagtcagctcctggactctgggtcataatctttgggcaacttcctgttctctctgaaactccatttcctcatctaaagaaacagaccatgtgcccaacctcctaccaagggtctgttgcaggattttacatctgaccatgcctcataaatcatgcagcctgacccaggttgtcagagtacatatttctcttttgttgattctctgtggtatcttatgaagcttatgctttaagaaaaaaattttgtaaacgtttaaatattaagacataaatgagaacttaatctgcagaacttggtcaagaatctcagtaaagttgtatcataactttgtgagtttgcctgatgaaagcgactctccctggagtagccacgtgacttcacagaccagattgacattctctgctgagttcagaaggagtggaggggagcacaagtgctggaggagggtgtggcagggaggcctattccctaacgtgttaggctggctcccctcaccgggagctcgggacccatggagagatttcgaaaccgttgtccccactccctctttgtgccacattcactggcaccctccattctggtttccctagtaacatcactgctgggactctcttccccttccccttctcaaggtctcagggaaatggttaacctttcatgtaaatattcttactctcctctctccaccaagcacaagaaggaagagtacagtctgtctcgagagacagtcagccaggcttcctgtacaaaacagagatgggacccatctcacgctccaggcatggacagcctggttgccttgaaacaaacagctcaagaagaaaagcacccagtaactgcacacagatacttccacttagcatctactgtcttttacatttttcttgcaggaagatccacgtttgaaatttccagtacatatgcggtcaaagacatctttaaaccccaatgaccttggcccccttcctgtgagtacactggagacacatggaatggtctgaatatgtgtgttcctttatccgctcaatgttgatggagaggccctgtggaccttctctatctccaggctttgtggatctcattggtttgtgtttcttaacagaattgggtgtttagctgaattgtagtcatacattatagttcatgtgatatccagtacttatgaaagaggtttctgaattgctagcttctagcagaagatagaccttgtacacaggatgttcaagagacgttctctgcaggtgacaatttaagtggcactcattcattttgtaacttagcaaccactgagtttcagtcatattgctgattaagtcatcagaacaaaaataatgaaaatagtatgggagaagaaggcctaattaatcatagaaagtttctataagtcatttaacctgcagatttttaaagtttttttctcccttgttggtgacggctcagtaggagttgagctatatacttaaaattggattttgaatgaaaccttcacatacatcctcctcaacaactcactctcagtttgaaaaagccgtagggggtgacagggcagtggttggactccaaggctatttttaaatgggaatttttgttgttgttttccaagtgtaagaacctttttgttgcctggtatattagggcaacattggaggctgcgaaggttaaggttcaatcattattcattaggttatacaggtatcccacaccaaatctgtttggttcctgggttcaaatagaaagaaccagagagttagtttagaaaacaaaagaaagcatttttttctgaatctgttggattcctgaggttcagatagcaaatatggatagttcagataatgagggcataccagctttatcttgaaaaaattctccaaatctgtttagttcctgagcttgactagcaaaagttcatggtggataataccaatattagatcatcaactgcctggacaacacaaatacagttaaccatgtctaacatttttatattaaccccctcttcctttcctttagtactcagtatttatttaattaaatggtactcaacttcaaactccactgttccatggaatgctgcggtttccctttgaagcttttgagctagcagcccatttccggttcttcatacagtcagcgcatctgagacctgagcatgtgataaagcgtgttgctagacatggtcaagagttaacttgaaatgttcatatttagttcacgctcaatgcataaatgtaccctagcagaaaagagtacagaggtgttctatagtttttaaatgttgcctttgatttcagaactcctagctaatgtttatattttctctctcccttccttccccggatactagcctggctgggaagaaagaattcacttggatggccgaacgttttatattgatcatagtaagtaggcgctgttatggacacacaggtgttgtgggttagagggaaggagtaattcaaacatcatagtgaaagctttgtcattttactctttatctaggcagccaggtgttatgtggagaaaatgataccagagaatcagtgccttcatacggtactgtgcattcaccccaagtttgcttaaagtagcccatcaaactttcacccaatctgatcttgtgacctattaacgtgtttttttttgttgttgaatttttaaaccacattttgattgttgatcccttgacttttgcacatttaataaatacactctggtaatagaaaataagattagaaatgatgatttagtcaaaaatctgtgaacagtgcttgaagcagcatgtaagttttttagacactgccttcaagggtcctatggcaggatgcccgctctgaccttattttctattcacggcatgtttccttgcacccacaacactaatatatatgtattttctggaaattgtagtatatttgctatagacatttgctccagcacctatgaaaaaatgtgtggtttctcattccaactaaaagttcaactaataaaagtttgctttttagccagtgggattttttttttctcattctttttggaggtgccatgttcttcatggaatcatatttctatgtcccttaaattttctgaaaaagtatattaaaaagaagccttcaaatagatgtaaagtttcaaccatgagtgcaatttggtagtatcttggtctttgctttcatttggttcatgaacagaaagttagggtttccctggcttcacaatttcataactaaacaaaagcacgttgatgagccacctgctgagaagtctggccacaagtaatcctcacacgtataggactggtcactatctcataggcatagtacgtttttcagatgttactaggaggcagagacattgtgaacagaatttcactttcaggccctgggggttgagggcttattataaatggaattaagcaaaagtaccagcagtttacaattcaactgaaagtagaagtcctaggtgtatttagaagagtgagctaccctttgtttaaaccagatatttcaaggtgcagagacttagtttttgtcttttatcaaaaaatgggcagatttgtcaactgtccagaatttcatagtaagcataaagtatttttcctgctttcatgtatgtgtatgccctacttttttccttaatatactatttatttattgttttaagagaatttactaaaatgagagagaggccacacctctttttcccatgaaaaacaaaataatagtttccggcttggtgcagtggctcacacctgtaatcccagcactttgggaggccgaggtgggaggatcagttgaggtcaggagttcgagattagcctggccaacgtgatgaaaccccgtctctactaaaaatacaagtaaaaactagctgggtgtggtggcgtgcacctgcaatcccagctacccggatggctgaggcaggagaatctcttgaacctgggaggtggaggttgcggtgagacaagatcataccactgcactccagcctgggcaacagagggaggctgtctcaaaaaaaaagaaaaaagtttcctttatagtattttttatacatcacaatcacagttttaagacaggtgtgaataatactgatcattttactaaaacaggtctttactggtaacacatcctggtctgtgacgcatggagagcattgcacacaatattgtgacagttttctggctggagatgtgatgcttaggtccccctaaaaagaatgttgtgaatgtgtttcgtataccgcaaggagccaaaaacagaaaaacacaattacaaagggctgtcgtagcatgcgttaaaatagtgaaaatcactgactatttcacttgtggtgtcatagacctagtatgatacatagcagatgcttgatacttggtgacttgaaatcaggttcatggaggatcagtggtgaagctcttaggaagttgttgtgcttgatcagaaagtgaagtgaactcacttgaggagcagtaggtgcccccactccggctttccacccccaccggcctgaggctagcgcaactccggcttactggaaggtggaagaaggtaactacctgctagatgcctgggcttttccttactcctgatcagttctgcagttactccagcactctgcccaaacatttcctcatttcacttgactagagcagcacccccgaggctccattatactctgtacagagcttgatgcaactaagctgtgccaatatatttgtggccattgacttggagattaaaatttattttgcccttgcacaaccatattgaaagattctgttaaagagatatagcataaattaagtgaccaaaaaccatttaagaaaaggatttgtttacgagtgcctccttagctgttcatgctacgtttctaccatcgctccataattcatcaaggtttactcaatggaaagctgtagagcagtacacgtcagtgaaacagttcaagtcatttgcctttccacaaaattcagtctgtgaaaactgcagaatacctatcttttgaagaggctttatcaggctgacacatacattccaaatgggttgaattacctggaagataacatttaggaatgtcctttctgtcagaagaaagcctctttttctaaacaatcttatagcaaaactcagcatctgattttgctgtcataatgcctacaggacaggaaccaggttatgcccacgtatgccacaatgccgtgagtgccgtcatcttgtaaattgcttagagtcatcttgtcttccagcatacctggcacgtgggtccacctggaattacagatgagatgatgagatgcacttgtcttttcaataattaattatttctgctttgtaagtttttcctgagaagttagacattttcaagatgaacaatactcagccatcataaagatttaatttcaagagcaacgaatgatcgagactaacctctttagactcctcgattcctttgtttgctgtctatggaatggctcctggctcttgggcctcaggtgggaggttaaaggaaggtcttaaactgaatctctacatcttgtaggaatgatgtcattcttcttaaagaccagacaggcccagcagctgagtaattggccacaggtatcctatctacaacattagaagagaaaattgaattccagtgattttgtaaagtcctattttagtctttcctgtcaacagtcttactagacctgttcatcgtgactaaactgagtttctcatccttccacttccttcttgtccttttattggaaatatatctcaaagaggaaaagcaagtttaaaagccaaagttctttaaaaaaaaaaaaaaaggataactggctaccccatactttcatacattgaccatacttcactgaagaattctttatcataaccatgtagaaacttgtgttgttccaaaagcttaggctctttttaaagggactttgttttcaccatcagcttcattcagtcattaaaaaaataatgcactaagttcctgttacctgctgggactggtcttaagtggtagagaggggattgcaaagatgaataacacacagtccctgtccttggggaggttaggtccagtgggaagtagcaggggatatttcaggtgttagaggagtgaatcagttgttacacagaaacagaagaggcaaggactgcatctgcttgggaggtggttgggcacagggatggggccctgagagaatgggtcactttttagatggatgacaaacactgagtaggattgaggcagtcaaagccccaggaagagtgatcctaggatgcgtggaggtgtgtgaatatgtgcagatgctgccacgttccgagaaacgcagcattgctccaaacagctagtgtgccgcaggggcgcacaggccaagccaaagggtatctgcccggtgtggggactcgggctcaagccacaggcagtggggagctcccaggggatttcccagaggggagggatggggtcgaaatcgttatttagagagatccttttggcagagctgtagaagatgtcttgaactggggttggggggtgagacaattcccagtgacgcccagagaacagttcagggaaaaaaaatgagccctctagcaagaagcttatcaggaatagagagggttggtccgggaccaccagagtgagtgacacggccaggttcctgattgggacagtgagtggattgtgatactgcacattggaatgtaaggtcacgttaccaattttggtgttgggtgatcagaggtttggttttggtagagttaagctgaagtacttacgggaaacccagatgcagatgtccaggatggagcttgaagttcaggtctggtctgaggacttgcgaatcccaatgagtcaggagttattcatttattttctgctttgatgacaatatccattgatacggttataatccaagttggtgttttaaggcgcaatttttactcagctgtactccgtttcctttatttggttttcttttctcttgttttccatcacaatagcaacttttactttccaaagtcttctgtgaaaggtaagggacccaaaaatgccttttgcttccatcaagattctctcaaacagttgagatttttcatgtaaattttctgccagcatgaaaacaaaagattctagaatcatcacttgctttggtagcttttttttttttttttagcttttcctctgcttctattaaaataataataagactttttaaaattcctaatatggtcattaaaacagaattcactaattattcttatcagctcacttacagtgtatacagaaaataaacagaatcaatattcttcccctgcactcccccgccccggtccccaagacaggtgcagatcgggctggagcatagtggcacagtcatagctcactgcagccttcccctgggctcaagcgatcttcccacctcagcctcccaagtagctaggactacaggcgtacaccaccacacctggctaatttttttttttaaccttttgtagagatgggtcctcactatgtttcccaggttgggcccgaactcctggcttcaagtgatcctcctgcctcagccccccaaagtattgggattacaggcatgagccactgctcctggccaccctttacttttcaaataattttcttcttctttttttttttttttgttttttactaacctagatatccaaaaactctggagaacctactctccctagtgtgccccaccccccgtacctttcatgtgagtccattgcactctctctccctccactccaccctagtacacacacaggaatccgtaaggtctttttaattatgcacagttacaaacaccaagtgatctaaggcagctgttgtgtattatcacctacacaagtaatggtatagatagcattgaacagtcttgtgcacattaactcacttggaagaaagcaaaccaccttttgccagtgtgaccaaacagaaaccatgctctgtaatcttcctctgctgtatctaattctcttttttggactgcctaagctgctttgatttttgtgtgcatatgagtgacgcatgtaatagattattcatttgttcaatgcaggattcttaattgaaagcagtttttcaacaccataagtaaagagaaaagtatttgaaatgagaaaaaaaatcgtgtgtgtgtttgttagccttttgggaaactaagactttttaaatgctttttttcaactaaatgaaaatcaagatcaagttataaatccttaaaagaacaggggtttataattcccattttagcaagttatttgcccaaaacagtatgaatagatggtttatctttagttgtgcatttttgattgagtgtttttaactaaacagtatgtgaggggggttgccatatagactgtagttacctgctaactctgaaatactaatttgtctttagaacacagggtgggggactggacagcttttgaagaatccagaaatacttccttccaaaactttctttacatagaatagatttgaactaatgttctgattttttttttttttttttaacattttcagatagcaaaattactcagtgggaagacccaagactgcagaacccagctattactggtccggtcagtattttcaaattctgcctcttcagtataagattttggttacgtgtttacgtgtttcttgtgtattactgataacggtgatgtcaagggacaacggtgattgagtagttgactagaaacagagcactttgctgccatctccttactgaagtttccaggtgaggtacagctgcatgtgccttttcagatggatttcattataaaggaaaacagcttgataacgacagcagaattaaacatttttcttctcctttataaaagggtggactataagtatagtcaaaattccctcccttcctttttatatgaagcaaaaccaagccctatcttcataaagtgttatcatttctttaggccaggagtagtaaatgtatgccaaaagtttaaatcttttacaactttcaaaaatctgtagaagtttgggtgagattatagctaagttcaggagctggcagagttaagagtttggaactctgccgacccacagtgttctcatggtcccctcatatatgccgggtggaaaaagaatcaattctgatgcaggcgtgatgacctcttaaaacaccgtagcacactgtgttcataaggcagtgtgagaaccccactccctgaagcatcaggagacatttggtatctcacacttgttaacaagtctgtagaatgggaccacactcatcagcagagagcacaccaccagcttttgtcagtggctatacgagtgcagggaggtaatttggaattacaggagttgtactgcgatcagcagaagattgcaaatttgggattcttagaccagaggagcaaaaggaactgaagtttgttatatcacatgctgagctaagaggccagtaggtagatttaaaattccaatttcatggctttaatctgattccattcaaattatgttttgaattagtaagatacatccatttgaaaacttaaaagatactacattgcaaatgtgccccggtaactgactcctgttagttacttgttggatttgtttagtcatttgggtactatttcctaggcaaagtgcccagtagtacctgggtaaaaacagtcaacttttttctctatgcggcttaaacactgccttactctgatgcttccttttgatatatatatattcgcagtcacagttgtttattggaatattattttctcttctacatcattagaacaaggtaaattcaagaaactattctttttaagtgacagaagacttttgacataactttgaagccttttcaaaatatttttatcacttatcaattaccggccgtcactcaaacactgctagtccttattaaatcttactgaaaattgctcagcatcataaagccaagtagatttgcccccaagaaagagctctctgctttctgttaataaaagacccttgtttattccttcatttttattattattattcattatattgctttcaatagaggagaatctgtatttaggtagttatcaacttagtgtagacatttggcctttgttgtcattcagttctaaatatttggcaattttcatttgatttttcttcttgacttatacattatttaaaatatgctttttagtttctaagagtatgggagggttgtgcctattcatttttttttattgatttctaattttattgcattatggtcagataatattgtctagagaatatttattattggatgtttatttaaaacttcattggaagcttgatcactttttgtaaatgttctttttctttttaaaaagaatgtgtattgtgtctttggttgaatatagagttctttttgtgtccattaggtcaagcctgtggtgttcaaattatctacattctcattgctattttgctattggatctaatcaagatagttctgtcagtctctgtggtgactgttgccctgtcgatgttgtctgaggtgtatataactacattctctttctctgttcgtatttgctgtttagcatatcttttctctctcgcgatattttatcttctttcttgccttttgttcaattgatagagtactctctattttattttctctatgtgcttgcaggctgtactttctatttgtattcttatagctctcacattaaactgtgtaacccacatacttgacttagggttaaaatgaatcactgtctactctccttaacatcaggacctcagggaacttgaatgccattcttcccactcccatttgccacgtcattgttgggtggaattttaaaactaccttgctttaaactttcctaatagtcaaatagtcattaatatgttttatcttttttctccctactgtccatactgatttaattttaccaaatgtagacaaatttctttgcccaccattggtttgcccaccattggttcttccatccattttttttctggggtgagttttgatcttagtgaagcctagtccagtttatggttcttactgtgtggtctgctgaccagagtatcagtatcgcctgagagcttgttggaaatgcaagttttcaggtcctaccccagacctactgaatcagcacctctgggggtgggacaccagtctttgttttaactgctctcccagggattccagtgccccctcaggtttgagcacttctgcccagcagcactgccagtgacagtctgagagtggtaatatctcttagtctttgactcaaaaggtctcatttgacctctctgaagttcagctgatgatagaaatcttggttaaattattttccctcagtgctttggagattctcctgcatgtcttctggcctccataaatgatgataacaggtttgctgtcaatctcattgtcgtttctgtgtaggtaaatggctctgttctctagtgattttgaatttttatttgtgtcttagatgttttacaatttcgctatcatcatgtacctatgtgtggagttctcttcatttatcttgctttggactcaggcttcttcagtatggggattgtgtctttcctctgttctggaaaattctcagctattatttcttaacatactgcatttttccgattctctctaagtatctgtttctgtaactcctattggacatttacttctctttcacattgtctgctttatctcttaacttttgtgttttctgtctctcactgctgtattgtgagttattacttagctcttccagttaattctttaagctttttttgtaatctctttatcagttcattgtgtttattatttcagtgactaaatttaattgctcaaagttttatttggtcgtttaaaatttgcttttgtcttcatagttattttgtcctgttctctttatctctttatttatttttgatgctttcatctgcttattatttttaagatatttatttcttagcctctttgagattattctattatctctggtcctaggatcattaaatctcccactacgtctgtagactctccttaagagtgtagattattgcctagttcagtttataatttgtgtgtgtgtgtgtgtgtgtgtgtgtgtgtacatgcatgcaagagggagagagagagcatgagcaagctcatttttttttcctatgaggcttttgtaagtcctgacctgtatttactgttaacttcttagcttgggttcatgcacccccagtcagtataactgtggacctcatacccactttggcacaggcttggagtatggatttattacaggtctgtttctttttgtttttctcccatttatggtcctggacagaaggtaagcttccttgcaacttccctggtccggtgggtagagttttcttgtcccctttccagatgttaggttttaaacaatgactgttctttctccatcatgtagaccaaaggccaagttctgtgtccccatgggagattaaaacccaagcccctatgtctaggtccagtgcccactgatttctctaattgtgagtctttctgcttacctagtacctagagtttctcttcccaagttttaaaaatatcagttctaagtaggcctagcgtttctacatatttttagggagaggggaccctttctgtggcagctcagtgttcagcattcctgtaagttagcatgctctgtgtatagcagatatcactagtaatagcatttagtaagtgatgttcacacatgctgctgtcatgaacactatctcatgttgtgtaacactttcatttttccaagaactttataatcagccgacttgaaactcacagtcgtcccctcagaaaggcagggcaaatgttgttatttccaatttgtcagaagctcagaaagcttattctgttgctgacagtccttgcaagggtcagaatcaggaccggagccccagatgcgctggtgtcactgatgtccccgtgccgggcatgagcccttctgtgcaaggagctccaatgtctcccggccagtgatgatgtgaaaacatttagaaccgacctacacaataaggcagattttcattctgtacccaaaacaggaacacagatttaatgcagagcaaaagggctttaatcaacagatatgttcatttttcacgtagacctattttacaagctaacttgtaagccagaaaatgacattcgagattttcaagtgagaacaaatgatttggtccaataattaaaaaaaaaaaaatgtacgtgtaatctcttcagaagctgcactggaaggatgtttgtcctggtacgttgttggaaagttttcaggaagagaatgtaaaaacttgctcttcttattctatcatgagaactacctctggagagaaaagataatgaatgcaagaggaagacagtgatttttcagctttcacgcatcattccccagaaggagaaaggcttgaaatatctcaacatttccgcccacacctcctcagcccctgccaggagacagagcaggcaagggaacgggcatcataggctgggggccacatgttgaaatctgctccttggggaatttgtcatttaagacagtcgaacttgcatacacagtgatgactgtttaagctttttttccaacattttcaggagtagggggaactgtgatgtaacagtgatgtttggagaaccctcacgaatacaggaacaaacaaaaaatagttgctgggaatcacagactttcagaaatagaagagctgagtcacgtttgttcatccagtcaaattcttccacttaacagtgaagaaactccttagtagagaggatgtgatgcagagccagctgatgagagtctacccgagagtgcaggccttctaacgctggcaggagagagtggaaggaagtcacttttttagttcctatggggtcatttttttcctcatggcactaccacggtttattcattgatttcctattgcctgttgctctcaacagcttgtgagctccaggagggaactgggaaagctacctttggtttatgtactgttatttttctggcacctaaaatgccttgcacagagtaggtgctcaagaagtatcggttgaatggacgagaatgaacaccagaaagtgagaaataaactagagaggaaatcttagtttgtgacgggatgtactgttggtagagcagaaaacatgatctctttattggcttatgtcagaacattgtattctttttcttattttggtggttgtccaggtattaacaaatttataccttgcctagactcagaattgctatgtggtttcatcagactaaacactgcctaaaataaataggatgtgaggtcaaatctgttgttcagtggaaaatcaaagaagactggcttaaaaactaagaaaagaccataggcagtgtaaattgtctatagattgctcctaagctatataaagatgatgtattttttgctctggaattacagagcaaaacactgacgtgctcattttctggaagagtggttgtttgttttgtttcgggttttttatataaacatgtcttaaaactataaaagagggaagttcatgttcttcatttcttctgtttctggtcaagataagtatggtgaaagtgtaaggtttggagtctggagatactagactaaggatcagtatattttattaacttaggccgaaatgataacagcagaagtattctctgctgaaattcatactagtggctaaaaagcaatgagttgttttcgaggctgtcatagttaatgtctgtgtatatgcaaaacccaatcctttttgctcataaaaatatcgtaagctttttcagtagccaaaactcacggccctgactctaagatattgtaagctactttacaaggtagcaaataaagattatttaaatgactacattaacatgttactcctttgcctgaagagatatcacaacttttgaatgactatagttaactcaattcctgagccctcaactggggtactatcactctatttcatagataaagcatttgagatttaaagaaatccttgcccaagaccactaaatattaagggacaaaccttctgacttctaaattgaggattttttgagaatgccatctgcctgattttatattccttgataggagtgtcagttcacttccctttctgctcgttgtatttccccacaaaaattcgttaaaccgtaattagacttttcaaaatgccaacgtaggtcattctgggttgtatgttagaagtatttagccaataactcttacctaaaccacagcaaaaaagaaaaacagaaacaccctgactcatattctgacaaaagtcacttggaaagcatgtttagtttgtgtagcgtaccccaaatggtttctcaaatagcagtatagctgttttcaggggtgaaagctgcattcaaagctgattagccctcatcagttctaggactttcccctgtgctgtgtagacattatctaatttttccatggataatctgagaagtgagaatttacggtttatgactcatgaaattctcttgaatgttgcctcagtatacataaaatttcaggtgtattgtttgcattatctatatttataaatttatcttccaggctgtcccttactccagagaatttaagcagaaatatgactacttcaggaagaaattaaagaaacctgtgagtaatcatgccttccaaaaatgctttgtgttagtcatttgtaagttaccacagtcacttcagtgagaacaacttggttgttacttttatatgaatgctaaaaatattaccttccttttctctctgcactttgatcctcctggttctaaaatctgaattttctttttaacagaaatggtaagtgaaaattaactcagtgttacatatcaaatcacctgaagggtaatttcctatgtaatacataaaaagacaggaatgatttttatgggatataaaataattcagaaccctagtcacaaaatctgtggaagcctattcaattatgcgcagttatcatatttaattaacctggatcccggtaagaaaaatgttcaagtccttccttgtaaatgcaaaagcttagtttcaactacagtatttataatatagtgttatatttaattataataattggcagtattacgtccaaatgtaattttctacttataattatccctggcagtttaaaacctagaaactctaaaaatttttatgggcaacattttaaattataacattgcattttctaatgacacaccatccccaaattgttcaacattgcatcctctgttttactttccgattcctccttagcagttttctcttcaattttctccatcactatggttacacctctagggaggggagagaagcggctgcagctcagaccccctctggtggcctgggctccattgccatctctccctgcctcctcccctcagctggttcctcctgcccgggaacatctctggatggggcacaatgtctgctctcatttaggggttttggtctctgttccaaagtcctgattcaagagcttgcgggtaactgctattgaaatgattctttgccttcaaaactcaaatgatcactgaaaattccacagttttctttgtgagtcatgtcccctggtaatgatgatgactgtggtcatcacccagtctcactctatggctctcacatagcagtgtctgctacccggaaaccatctctgcacattcattcttacagccagaccaagcctggaccgcctctttgcaggaggcagttgccacaaccttggtcaagtgttttgttattttcatgtcagcgaaccatgctttgggctgctttccccacacttggcataatcaggatcccactccccatggcaacaaaatggacttgaggcagcgtggattatatctaccacctggcggccctgccacagttgagcatggataggcccaacctggccaggtggggattattacaggttttgactacctgggctaaagtctcttgagtgaagcaacagatacagtcgactgcctttcggttgccctatgctggagaagtgcccacagttgtttattaaagggggcaaggaggatgttctccttcgcagcagagttctaactttcctgagcatcgctagtggatgccgtgtgtcccatcgtgacacagcaaggctttctgtctgcaagggaaaacccctaaaggagagaatctcagttggaaccatttgtcactgcctgtttctttgaggactgccaacttttctaccatttgctgttgtttttattagaaaacaaagtgtgtatttactgtatgattatgtgttttcttttgtcttttgtgtaggctgatatccccaataggtttgaaatgaaacttcacagaaataacatatttgaagagtcctatcggagaattatgtccgtgaaaagaccagatgtcctaaaagctagactgtggattgagtttgaatcagagaaaggtcttgactatgggggtgtggccagagaatggttcttcttactgtccaaagagatgttcaacccctactacggcctctttgagtactctgccacgtaagtatatggccacacccagtgtgtgtcccccactgagacagttgtatgaatttaaacagaatgaaaggataagcagctcatgagttcgagatgcattaactctgctgagtttgttctctcctcaccccacagccccttgcaagtctagaacaggttctgactctacgtggtgaaatagtgtactctgcgaacatctaacattgattttttttcttgtctattgggttcatggagttgaaattgaaaacgtggataattatgataaggaacaggaggcgattttcatttgcagtgttcaagaggaggacttgtcagtgttagaattcaaaaacaaaggaggtgttttttgaacaagagtcgtttctgaggtctcctgtgtaaaggcaaattgtaaggactttgaggacctaggaccatgccctgctcctgtaaggaaagaaccaggtttccccttgcattaggatttcatcattgccaggcttggaaactgaggcagactaaattgctttctgagcaattaaacatcagctacttccaggccagccattcctccttcagactctgaatcctccaagggttgggcagtacccaagcccccagtagaatagtcattgaccttgctgaagggcatttgtcatcactccagccctgggctctaaggggacgtgggttcccccacatctcccacctggtaccagtctcctgggggctcatttggaaggccgcctcagtacattcttcctggttgctctagccaagaattgcccaattgatttgttgttactgagtcccatgagaaagcccactatgtacaatgtatccaactattgaaggtggagggcagggtggagagagacaagatctttacctcttctccacattttcaaagatacccccaccccggaggaatcagtctgtgatcccagtttgaaaactactgatccacatgattgtgaaccaagcaagatcatttggacaaatctaaaaatttgcaggtttgcatcattgagagagccatatcctgttcctaatcccctcgaggccttttcagagcagagtagtggtcagaagacagaccaagggttgggcccatagcaaacatcttatggccaagccaaaagcctctggaaggaattaaacttccttcatcacagagacgacctaaagtactcacatctttgggaatccctgcacagcccctttattatgtggcgtttctcatctccccaagatatttggctgaaccatatgaaatagacacttcgtaggtcaaaaacagtcaaacatcagcgtctcttatggtttaattgactttagagggcacatgcgtcagcctccatggtgggtcacggttgagcatgtggtaagtcaggtcctctagcccacacattttcccactaggtacagaatgctcgcagggacactgtaaaagttgagtgacaggtggcaaacaaatatgcaaaatcttgcatttgaaagtgtgattgggcttttcttctctttctcctcaaaagggacaactacacccttcagatcaaccctaattcaggcctctgtaatgaggatcatttgtcctacttcacttttattggaagagttgctggtctggccgtatttcatgggaagctcttagatggtaagtcttgaagtaataaaaataggtcagtgctgcttgcggtttgctagtaggtgtcttatctttcgcatcatgggtttttaagcaaaagcttcactggtttactcataaagtatttttatgttttgcccataatggatgtccttttctctggtagcttattttgggcactgaagacatagtgtctacacacagttaaaaacaaaagtttttttttaacttcagtgtaaaacacagaacattatgtatttatacatttgtatgttttctggaataactttagtgaaagcaagatttgataacagatggaaaaactaattgaaaagttaattaaaatgatctcatctatctaatatcctgtgattattgcgtttgtccccaaattattttttaatttgaagggactaaataatttcaaaataatgttactgcttagctaagacattaaccctgaaacaaataacacaaaataatttcattcttatttaaagcatatagatcatggaagaatttcaaggtaccttgaaagttagaagtcaaaccctctacctggcggtatctataggcttagagacttctaaaagatttggccaattcaaaatagtgtccttaagaaaacactacagaaatcatcagtgagaaaaaagcatcagaaatactttttaagagcctggaggtagagtggttgaggatgggaagagggagagtaggatttgagattgacattgcagtaacttataagaaagatatttccaagggaactgtgttcattgcatttatagagccttagctattctaataaataatttgtataccctctgtacttttcccatgaatatgtttttactgttaattggtagctgatattgatgctctgattttgttgctttatttggtagcagggcgacagtaaacactttttttcctctagaaggaaactaaaccacacactctttccatgtatgtatagtgtgaatatattttaatttccagctttggagtcatgccatagattgtttcagcctgctccaattcactccaactttctcagaaggtcagtttagtcaccgtatgcaagtgagaagatgctgttagttgctacagtgtctttaataccctctctaacagggggtaatagagaagcataagatatgatcctgaccttagtcagcttatattttagcggggggaaaagagatgagaacaaaaccagaagaatcacagtgatagtgtctgagcagaagggagtgcattgagtcctcagaggagaaagtgacttggctggaggctcagggaatctttcccaggatgagctgcacctcggaggtggggtagcatttgagcgttcaaaggctggggtcatttcagatgagtgaggaccagcccagagtcaaggccttgtggaagaagatgggcggaagcaggaaccactcagggtctcaaggagctggctaaagtgaccccgacaagagtgatcacgatataaacctggaattgcacatttaagagtccaagtgcacatagatgggcctagtcagcagtgtcttcaaatttcccacagatgggaatgtccctgtcggcagggctcattctgcacatctgtccgatgggaatgtccctgtcggcagggctcattctgcacatctgtccgctgctccccctggtcggcttcatgcttttacttccccagacactggagtctattggagcctgcatagggccacgctgagccggggagaattggcctgtactgcagagggtgggtgcctggtggggggatgaaggagcagaagcaggagcctggggtgccaggtctggtggggtcaggaccccctgtgaggaggtgcgtgatgcctttggatcaggtgaaatggaggcacctgcaggacgcctgaatggtgggaggccgacctcgctgctgttgcctccctgaggcctctgccgtccctccgcggggggttgcacaggccctctccggggccttccccatttccagcctgtccccttcctgtgctttctccccatcgctgcccaagcaatgataacagaagacagatggaatttcacctggcctttcactgactccccactgccctcagagagcaccccaactctccagcaccccatgtgggctctgcactgccggccccttctctggcctgtctacccgccctggcaaacggctggcaagtccccagccttgttcctctgcttagtgtgcccttttctcccccaattcctacgcctgatttgcactgcggactctgcttgaccttgaagctcatctgtcacctcccagaggcctttctggccccactctgctgcgccatctctcttagcacagctgccctcctcatgccactctccccctgatctcgcctcctcgcttgtgcaatactgtagaaggcccttggttactccttcatggtttctcatttacattgaaagcaggttaatcttttctttcatgctctgatacatagcagtgtcaaagacctgaaactaaacccagtgtttaccgtgttttaggtttcttcattagaccattttacaagatgatgttgggaaagcagataaccctgaatgacatggaatctgtggtaagtaaatgcacgtcacacactggccatcaccgggcactcgtgtcttatgagaaggtattggagagccatatttgtagtctcagccacttttatgggtgttgcattccatgtgaacaacaggagacatttaattgcttgaaaagttcattgatctaattcttgtaataaatcattgttcacatttcctggaaccatggtacctagggtggatacatccaaatcccagttgcctctgcttacccggcataggacttgtgtgaacttactaaatccaagagacagctgaagatctatggtagcctgtgttttctataaaaactgctgctgctgaatgtttagagcttcatccgctctccctctgtttcctgacatcataaaaatggcagaggcaaaggtcaaaacaataggaagagtatcaggcagacgtcctagacatggatgagtgacgccacagctcaggcaagtgaacacttgagacgttctccaagtagtgatttgggttttcatgttgcatttaacattaattttacctagacagaccattttagagttggaaggattttattttttttttattttttttattttttgagatgatgtcttgctctttcacccaggctagagtgcagtggcgcgatcttggctcacttccgccttgcggattctagcaattcccctgcctcagcctctcagatagctgggattacaggcacacgccaccatgcctggctaattttttttttttttttttttttttgtattttagtagaaacgaggtttcgctatgttggccaggatggtctcgatctcctgacctcatgatcctcttgcctcatcctcccaaagtgctgggattacaggtgtgagccaccgcacccagcacggatttgctataaaacaaaaattgatgttctttttataatatacttctgcttctgtttttcttttaatgtacctataccccacatctacctccagagtgtatgggtgtttgcccacacgccagcacacacacagggccactgggaagcgcgtttgtccatttggggtatttgcagctcattcgtgtttgctcacttgagttaaaaagcccctgcatgatgtcacctgcctgtgataccaactgtattttgggcacggttgggtagatgagctgtgtcctcggccctgaccagcgctgactcagtgtttctgttgctcctcattgtatgaaaggagaggaagaggccagcagtgcccttgaacccactgctggtttgccagtcatggtgggttgggatgcacacctgtgattccggtctccactttgaccctgtgtttgtgctttctgctttcatcactgtatgatgaagcagctaggagcacaggaatttctcttaacgtctaactttataccacatgctgacagttagtgcctaaagtacagtgcgtgtattatttttaccctcttcacagcccgtcgtgtccccagcaggagagaccgtggagggaccagggacaggcgcttaggcctgtgactgatcctctggattctgaaaccagagcagccaccctttttgctgacattaacctggagagtgatcaaagcacaagaaaggggataacttaaaactattggtatttacttagttggaacattattttacttatttatttttttggcgatagaatcttattctgtttgccaggctggagtacagtggcacaaccatagttcactgcagcctctatcccctggcacaagtgatcctcctgtctcagcctcccaagtagctaggaccacaggcacacaccaccatgcctagctaatttctttttttttttttgtagtcatggcgtcttgctatgctgcttaggctggtcttgaacagcctcaagccctcctcctgcctcagcctcccaaagccgaggattacaggattataggcatgagccagcaagcccagtctagaacattctttatccttcctgttttcctcagatactttcactctttttttaaactttatttattttttatagagacagggtctcactatgttgcccaggctggtctctaactcctgggctcaagtgatcctcccaccttggcctcccaaagtgctggaattacagcgatgatattttcactctaaaaagatagaaagtatattgaccagcctggccaacatggcgaaaccccgtctctactaaaaatacaaaagtcagccaggtgtgatgtcacacgcccgtaatcctagctactcaggaggctgaggcgggagagtcactagaacccgggaggcaaagattgcagtgagccaaggtcatgccattgcactccagcctgggtgacaagagcgaaactccatctcaaaaacaaaaaaaaaaaaaaaaagagagagagaaaagaaagtatacttatgtctgtatgttaaattttgtagaccagtatggcagctccatccaccatccagagtaggtgccttccactgtgcatcactaaggacaggatttaactgcaagctcattacaactaaagcagtttgtttgtttatagtttaaagaggaaggtttggtttaggtggagcaggaaacattgcattagtaacatatttcttgagcattctgcacagaattacattagaatgtaattaaagaagtcaaatgagtttgtattttggggaaaaaatgctgaattttcactcctgtgtcattctgtaggatagtgaatattacaactctttgaaatggatcctggagaatgaccctactgagctggacctcatgttctgcatagacgaagaaaactttggacaggtacatgtgggtaaccctgggaactcttctttagctttcaaggggcatttttcttcttgacgggctgtaacacaactttgctggaccatcagaaacaaccagcaggagctgcaggtgttaattttcatctcattgtagcagcacctttttgtcatgccaagacgccacactccaattacaaccatttctctcttccagcaaagttacagaaattccaagaggccttggggcatgaaccagcacctcttctaatccaaagcaaatgtgaatgtttcatttgtgcctcggttttagaatttaggtacttgaaaaaatagtgagattgttgacttagcgatgtaaatacatgaccaggagtgggtgatgttggaagggccattggtttttctctctgttttatggttctgttgtcatggcgacatttgtcttgtgaggctcagcatggcaggctccggtttttctaccattccctctgctttgcccccacgctgttattcaggctggactaatcctcaaagtcagtttcagactggtcagcagggatttggatgggccactgaaagtggatttcaaaggtaaagttgcctgcttggaataattctcatcatgctaaggatctatgcgatgtatttgtctcaattctgaagcctttgcttcatctgccactcagtaataatgatgcagcttgggaggtgttctcaatgtattctctgaccctggtacctgtccttccgcaaaagcccagaggtatttcccatccttcagactaaatctccacggctatgaaattaattagaccatagaactcattgtaatggttgccctctgaaaaatgaaatagacgtgttctttattgctagatgtcaaagattgctagagaatctttgagaaaagaagctgatgccactagaggatttaatgacaactgagggtaaaaattgttggataagaaaataatcacattaatatcagaatcacttgttattcccatgtcctgtgtttgagccaggagagttcagtctctagtgtgagtcctggtgtgggtggaacctggggagtccatagggcccttcagtggctaggcaaggctcagagaaggacttcaggcaccagaggcaagagaccttgtggcttaatgtaaatgatcaagtcctttaaaaatctccttttgtgccccctccccactgcccccctttcccggcctcctccccaccccactgtgttgtgctttatgcctgagaatccttacagacaggcggacactgttctcctgcacggggaccttgtgatggggcagggaggggtcttttcagctgctgcccctctggtctccagcagcctccccaggaccgagagtactggtgtctccagccctgtctacctccttcctctgctgcctttgacacaaatagctcactccccccagagacacctgcaaggcacagtgcctttcactccgggctctcacccctccccactggtctccagtcccctggaagtgcatgctcctctgctggccctgtggatgcaggtgtcaccctgccagctgtcctgcacccgctgcttttttgtctcacccttgctatctggatttcctcatcctacctgtggctccggctgcacccatctccgctcaccaccagcctcttatctcaggccggcgtctgccttccagcctccagaattcccaggtctaacggcctcctcaactgcttctcctgagaggctcacgggtcccagtgctaaagccactttttcctccccagcccccacatcggttatggtctcatcagtgccaccactgtcccctcccacctgacacttgggcatcccctcagaatctccctctctcctcatgccatctcccctcctcatgccatctccccgtgcccaggcttgctgtgccccgtgactccccgtccttggcacgtccctgtctgtgcactcccctagccctgctccgatcacttcttgactgctgttctcacagcctcctgtcggccgccccctttcctgctttgctgttctccagtgccctgttctctagtgcctaccctgttctccagtgccctgttctccagtgcccgcctagctgtgagccccttatggactatttctgaaatgcagccctgaaaatgtccttcttctacttggccatcttgtgaccttcagcataaatgaaaactgttagcatggcatatgacccctcataatccagacctacccccctctggcattaccctctgacacctccttcctgtcaacctgtcaacaaacagtgtgccttcaagggtttccccagagatgcttcagtgccacattgctggctcgacactgcccactctgtaccgatgcattctcattctctctcccatcacctctttccctgccatcctcgaggtattgactgacgtgctgtgtgctgtatgccccctgaggtcttctgggtctctccagggctcagcatgtagttgatgcctgccagtgctcattgagcaaacgaatgaggagtgctaacctggcttattaaaaatatgaataaggtggtaagtaatagaaatcctaagtgtgagaaaacaaaatcagtcaagtcttggtggctttttttaaaaagccggacctattgaagggtcttaaactgccaattttcaaacgattagacatggttagtcaccctggaagtatcttcctttcatttttaacatatgaaggaaggagtggaagtaaagaaccaaggaagactgaaagtcagtcttgtgtgtcacatgcattaaaaaagtcttttcgtagattcattcatagaaaaccatatgaccaaattaacccaattcagaaaactattaagccacaatcagaagcaaatgatctgggaaaccttcctaattacatttaaatgtaattgtttccacctcataaatgaaagtcaaacacagggtgttggagtttttaagcaggcctctaataaatcttctgatgatcgttcaggccagattttcattaaaaacagttctcagacctcctcgtttaatgttgtgaattcttctgacttttgggtaggatcaagtagagtaatgcattaatcaaaacagacccatgagatgagtaagataagaattaggtgcccagtttgttgaattactgccttgcctttttgagagagctatcctgattaacagggaactcacgtatttattttgcactctgggaaggaatttagagcaagttaaatagctgcatatggatctcatctcccatatccagtccatcagcgagttgttcacacacctcccaaacctttctcatttctgtgcattctgccgatctcttctctcactcacacccaagtccaagctcccatcttccccactagacccccgacccgtctctacatccaatatggcttcttataatggcagagtggtctttttggaatataaaaatgagcatgtcattcctctgccagaaaccttcaggggtctcccctgcccttgagataaagaccccaaccttactttgtcccacaaggtcctgcgtggcctggctctccctgctcctcctccagactcactgtgaatcacaggccccactgggcttgtccaacacaagccccttcctgcctcaggccctctgctttctcttccatctgttgggagcatactccctcccagtctcagttcaggtgtcccttcatcagggaagccagcccttgacccagaccctatgcatcttccatgcctgccctgtggcatgtaccacagacgactttgcatttgtctgagtatgtttgtgtttagtgcctgtctctcctgctcagcttcctcccgatgatggcagccgcatgcctgccctgtgctcactcactgtcgtgtacttcccacaagcactttgcctggtgcatggtgggtacttgtagttgttgatgtggaaatctaggtgttagcatgatgcccggacaagcctctcacctctttggccctctgcaaaactgttgactctgacccagaagaaagcccattcctccccaatgccaaacagtcaagtcacttccacagtggggcaaagcaagtgcagttgtcatggggtgaaacagacatgcagtcagccttccacggtgtttcaaccttctttttttttaatttcacagttagaaatatcagaccatgaagtttggtagctgttccttcatgtaatgaagctgcagctgttgccattattttgcaatttgttttctttctgattggtaagaatctggggctgctggtttctagggcctaatatgaaagtttccactgaagaaatgtcagtgtttgaactatgatcctgtgccaagcaggaagaataagccgtacccccattcactgctgtgcacacatacctgcccccaccgggaggaggggcccttttagggctgtaacaagtgaaaattctttattgcaagttcagcagagcaacgtctaatttggttatgggtttgtttgtttgtttgttttttgagacagagtctcgctctgtcacccaggctggagtgcagtggcagaatatcggctcactgcaacctctgcctcctactttcaagcaattctcaatgcctcagcctgctgagtagctgagactacaggtgcaagccaccatgcccagctaatttttgtatttttagtggagacaggacttcatcatattgcccaggctggtctcgaactcctggcctcaagtgatctgcccacctcagcctcccgaagtgctgggcttacaggtgtgagccaccgtgcttggcctgatttgattgttttgaagagctgccagaagtttcaagaggctgtgcagtagttggagggagaccatgggcagcagccatataggaaggttctttaggatcgggtcgagccagtctccataggaatgattacccaaagggaacaaggaggacatcatctcagacattgaagtggttagtggccctcccagaagccacagcacattccacaggtgtactgtggatctctctgttaagatttcatggagagaggtgggccactggcagaaagaatctaaaaaggctctttagggggtgataatgaattaaaaggtagagaaacacttgggggaaggcagtgagtgaaaaggcagaaatggtcaatgagggagagggcagagcatgtcctggcggaagccaggagccagacgaagagcccggagctggaggtggctcccaggagcgctgaggccccggccccttcaggccagtcagggacacagaggggtggcacctggggagacgggaagtgggaaggctggcatggacttgctgcctccctgctgtcggtagttgcgctgctggagaggctggggaggatgaggaaggcctggttggtggagtgatgggggtgcagggtgctgactgcccccgaggccgtgccctgcaggatttgtgagcacccatcagtgggcgtttgcccagcagtgctccgtttccaagaatggagtctgacaagcagataagccttgctccacccaagtccagcatattccatatgagccaagctgtttctcagcagcttcccaggcagcgcaaagcatttatggagggtcagggagatgtgtgggaatcgggttgttaactggccaaggcagggagtcccccagaagttcctctgatctctgtgaggaagagagccaagtttatgctggggccagtagacttaaagaggaatttttctactgcagtgttctcccacgagctcttgctgagcgcctgctgtggctgggcattgtgttccttgtgtggggtcctccaggagcccaggcacaggagggcgatggcccagaaagccctgggagggcggggtgtgcgtttcgtggctgaaggtggcaagaatccaccccacagagcaggctctgcagactgctcaccagggagcagggcccctgggtgccagcaccagctccatctgcagttcgctgtttctccttggtcactttgctggatttctgcctccgggatgctgtccaccctcatgacgggggccagggcgctgccgcagcacctataggagatgcgcagggcagagagcagcccctgtgtgacgctgccccgatttctcccacttagggttgacactgtcacggtaccacccggtgttcagtgctgaggacatacagtccctcccctcctgtggtggcaacagctgatgttaagaagggacaaatttgggcgaaaggagaacacaggctgtagttagagtgatggtgagacaggaatgaaggcccgcagggaatctgtgtgcctggaggcgagcattagagtcagatagccgcctctccaacccccatggagcctcgtgcccaaccagcaaggactctggggcatcggccagtggcagtaagccagtgtggtgggctggacaatatgcctgcactgcaggagacggtgtcacgatcagcccccgacagccggtctcaaaagtggaatttgaagagtggtcattgcttctcatgaaagtgtcgccgtaactcatgaaagtgtcacctgtaacgaatcctagagggatgcatttctgtaccacggagggctcgagccgagacaccgagatctgggggcgtgacccctaacctagtagcttagggagcagaattacaaacccctcatcctgtgcccatccttgggccctctcctcactcccccacagagaaacccagggtcagaatcaaccatgagacttgacggctgcccacaggatgatttactgctgtgacctcatttagcatgggttagtgtgggcccattttttcttttctttcaaaaattatttatttatctaattataaaatattaacctccataataaaaataaagccagtataataaaaatatgtaaaataaataaatgtcacttattcccagtatctcaagaaaactcaggattaaaatttttatttacattttccagaattattctctgtaagcacaaaacagatttttttttttacagaagtggaattgtactctgcatactgttttcttttttattttatttatttatttatttatttatttatttatttattttgagatggagtctcgctctgttgcccaggctggagtgcaatggcatgatctcggctcagtgcaacctcagccccctgggttcaagcgattctcctgcccaagcctcctgagtagctgggattacaggcgtgagccaccactcccagctaatttttgtatttttagtagagatgggttttaccatgttggccaggctggtctcgaactcctgacctcgtgatctgcccacctcggcctcccaaattttttttattatactttaagttctgggatacatgtgcagaatgtgcaggtttgttacataggtatacacatgccatcgtggtttgctgcacccatcaacccatcatctacattaggtatttttcttaatgctatccctcccctagccctccaccccatgacaggccccggtgtgtgatgttcccctccctgtgtccatgagttctcatcgtttaactcccacttatgagtgaagctggaaaccatcattttcagcaaactaacacagaaacagaaaacagttttcaaattaatatatcacacataccttttcatgtcactgaatatcagtctataacattctaatgactgtgctgaattttactttgtagacgtgccatatatttttaaccatgccctgttggtagacgtttaggctattttagtattttctatataaacatataattctgtataaccctggaatactcacatatatacataatatatatagcatacaaatgtataatctggaatatacattttgtgtacttgactaatttttttccattgctataaactccaaaagagaaattactgtgagaagggatatataattttaaaattgtgatgcctattgccaaattataatatcttcagaaaaagattgaaccaattagactcccacccacagtgaaggggagaaccagttctctgcactcagcaacactggcttattttctctctcatccctgggcgctgcttttggaggaagcagagtgttttcctccttagccctcccctccccactttgtctgtggccgacccgctcattcagtagctctctggaaattacaactttcaggcaacaccaaagaaggctctgtgatcaaagagagagggctggatgaatgctggaaggagtgtattacagggattgtggatgcttatctacttgacctccttccccttccctgtgcgaggggaaagggtgggaggaaagattcggcttgagtgtagccgagctgtaccgaaagccttctcgataccaatgcctgggctgggatttattaacttgtcattgacgtggatctgataagaaaactcttaccgaaggaacaacaaggcagtctggggaggaataaatggggaaaagaagaaaagccaacctgggtttattaacacatagaacaaaaggtatggatgagcactgtccacgcacctctgagaaccagccacgaactggcagagtttcactgtagaaacatccccaccccacccccaagtggaagctgtttggcatcctccatccccaacacggcctgtacggggcaggagcagatgacccctgggagaaaatgggatgcactgggaagatggcagctagaaagggaaatggagaaatgaaggatgtcagcaaaaccggaaacgcagcaaagggattaaaattcacattgggcacagtgaagagttcagttgactttgcagaaatggaaagcatagtggaaaaatgagattccttcctgaataaagagaaaaagagaatgtcgagggaccggatggatgatgaatgtgttttacgttgaaaagccatctcagtgtgaatgggaacaagagccagtgcgtggagaagccgcatgagagacccaggtgtgagtgctcgggtcagaggggctcaggatctcctgggtgcaggtggcaggaccaaggaacccctggaggtggcctctgccagggcatagagttcatcacaacatggaacctccatccctcctgggtaccaccctaacacttactttggaaaaccctctcccctggcttggtttactctataatgcaaccagcaggcagaggaaaaaagatttagagggaaccccaccaaaatagtggcatggctttctttcagtaggagaggtgtaggtgctatatttttccaccttttttccccaaaatttctacaatgagaaaaaaacattttattttaaaatagtaggcctctctcccttccctcacgctggttactgtgctatgtggccttatggtaagctaggtctgggtcagggcataggagaaagggctgccctgattgcagctgcttttttcatgatcatgggtggtgctaagggaggaagcttcagggcagatgagtgaggagaaggcgtccaatgcaaataaatgccttcaaaaaccagataaatctgtctcttcagcctggatccttaagcttctttcttgtctttaagtttctgtttgcatttttgaaagaaataccatgcatcctttttttatgactagaaaatataattttcagaaacagaatgcattagaatttggatttctggagtcttgatgggtgtaccctgttcttttctctgttaaacataattagtttcctgataaatgaatagcagaggaaaaaatgttgctcttcattattgctaatatatgaagaataattaaaagtcataaataaccataaaacaatttgcctttaatgatagcatctttaactgtgtaacatcctagcaaaaaagcctcattggacattctcttgtgcacagagcccatttgccgggaaatatttctgaatacatgttgtcttccctttatagtaagacattgtcactcaataataatatgcaagataacttcgtgatagtaattgttgttttgtctttgtaattacagacatatcaagtggatttgaagcccaatgggtcagaaataatggtcacaaatgaaaacaaaagggaatatatcgagtatgtatacacatatttactgccttttctttgaataattgaaatgcatgtttggtcactgtcccttgctgaaacagctcatgcatttattatgggcatgagtttattggtcagttttcaacaaggtaagttcttttctggcttgggctaatgggaagttgaatatgggatggaaagtctgtcttgtatcatgactccattgagctgccctataaaggagcagaggagggagaaaaggtctatattattgagtaatacggcaaatactcttttggaatatgtggatatcaactaagatttagaattgcaacggagaaccacggtgtcagtgaccagcagggcaaaattaggaaccaacaaagaaaaaatattttgtctctctcccaacttcttttccataatagaaatgtatagaaatagttaaaatggataggaagaattcagcatgtgcaaccctaaggaattctttctggtatttgtaatattcttaactcaacttcagcctcagtggaacaaaatgttgagtctttttggaagtctagctgttaagtgattctaagacatttgtaccaggcagaagtttttctctgttgggcacgttacgttttcttttttagtgtatatgtgtgcttcaaatgcataactctgggatcttccaaggagatcccctggtgcaggggtgaggtgagcactgcagtgtgtggttcctggcacctggtttctgctctcttgtgggtcgccacagtggccctgagttcctcgtttgcattcagtgcttcgtttcaacaggctaggctccctcctttcttctcatttggaattggtcagaggtcttgaaatcagacagctcttgcattgactgtgggtcttagcacctttcagtgtgatctgcaaagaaaaacctactgtccttcctaattaggaagaaacggagcgtgttagagtctctactcagagatcctggcaaggagtggaactattacatggcggactcttttcactctcaagttgaaagcttgttatgctgaatacatagactagaaataaggtacctcggttcttacctggccacattaattggcactctcgttctgaatatgaacaatcttagctgatgacatcctggcagacaccattgtcttccttcagaaagtacagactgtgagtggggtttaaaaaatattctagctcagggtgacccaggtctcaagtctgaggactctgacatgcgtggtatgtgtcttgcatcattctttgcagttaattcttttagggttcaaacgtggtgggagtcagggccaggcagggttccagctagctttacttttaaaagtataattgaaatcaccaactgctccctgatacctctgctcccctggtgccagaagaatgctgttgagctgttcattgtagcccaggaggtgccacctgagaggccgcacagtggttgtgctgcaggctggtcctcagggccattaccatggttacagtgtaccaccccgaaggtgagaacccttcagaatgatggaatgcctgagatgacatccagagtacatttgccttgcgatcagttttgctgtgcattaaacactgtcgcagggaacttggttttggtgaacttcagttgcataaggaggtcttaccattcatcctctaaattttggcattaaattatgagtgcaaatcattttgctgataaagcttatatgttattgttgaatattagcacattggatactagaatgaaatattagataactaaatgcattgtcctgagtacactttacaaatatgtatacatatatgtgggtgtgtatacgggtgtgtgcatcttatacatgtatacctgtgtgttcataccccatgaacttttcccttttctccatgttgtcacattttaaagcagttaaagcatttaaagcattttaaagcagttaagcatttaaagcagtttaggtcagccaaaccttgatgtgggggaagttaattactcttttgaaatctccagtgagattttaggtttttcacgggtgttccagggagtcttgaaagaagccatgaataaactaaacagtgggggcacagaggagaccctcccctctgctctgctgtcgtggatggaggagaagcactccctgttgcggagaaagcagtgagcactagtgatgatggaggtggttcaatattgtcctcttttctcctgcagcttagtcatccagtggagatttgtgaacagggtccagaagcagatgaacgccttcttggaggtaagccatgctggccagggttctctgccatgtgcctctggtcccgggtcgatgggggatcgcgcttctcctttagctagtgtggtggagctgatcagagacagaggcgaggctggggaccctgcaggaagaccgggatcgcacagctcacaccgctggccagtctccagcacaagagtgttcagccaccgtgccgccacctccttttccttttcacgggttctcctgcttgacttctcttatttttacatttgtcctgtttttaaagaggacgttttacagacttgatctagaaccattgtcttggagtttcaggcggtacccaagagaaggctgccttttgctgcagtgacaggttccaagaagcccgagggctcagagctgaatgatgaagcgcagtccccaaagtgcctggccacccctccctccctggatcactgctgcctgggcttgattgattgattgattgattgattgattgattttgagagagattctcactgtcacccaggctggagtacagtggtgcgatctcggctcactgcagcctctgcctcccgggttcaagcaattctcctgcctcagcctcccaagtagctgggactacaggcacgcgccaccacacccagctaatttttgtatttttagtagagacggggtttcaccatgttggccaggatggtcttgatctcctgacctcatgatccacccgccccggcctcccaaagtgctgggattacaggcatgagccgccgcgcccagccatggacatttttttttaatcccctgccctttttctttgtggcataattcattgcaggttctcttctatacagatacatggaaaacacattttcttaagctgagtttttatttattttatacccagccacctcatgacagcttttaccctgttacagagcaaagtgggcactgcccagatcgaacttttaatatcagggatgctcccaggcccctagcagtgggtgagggattcatcattttaaacagtattccacttggaccaaaagcaaaattctttcttaaatatgatatagtattagttacctcaaagatcacacaggaaacagcctcgtgtccacgtgactgattttctctgcactgaggcagagctctcgtggggtgatgctttcccttcactcaggtacctacacaggatgcgtgaaagcccgggcagcacactcagaaacagctcggggccttagggacttaaaatgggaggacagaatggcaggtttcactctttatttagataagaaatcccaggaagcagattcctgggccccaccgcaggcggtccacaccttcagaaacgcggcgttcgcagcgcgcagggcccagcagagctgagctcatcctagatcacgccacagttagtggtacctgggaactggagcatggttttctgtacgcacagtgtctgcacccatcacctgcctccctctgtgtttcttctccctgcctccagcacgttatttttaagcgtgtctcttacacatctgtagcctgtgcatcttaggacgcactgactcacagcagtgttataaatggcttttggaatccaccctgcctacagtatcccatattttcatcaggtttcagaaattactccactacttgaatcttctagattctatgctttttcgaaactgttatattgtgactgtgctgtttttactggaactatagttacttgatactgtcactgacataggaatcatcaggagagattatatttttttctggctaaccagaaaagtttgtttttcctgtgaaattttttttttttgaaggcaataggtgtttaagatgttttttttttttctttcagggattcacagaactacttcctattgatttgattaaaatttttgatgaaaatgagctggaggtttgtattataaacattattttatgtaaagtggattttttaaagtatctctcattactttacaagtaatattttaatattcttggatccataatgtcctagagagtaactttagatgaattatattacatgtctcttatagggcttatttgccaatgtggttctattacatgtctcttatggggcttgtttgccaatgtaggagtaaggaacagcaaaaataatcagctgtagttgccttgtccatcagagggcagttctggaacatgcctagtaagtagaggccactgagcagagctgggatcatggccctatgcaccaggcgaggcaaattgccacaacaagtagaaacaaggtttgcagtagccctctggacagcagaaacctgcttacactaccagactggccaagtatcctctgctgcatccccatccacccccaccgtggcagccaaatgggggtcttggccacaaggtggccgtaagcatctacttgggcctgtagaacgacgtctcattgaacttgaagtggtttatgttgagtgaggaaaaatgtcagaaggcaacagggttgtagcaaaaggtagtttagtgattgtctagttcagcttcttggtgttgacatagttgagtaacagccattttaaaaacaaaggaatatctcgccctttgttgtgtcgagagaaacaggggaaagactgtctgttgagaagccgttggtgggactcggccatttgccccgtccatagccagtgagtgtttcccatacactggccttctatacttttatctcaaaacagaaagttcaagatcgatgatgtctatagaaatcatatacctcaagcctttcctctgataggtgggaaactgaggcagagagcagctgggtttacccagcaaggttttggcacggtcaggcctaggaactttatttccaggcttctggcttagttctgtttccatttcattctggtacctttgcataaatatcttccatttgtccacaggaaacctcccctgatggagagttgcataataggaacggcaaaccttagactaaatgctaagtcgaagacccagttgtgccttagcgtatgtctgccattcttaggcctctgggcagatgaggtgatttgtcatcactggaattgatcaacctggaggagagtcataagcactaattcttttgtgggtagggagatgcttttagatattcagaggaataacctctcaggaggagaagcagccagggtaatgcacagatgctgctggagcgtgagagaatccacaggtcccatgcgtaagactagaggggtagggaggacgactgtggcatttttatatccgatacgacatgccgtggcttgcgcaaggttcgaattgagctgccctcgtgactgctgcctctgtgatctgctatggcaggtggagcctggaacaggtgtctgccttcctctgttgttatgatttgctagcttaccttcgcggcacagtgaccacatgctggcactgagggtggtcatttctcagtgtgtgatctcgcacctttcacatcctgcttttacatctggtaaattttcttcctagttgctcatgtgcggcctcggtgatgtggatgtgaatgactggagacagcattctatttacaagaacggctactgcccaaaccaccccgtcattcagtggttctggaaggtaactccggggcccagccccagccggtgtcctccacctgaggcaggattgagggctgtgtggcgccctccattgtggtctgacttcaggactgatgctggctttggggtctgttagagcttggactgctgggggagggaagaggcaaactgagccagcagccccgtggtggctcctctgtaactgtagcagacagctagacttgaatgaagttggtccctacaaaagcacactggccttccttgaccacctcgtgaaagtgacttttatttgagggactggtcctccaatgcgtaaatagaaatggggggcttctcagggcagaaacaggcttcagggatggctttgcaagatgccactttctgttaagaagtcgttttctcaatttttaaaatatattccaacaaatattttgatctgtgtatctttcaaccaaagataacacaacatttgatttattatcttagggccactgtttgtatcctgttcagcttaggagggaagtaaaataggaatgggttagtccaaaggagatatagtaaacaaacttaaaaaaaaaaaaacagttatcccccaaaaaggctgattatttacttcaccccaaaaaggaatcatttaactttttcaaatttatttttatttatttatttatttattttaaagatggggtctcactgtgttgcccaggctggattcaaattcttgggcttaagcaatcctcctacctcggcccctcaaagtgctgggattacaggcatgagccaccatgcccggcctttttcacatttctaaatgccttttattactatttcaaatgccagcaggaatacagagataaaaaagcaaaatcttcaaagcctagtccaggtctcacttggcttgttttagatgtttgcctacagcagtccaagtggcattaccagtaaagccacctggattcccataataatgcagatatgtaagatacacagattattttagaaccccatctttgcctttgttgttttgtttttgttttgttttgttttgtttcattttataaaatgatgtcttctagggaacgtgtctacaatctgaaatcccatctcataacctggcttccccttgtgatgacaaatcttaaatactgtatatttataattggcttagggggaactggtaagcctcgaacacagaaacatgagcttggtgccatcagagagtttgctttttatatcatttattttggcctattggcagaagaagaaagagacggacattgtgatcactcagtctcttagattagagaggccagctagtattgtggccataaaaaacctactcagttttcagagtcaactgtctaggtcttacattgcaatataaataagattaagttctgcctgcctgcatgacagcagcatgtgccatgggtcacgtggggggtataatgaccttctgcctctgttcataggctgtgctactcatggacgccgaaaagcgtatccggttactgcagtttgtcacagggacatcgcgagtacctatgaatggatttgccgaactttatggtgagcaggataccattggattcagttgtcctcctgggaatttccagccaggcatgaactctggcccaagaaccctgccgccaggcctctgcagaaggctaagtttcaggacagtgtgccatgcataggttccatgaaagttcaatgaaagtactgttatctatactttatatagataacatggtgcttctacttcgagggattggggggcagtttgtgaagaggtccataaggctgctcttttttttttttcctagtttagttttttagtaaatcgttaaaaactaggttttgtagggtcatttatatggtcgtaaactgaggtataaagtcacctccagtaggcagaatttttcagtgtttaccatagatttaaaaatcactctgtactttgcatactgaaagtcacatttcattcaccctcccacccacaaaactagtttgaagtttaaatttccagggcccagctgagaggctgtagctgcctgcctttccacgtaactgttgtgtttgttaatcttggtgcagttccattctggagactaagcagagtctttctgtgaggttgtgcagacctctggcttccctcaacattaaatatcaatgttgcagcagaagagagtgtcttgggcctcacccctgggggcaaaccctgccctgacagtagctggactgcagaccacaccatagcttcattcttctgccccaagcaatcttaacatttctttttcttttcttgtctaggttccaatggtcctcagctgtttacaatagagcaatggggcagtcctgagaaactgcccagagctcacacatggtgagtgacaaaaacacatgcatgtcaatgcaatatctgaactgcttagctgggtatggtgctgggctcaaggctattgaatgctctgtttcctgtctgtaagtagcttagagaattaaaggacagtgatgtggatgaaaatagaaattgtacagtagtgctaataagacataatgcactcagtatgtttggcacataaagggctcaggcctccctgctgtggggaatttctcctctgagcccagtccttccctcattattctaggtagtggagctttcactgttcagcatacatagataaggcagctctcaacctgtataataaacacgttgggtttttactccaaccttaaattggttgagaagttaggacaaaataccctgtagaaacatcctttttcaaaggccttctatgcccatgaataacctgtaattccctggaattgagcagtaacatgactgtggtcggaggagggtaagagggctgacacgtggccagggatgcccaagcgtggagcgtggctgccctcagaaggccctctcaggaggcacagtgacgcagaagggtcccagttgttttctgaacagttgcatgaaacccagcacaaatgcagactggatgggatcagtttcttgaagccgggttcagggagctcttgctaactcaaactcccatgtccctcgtgttggtttttctgcaaaggcctttatttcttgctcctgaggaagcagcagaagtgggccttctggaaaacggtgagcagcgtagccctgtgtttctcatgcagcgggggctgcaaagcctgctctggccatagtgagctaacataagcaaccaaacactccctgcaggaaacgccctcccttacactagaagtgctggccaggagagaattctcatgaacatgtgtttgcgaaaaattggctgtgaaaggtttttcacttctgtcggattcccttgcctcaccagaaaggtgttttttttttctattcgtaccattcacgtgactctccagatggaaacaatgtggtcattgcctgtcagagccttgaaagcaagctgactccagcctaaaattcatgaatattcagagcagtcattgtccgtggttctctggctttattctaagggaagaatgtttgagtagttcagagcttttatccaaatggtgtccaagtcatatgtggttttctgggttctactggcctccatatgaaggcaccagcgttgagccaagccccaggactgtgggtggtgatgcgaaactcaagctcataatactaaccaggatgaagattaggaaaagcgaaattattgggcacagtcatcatctgtggtcaggcactgcttaatctttatggcagccttatgagatatgttattcccttgggctgtcagaaggctggcccagggctcaccagagtcacagattcccagatcacaggatttgaactcagagctaccagaattagagcctgcaccctttaccactacaccagatacactgcctctgttgatatacccactttctttttagacttttccaaggaaaccaaattagtgaaccaatttcatgttcattcagcccatgtttctctgtgacttcagggacacatatcttactattgaactgtcttttttatttcggagcccacatgattctgccacaagtagaacttcccagataagacctctgaactcagtggttctcaacctcagctgcatgttggaaccatctagagagccttaaagaaatcactgatgcctggaatttggacttcattggtctggtgtgtgacccaggcagtgggattttcaaagctccccagatgatttttataggctggcagggttgaaaattcacagctcttccctaggaagggcaaagatccacctacaggaagggaacaacccagctggctcttaccagaacttattttcctctttatgtgtcacggaaataaagcaactgtgtagttttcctaatgatgttctccccagactaacttgacccggatggagaggactggcagttgcaagcaacactggctagcatgagtgggactgttctgctgtttcttctaaatggctttcctccctacctgaccctgactgtattttgacataggaaacagaaacttcactggctgtttcgtggcaacagttctgccataaaattttgccatacataggtttaatttcttccacgttttatgatacacaattaaagttcagaataaaaatctgatttcctagaagagcagaagctgaaggatctggttctctgtgatgagggtacctttcattaagctttccaatggtgattattgagtgtctgacattcaaaggacttcatttcattgttctataaaaggtcactactcagacatttaaaattactcttcattaagaatcacaggcccacctgcccttttaggtagactctaaagcaaacaaaaatcatctcgttcagcccatgcatcttccacgtgaggacgctgaagccctgtgaggacaatgagctccttaaagtcacccagctcattagtgcagagcaaagccaggtccgtgtgtcctgacctctgaaatgataggaactcacactcaccaagcactctgttcattccggggatggtgctcagcacttgatgcgattgactcataccatcatcacagtggccctaagaggtgggtgatgttatgacccacttttttacagataacactgggatgcaaagcggtgaagcattaagcagcatgattcagaacctcagatcttgacatcccgtctttgcctctctcttcatcatgccagtgtttctcaaacctgaataatctgtgcaccttttttaaagggaaaaaatggtcacagattctcaagaatgggcctgagacccccatagggattgcaggcccgggactgtgaaaccccagctgaaaagcctgaagccactttcggtgaaaggctcttttaaatgccatctgtagatgtgaagtcctgtctttattaatatgataatagaaagttaaaagcctgtattagtacttgctcttttaggattcctgggttcctgagaaccccagtttgagaagcacagtgttattctctgtcttttagtgtttagtggctgttagagaatccaagtggaactcagtgggacttattcaatatttagtggttgttaaacggccctctacggtatgtgtttcttttctgttgctgtgacaacggttagcttttagtatatgtgcaagtgctgccaaagcgagcacgtgaatggttagcttttaaaacccaagaagttactttgctcattcttggaatcacacatcaatacctggagggggcggttttaaacacagtttgagcactcgcggcagaggcagcacaagtgcacttcaagagctgggctttggagcaccccagggctgtacctggccccgtgtgaccttgggcaagttacctaaccttgctgtgtctcaagctcctcctctgtgaaataggggtgaagcattagctgccttacaaagtgattgccagggttcataacattgagacaaggctgatggggcatggtgagcactccatgaacatgagctcttacgtcataatgagctgtggcaagtgtgcatgccattttcatgacagatacacatcagcaatcaccccccaacacatacacacacacacagaggtgcaggttctgtggctaaaggctctggtcttgagccccatgtagacatacagtaaatgttgaaaggtgttaacactgataccatctcttgagtaattgagcccttgctgtatgccgggcccactgatccgatccacttggcactcatatgtgcagtttccccatgtcacagaagcacagaggccatccatttgtctgaaaaccctcactattgccagggcgatttgcagcccccgcccccacctgaagcctccagatatgtagggactttttctaaatgcaactttacatagcaaatgtcaattttgcctgactttgatcagaggaggtagcttagcactggtgttcccgagccccggacagcctgggttctgtttgtgggtctgccgtttgacaaagactgtgacctcaggaaccttgccctatgtctctgctccaggagctcctgtgcagaatggagataacatgacctgcttcatagggttgtgatgaaaatgaagtgagttaatagggagaaaagcacttggcttgaggcctagtgtggaataagtaatagtattagagatagacacagtcttaattcgtgggtaactccaaaagcatcagctctgtgttccaagggtttggaaatcttgccggttactcccttcccaccaggattcctccgagatctgcatctgactatagcaaaggtttcatggaccatttgaaaatgttctttctctgtaaattacaagagcttatttagtgtggatgtttcatagctagaggtttttggggtttttttctccaggtaatcaaaattgttggttaaggcttttttattctcttactcaaacctcatgccctattaaccagatcgaggaagtgctgttgtggcttttcacctacactttttgttccttttgcagctttaatcgccttgacttacctccatatgaaacctttgaagatttacgagagaaacttctcatggccgtggaaaatgctcaaggatttgaaggggtggattaagcaccctgtgcctcgggggtggttgttcttcaagcaagttctgcttgcacttttgcatttgcctaacagacttttgcagaggcgatggcagagagcagctgcaggcatggtccctggagccgagccttcaccacgcactcgtccaagttcggatgcgggaacctggtcccagcttgagttcctgcctttcccaccacaaattatcaactggttgatgtgtacactaattacatttcaggaggacttaatgctatttatgttgtgcctctgcaggcaaagcccttaataaatattttacatcctttctaatgacaatgaatggaattaatcactcaacaggtatagtattacgactcatgtttactttttaaaatgatttagaccgattttcagattttatttcgttatgattaaagatgtctcatgtacttggaaaagtgagcattttttttttttttgtatttcactttcataccaggcttaatgtcaatgacatttttatttttgaagtactctgacacctccaccctctactttattagaattggaaggcaaatttttgtccaaaaacctacagacaagtactttgagagaatttccaatataatattagacataatgataattttttccatactcagaatgaaaaactggatattacgtttttgttttggggtttttttgtacaaatttagctaatagctacaggctgagagaattgtaacatagcatgacaaattttgtgttgacttgaaaggaatcacaccattattccttagaagtaattacatgtgttctaacacatttgagacagggttggactcccatttctcatccgagaaattacttaacccttcctggcgctgtacagtcatcttttattctatttcctctttgctgtttgtagtagagacattttgaatgaaacttggcactgcttgattcaaaactgtggaaaccagatctgtttagtctcctgtttgtatgcgtttgctaatggtagctaaataaccagtttttgttgtaaatgcaccaattctgaaggcactttatgtactacatggaggtcatatctggttttgtttttatttttttatcatgaacattaaatgtgatgatgatttcttttccctgcacacatctttccggtgcaatatctatcaattgtgaatctggctgctggtgtataaaaacctggatgtaaagctgagcctacagacctgtcctcaccaactgttttgtgatttctactcaactacaaagatttatttaatgtactcttaatctaactgagttttgttaccaatgacctgttgcatgcttcaataccgtgtactgcctgagttgtgcctcttgtgtgctagattaaaagtgagacagagacttgacttgatcctctgagctcaagctattgagctggtagtggcagaggactgagggtacctgcacagtttgattcttttccacgtgtaagtctccattgcagaattgtcgtgctttgagaaaacacctgaggcagtgtgggagttgaacgaccctgctgtcctttttaacctgtgttgtcctagaccctgtcggggcagtcaggggacactagagatttgatctcatgcgagtcatcaataggacaaaaaagttgtggtttggggaggtctgtttgttacataaaaaggacctttcggtgtaagaaattgccgtttttaccctgccctggctggcatgtgagaagccatggaaggttgtggttgtaaatgagttgtctaaaggggtgcagaggcctgaggtttctaaaagaaggtagatttctacagagctgagtgttggttcctttttcttattggttgaaaattacctggtagtgatcagaaaacttagatgctatgtaactaaaaaaaaaaaaaaaaaaaaaaaaaaaaaaaaaaaaattcccgctcatgagttttgactattggtgagatgttttccgctacagttaacatgacaaatgtctcagtggcaaaaatcccctttttgtaagcccccatagtctagaggcagttttctttttaagaatcatgccagagcctgagtcgagcagtatgctttcttggtttttgagagtaattgtgtaattgtagagggagaaatccaattctaacctaagaactgggattcttctgtcatcttgtaaaccgtatattgaaaaaaacagaatgtcactaaatgcatattaagtcaagtattggaaagtataaaagaaaaatcattctgacaatttctaagccagaagcaaacaagaattactgaaatctaccccatgaatacttggaaggcagtaattgtgagtgacacctcagttcatcaaccccttaataatatcagcttaattttaatgacaactaaatatgctgaagtgaggatttagtattttttaaaaaagcaaaacaaggttcagtagtcctcagcaattctccaagtttctctctttgcctaaaatggtcatagatcttgatttctctgaatcgtgatgaccacacccagtcatcttcacagcataattgcaggtggcagtaaagagagtgtgctgggtaaggagcagttgctgggtcattccttgggccccgacctgcccggggagtagccctgggggagagagggcagtgttgcctatcccagaggtcccagcagtcacactgctctgcaggccgggctctctttatagccagagaaatcaccttaatgcagtctctttagttgtctgctgaagctgtagttattatgggccacttacatgaggctgagaagtacgtgccggagctcacacactgcctgttgcggttctcttaacatcagttatcacagctgcctgtgggtcccgggtatttccattcctgccccttgttggcccgaggaaggatgtggaaagagcacctggtgggatgaaggtccaacagcctgtgcctctccactgctggccctggagccggcagcagtgaggcattcattgtctgtgttgcggtgtattcccagcttcagtgctcttttcctttttgcctgaaatgtttatgcttctctgcagccagtcctctaacaaatctcaagaacaaaggtaagacacttggtttttgtttccaggacccttcagaaggtgacatcagatattccctaaattcagacaatgagggatacagagcgacttggcatgtattatttctcccatgtaaggacaaagggacagattattattgttatttctgagacagagtcttgctctgtagctcaggctggagtgcagtggctcaatctcagctcaccacaacctctgcctcctggcttcaagcgattcttctgcctcagcctccccgaatagttgggattacaggcacccaccaccacgcctggctaatttttgtatttttagtagagatggtttcaccatgctggccaggctggtcttgaactcctgacctcaggtgatcctcccgcctcagccttccaaagtgctgggattacaagcatgagccaccgcacccggcctcacagtgacagattctgagaaacagcatgcaaaacatttgaaccattttctacatctcccattgttgcatagagagtgtgcaccgctgctatcttgccagatccacactggtcctcccgaaagccaggttcatacacagcaactttttaattattctaacagttacccattaacagtcgactcctgtatttctgagagtcttgtactcacctctgaaatttaaaaacgtataaagagagcctgggttaatcagttctgcagcccctacgtgacactgtgctagttctccttcttctgtctcctccttaccctggccctgcacccctgtacttaagagggagaggtgggaggtgctgtctggtatcatttgctgcctcgccagtagagggtgccgctgtgcagggtaactgcccgcctgctcccttcctgacctcccctgaccccgaagatcactacctctgtcattcaggcattggggtacatcctgataagtcgtgtcagaactgccaatttcaggactgagatgtgtttttaaaaaacaaatccttataaactccactttgtactttagattttaaaactggggaaaaatgtgatattctttggaccacttttttaatttatataagccttaatgaacagtgtctatacatttgcatacacacacccccaccccagagtgttctcagtatgtcagagaaagtgccacagcattaggacgggagcttggagaacgttttctagaaaagggttagcttcctgttggcatgaaattttccaagcaaacctcattaaacatctgttgtttgttaaagatgttccactgaaagcaacgcatgtttcaaaggcacgtctttccgttcgttggttttctgtgtgtaaggagtagcattgctgttggcgcctaacctcgcgtgcactgcattctcaaccccgtaccagtgcatcatcagaagccttcctcgtgaccataactctgtgtctgcagatatgtgttcccgtgtaagccagttttccccttttactcagactgatttcacctagattgtcacggtttccttcatgttaactttgcgtgactttgttcttcctttactactctgtatgtaatatatatacatatatacgtacatatgctgtccaaatatatttgtatatatttgtatagcatttttacacctttattgagtaatctggtttcgaaaggaggtgagagtttagtcccttctgcagttttctccaagctgtgtcctgtgaatttcaacccttggagcctaagaaaaccctaggaagatgatgttaatttgctgtcatttcctaattcaggatctatcatcaaatgaaacatgaaaaaaacagtgacttttaaggtgaaaagagtttcaagcattccaaataaattatcaatgtttcataactttttattataaacccacctcctaataggaagccaagtactatttgatacagtggtaaaaaccaaactaccttgaatttttttaaggcaacttatgaataatgctcattttcacagtcagaatagctttaaaatatggttgaatttgatacacacaggaagttttcttgaagaacaatcctttcgcttttcttttttcttgagagatctaaagagaaactgtagattgttttcctgacagcaaaagactaatgtgacaaaatgaagtcattgtaaagaagcgatgcaacttgtcaaatatttaataaagaattatggaagctggaacattttctac

SEQ ID NO: 585 - DNA, 23329 bp, Homo sapiens
ttgcagatcagtgtgtgagggaactgccatcatgaggtctgacaagtcagctttggtatttctgctcctgcagctcttctgtgttggctgtggattctgtgggaaagtcctggtgtggccctgtgacatgagccattggcttaatgtcaaggtcattctagaagagctcatagtgagaggccatgaggtaacagtattgactcactcaaagccttcgttaattgactacaggaagccttctgcattgaaatttgaggtggtccatatgccacaggacagaacagaagaaaatgaaatatttgttgacctagctctgaatgtcttgccaggcttatcaacctggcaatcagttataaaattaaatgatttttttgttgaaataagaggaactttaaaaatgatgtgtgagagctttatctacaatcagacgcttatgaagaagctacaggaaaccaactacgatgtaatgcttatagaccctgtgattccctgtggagacctgatggctgagttgcttgcagtcccttttgtgctcacacttagaatttctgtaggaggcaatatggagcgaagctgtgggaaacttccagctccactttcctatgtacctgtgcctatgacaggactaacagacagaatgacctttctggaaagagtaaaaaattcaatgctttcagttttgttccacttctggattcaggattacgactatcatttttgggaagagttttatagtaaggcattaggtaagacacttttgttttatttttaatttagttatcaaaagaaatatttttaaaaattgtcatacattgtctatgacatatatatgcaggtcaatgagtttttttagaaaatgttgtagctgtttttcataaagaaagtgtatttgttctaagcgtaagataacctactttcttaataccagtaatatacttaaaaatgatcatcaataactaagagattatattttgtatttcctccaaatagcgcaaatcaacatcacatatttttgagaatcactgattgttagtctgaattttatagaatttctattgaaataaaatgctaatcattattttctctctcatcatgtatttaagaaaatcttcagaaggtcttctttgaattaatttttcaagagtcattaaattgaacattttctagaattctttaatttcttaggtgattacttcacaaaaacttgaaaaaatattataaaaagttaaaagacttacggtcttgtggggcataagatagtagaatttttactttactgatatacacctacttgacttatttttatttccttgctttactgataaaaagttgttttgctttgcaattttcatatagttgtgatcagagctggtcaatgcaagacatgtttttatccaaatatgtttgagaattatgtagaaacatgaaaaaaggtacaattatattcgacactaaaatattgtttaatgtattccaacgaattcttatgcatagactgtttcacagaactaatattcagaggatcccagttcaaatgtccttagccttagacatgatttgaatttacatgtattgatttgctttaaataattttccattcagtaagctgtgcctagctgcagatagcctaccaggctttatggatctaggtaaacaatacaaatctcttggcctcaagtctacattcagatattaatttaaaggggtacagctatatagaggtcactggcaaattttggtaaaataggattatagtaaaagccccctgacaagattgaaatttaaaataaaacaaaagtgttatcaaaggggtgaaagagcattttccaataaacaaaagtgggttctggccatgcattcagaaattccccaacaattctttaaaaatcatggagcagcttgatatataagaaattcatttaataactatatttattatgtagctccaacttactaaattattgattattatatattttatagaattatctattgtgagtctaaatcaagagtatatattcaaacaactataggaaaagggatatcagtcaatttcaattcaaggatttatttccataagtgcttacgcacaggtgtatttcattttattatacattgctttattgtccttcacaaaaattgcaatttacaaattaaaggtttttgaaaaccttgagtcaagctaatcaatttggcgtaatatttccaacagcaagtgtgtacttttgactctatcacatattggcatttatcatgctttttcaaatttttcattgttatatctgttacggtgatctgggatcagtgttccttgatggttacacgtttattagcttgggggcaccttgatgtgttacaatataagacagcaaacttaattataaatgttgtgcatgtactaactgctccgctgattcgtttccccatcccacttcttcttaggcctccctattccctgagacacagtaatataacatacaatgacttctaaatgttccagtgaaaagaaaagtagcaggtctctcaatttaaaccaaaaatataaaggaataagtttaatgagtactatagtttagatatggtttgcttgaccctacaaaatcctgtgttgaaatttgatcaccaatattggaggtggggcttgatgggaagtgttagggtcatgagggtagattccttatgagtacattaatgctctccctggggaaatgggtgagttcgttctcactctattaggtcccaggagagataattattaaaaagagccaggaacatccaccttctttctcttgcatatctctcattatctgatccctgcacttgctggctcccaacatcttcttcaatgagtggaggaaaccagaggtcttcaccagacacagatgttggtgccatgcctcttgtataccatgaagaattgtgagccaaataaaaacctttttcttttacaaattagacagcctcagttgttcctttgtagcaacaaaaaaagcctgggacaggccaaaaactacaccattgcaccaaacagttaaacaagatgtgagtgcaaaggaaaagtttttggaggaaattaaaagtgctactccagtgtacatacaaatgataagaacaaataaccattatcagtgctgatatggagaaaattttagttgtctggagagaaaatcaaattagctagctagctgcagtgattcatatctgtaatcccagtaacttgggaggctcaggtgggagaacggcttgagcccagaagtttgaagtccaaggctgcagtgagctatgattgctccactgcactccaacctaggtgatagagcaaaaccactaccaaaaaaaaaaaaaaaaaaaagaaaaaaaagaaaagaaaaaaaattaaaccaaccacaacatcaccttaggttttggcattagctaaaaactaatacatagtaaagcgttaactattcaattgcatgaagcctcagagaggagaggaagatgcagaaaaaaagactgaagctagtagaggttgactaatgaggtttacaggaataaactgcctacatgatgcaaaagttcaatgtgaagcaataggaagtcatgcagaagacttagctaatatactcagtaaatgtggctacagtaaacaaatgattttcaatgtagacctaacagccttctgttggaagaagatgccatttaaaactttcatagctagagaagagaagtcaatgcttgtctttgaagctacaaaaaacaggctgaatctcttgtagtggctaatgcagctgatgacaaaggtaaagccaatgcccatttactttttgtaataattatagaggactcttaataattatgttaaatctactttgcctgtgttatatcaatggaacaacaaagcctggatgatatcacattggtatatgacatggcttattgaatattttaagcacactgttgagacctattgctcaaaaaagaggattcctttcaaaatattgctgctcattgacaattcacatggtcaacaaagggctctgattaagatgtacagatattaatgtttgcctgcttgctattattacatccatcttacatgccatggatcatatagccttgactttcaagtcttatgtaagaaatatattttgtaaggctatagctcttactaatggggaaagtatattgaaaaccttttcaaaaggatttttcattctagattccattaagaacattcatggttcatgagaggaagtcaacatattaacattaacaagagtttggaaaaaatttgattctaactctcctggatgattttgagggattgaagacatcatgtgaagaattaactggggatggggtggtcatgaaaaaagaaatagaattataagtgggcctgaaggtttgtctaaattgctataatatcatgataaaactaaaacctgtaaaaccggtgaggaggtgctttttaaacagttactttttatagatgaacacagaaattggttttgtgagttggaatcttctccgagtgaaaatgctatgaacattgttgaaatggctacaaatgacttagaatattacacaaaattagtagataaggcagcatcaaggtttgagagaatggactcaaattttgaaagaaattctactatgggtaaactgctgtgaaacatcatcatatgctacagagaaatctttcatgaaaagatgagtcaattcatgcaacaatctttgttgtctaattttaaaaattgtccagctgccctgatcaatcaacagtaatcagcactgaggcaagaccctacaccagaaaaaataaaaataaaaaacctcacttgctgaagactcagcttattattagcactttttagccatacttttaactaaggtatgtgcattcctttttaaacgtgatgatattgcacagctaatagcctacaaggtatggttaacataacttttatatgtcctgggacccaaatttgtgtgaatcactttattggcatattccttttattgagatgaactgcaacttatcttgcaatatctccaagatatgtgtgtatggcatttcaaataagatgtgaaattattttattagtataaaaagcaaatttaattttctttcctttgatcatctttatccttgttactgtgtatttatcctttaaacattgaatgactccaattgtttaaaactgagtctttcttaaatgagtcctaatatcatagtaattaaaatcacctacaagttggtaatgcaggcagcatgtgaggcacagaaaacaacaaatttataagacataaatgcatttgcttggaagctgagagaaggctctattctaatttctgataacttcaaactgagtatcttcagtaaaatttattcactatcaaattcaaggcgtttggatttatgacctaggaaaaaacttcaaacattaaaatgtgatgaccttaaaaagaggctctccacactatggtgtataacaccaccaactttgattagaattttaaagagaaacaaattctcttatggagtttatctttttatcacttgcaaaatatgtttttgtaaagagatactaattacttagttatttgtagttagccattcttctgattaaaaacctaaaattaaatcttgaaaatgtgttttccttcaaaacacatcatttgagagaaacactaaagtaagtgtatgattatcatagcatgtacataggtgcttcacaacccaaaaagaatattgtcatgggtaagaatcagtaaaggaatttctcctaataaaacagtagcctattaattaaagtaatgatatgcaatacagcaagttaaagggaactgatcctggtgggattattgaaagatatacccttgactatagattagaaaatacagagatgttatttagtgaagatattgtggtactcatttatcatctgcaattcacttgcagaggaaaaaatgagtaataaattcatttgcattttggatttgtgtctttaagttgtgaaaatacacttaaatataaccatctgtcctttgctccttccttccttccttccttctttccttccttccttccttctttccatccttccctccctccatccttccttccttcctttcttccttccctcctttctttctctgtccttccttcttttttcctttctttcttttttcttctttattatttcattaattcccccttccatttgacgtctaaaagccatgttgttctagaggacttaaacttatttttttcttaatagcttactgaaaaattagtgatacaattttttatttgaattgtatgctaattcattctgttatttcttttattgaggaaggcccactacattatgtgagactgtgggaaaagctgagatatggctaatacgaacatattgggattttgaatttcctcaaccataccaacctaactttgagtttgttggaggattgcactgtaaacctgccaaagctttgcctaaggtaggactattgtattaaggaatattatgtactttatgacatgacttgttttcccttgaaagattacaaccttagttatagaaggatgatgttgaatgtcttctgtttgcagctccatatttattttccatgccacaggggctcttataggtgattatatgtcttttcggtattatattgagaaagtaggcagaagaatgtcatgattagaatagattttaaaatactagtattacaatagtttggataataaattgaattaatagggaattggagccatgaagatcactaaaaagaatgctctagcctttctcacaatcaaattgggcttatgaacaaggatatttgtcatgatagtacagaaataagcatattttcatgagacatattggatatattccacaggagttggtgagtgagagaaaataagtgatgaaggaagacaaagaataaaagaaaatttcaataaatggaaagtttaagtgtttaatgatagtgatgacttttactcaaataagtgcttagaagtcatcttgtttgtgatttatatgatgaattctgtgttgtgactatccactttgagctcgtgagaatgttaggtgaggtttaataaaagccatttgagaaaaacaaggtttcaacctctgtggacagaaatctaaatatcgatagttatcaggacaaagtagagctcatagaaataattttgcagcctgcaggtttcttttggagtgaaaataaaattgtatactatattcctaaatcatcagaggaaaaaatttatagttcaaggaatgttgaaagaaacaatattgagaagtaaaagtgagtaatagttgttatagttttttaatagttttgtaagtatgtcttgagttcactgtcccaaaagtggctattagctctagccttgacctgacaaggttctaggatatttagtcatggatgttcataatctacctcttacgggatactttttattctgatgaacagcctaatgcctaagtgtgcaatctataccaagattgttcttatagggaacttgtttacactggaagacaccactgtgtctcttgtatgacctatgtcttctttatccctacaaaggtaaccacattataggaaaccctgacaaggccagatgttatatttgtgttggtcaagtgagaaaacatgggagaaacttaaccaaacacataaaataacagaaacagtcttctttgaccatttctagagaaaagagttcagcatcccttgtaaggccactaggaagaagaaaattctctgggaaaagcacattcaaccaatgaatggagaccaagaaagagagtgagggatctatgtgccaaaatgttaactgggatccagggtgttacctaggtgggtttccaatggggaactgtaattggtaggtttaatgcaagcaggcacaaagtccatggaggcattctgagactgaaagatagtcactttggcatatctgcacagaatctgatcagtgattcaagcccaagtaggctgtatctagttgtcctatagggtggttaccaggaggcagtgtgtaagtaaaaatcctgactgaacacattgaggaaatggaaggaggtggaagattttaaacggtgtcagtgttgactaagacctgcttctggtatggaaaattcaacttatattttaaatgcatagccagacaacataaaattataagaatttaccacaatagctatggtaacaatactgggtttacctattactacagagtgaaaagaaaaccctcatttcccattttatggaaatataatcaaaatcctataaggaaggtttcagagccagtaggatttccagaaaaattattggttttatagtaagatgtgtattgatgaatataattttatttattaattattaatatcactttacttaccaggaaagttataccagaaaaccaagctctcttaagccatggcatctgtatctaaaatagaaatacagaaggagagctgacaatttccatcattctctaggtaatctcccatgccattctaccctttattcccacactcccagttttacacacacacacaaacacacacacacaaacacacactcatagaaataatcatagaagtcatatttttaaaaaagttagatccatacagtaataatttattaggtaaaagcttttgtgctgataattttacaagtttaattgagatatattttagggctgtcttacactaaatatttatttttattttttaaatttgacatgtaataattgcacatgtttaagagaaatgctgtggtattacaatacatttaaatgttgtgtaataattacatcaagataataaacccatcatctaaatatttatcatttctttgtggtgataacattcaaaaacctcctttctggctatcttgaaatatgtaatacattactattaactatagttacccaacaacttaatataataacagaacatattcttccaaatttaaacgttgtatccattgatccaccatttctcattgccctccctactatctcttcagcctctagtaaccacaattctactctctaattatattatgaatgcattttttgattccacgtataagggataccatgctatctctgcctggattatttcagttaacattatgccctggaggttcattcatgtttctacaaatgacaggatttcattcttttttttccaatatatatttaatgaaatggatatatataaacattggaaaatgtatatatatatatatatatatatatatatatatatctccagtggaatgctattgagctataaaaaagttaatatataatagaaataaagcttatatatatctaatggaatggatatatatatataatggaatagaaatatatatctatacatataaacacacacaatatacatatccatttcattgcatatatatatatagagagagagagagagagagatattttcaaatgtgtgtatatatatccaatggaatggacatatatatatgtatattttttccatattttctttatgtatttcttcattaatggatgtttaggttgattcatcccttgggtatatgaataatgttgatgtaaacatagaaggacagatatctctatgacttcttagtttatttaaatatacacccagtaatggaaatgctgtataatatggtagttctattttcattttttgaggaactaccataccgttttccttactaattgtactaatttgcatttccctcaacagtttataaaagatcttctttctctgcatactttctagcacttgttatttttgccttttgataatagccataacaggggtgatgtgatatctcattgtagttttgatttgcatttccctgatgattagtgattttgagcattttgtaattatacttcttagtcactgatagtcttcttttgagaagtgtctattcaggtcttttgcttattttttaatcaaattagtaatttatttttattgactgatgtgacttctatgtatatttgagatggtaacttattgtcagattcatagtttgcaaatatttttcatgttgtgaattgtctcttcaccctgttgtttgcttcattttctctgcacaagctcaatgctttgatataacccgtttatctacttttccttttgttggctgtgcttctgaagtcctatccaaaaaaatccttgcctagaccaatgtcacaaatcattcctcctacagtttcttctagtagttgtataatgtttggccttatatttaactttgtaattcatttttacttactttgtatatggtgagggatagaggtctagtttcattttctgcatgtggatatgcagttttcctagcaccatttagtgaagaggttgccttttttctattatgtgttcttggcacctttgtcaaaagtcagttagctgctatattcctccatttgtgttgttatagaggaacacatgagactagcaaatttatatatcaaatagaattatttgaatgatagttctgcatactgtacaagaagcacagcactgacttctgcttggcctctggtaaggttctcaagatgcttccacttgtggtagaaggcaaacatgagctggtatatgcaaaggtctcatgacaagagaggaaaccataaagaggggatgtgagggagtgccaggttttgtaaaacaactagctcttctgggaactaatagagtaaaaattcgcctcccaggcaggggattaatctattcatgagggatctgcttccatgacaaaggcacattctgttagattctacccccaatattggggatcaaattttaacatgaagtgtggagggctcaaatatccatactatggcagcagtaaatgcataaatttattttgtggatctctattctatatagtattggtgtatgtatctgttttcatgccactgccatactgttttggtgatatctatgctatatatgtgtgtgtgtatatatatattatatatatgtatatatgtgtatattatatatatgtatatatgtgtatattatatatatacaatactttaagttttatatatatataaaatactttaagttcaagggtacatgtgcaggatgtgcaggtcagttacataggtatacatgtgccattttggtttgctgcatgcatcaactcatcattacattaggtatttctcctaatgctatccctccaccagccacccaacccccaacaggccaggtgtgtgatgttccccgccctgtgtccatgtgttctcattgttcacttcctacctaaaagtgagaacatgcagtgtttgattttctatccttgtgatagtttgctgagaatgactgttttcagcttcatccatgtccctcaaaaggacatgaactcatccttatttatggctgcatagtattccatggtgtatatgtgctacgttttcttaatccagtctatcactgttggacatttgggttggttccaagtctttgctattgtgaatagtgctacaataaacatatgtgtgcatgtgtctttatagcaacatgatttactatcctttgtgtacatacccagtaatgggataactgggtcaaatggtatttctagttctagatccttgaggaatccccacactgtcttccacaatggttgaactaatttacattcccaccaacagtgtaaaaacgttcctatttccccacatcctctccagtatctgttgtttcctgactttttaatgatggccattctaactcacatgagatggtatctcattgtggtttttgtttgcatttctctgatgaccagtgatgatgagcattttttcatgtgtcttttggctgcataaatgtcttcttttgacaagtgtctgttcatatcctttgcccacttttcaatggagttgtttgtttttttcctgtaaatttgtttaagttcattgtagattctggatattagccctttgtcagatgggtagattgcaaaaattttctcccattctgtaggttgcctgttcaccctgatggtagtttcttttgctgtgcagaagctctttagcttaattagatcccatttgtcaatttcggcttttgttgccattgcttttggtgttttagtcatgaaacccttgcccaggcctaagtcctcagtggtatagcctaggttttcttctaggatttttatggtttcaggtctaacatttaagtctttaatccatcttaaattaatttttgtataagatgtaagaagggatccgtttcaactttctacatatggctagcgtgttttcccaacaccatttattaaatagggaatcctttctccatttcttgattttgtcagatttgtcaaagatcacatggttagagatgtgtagtgttatttctgaggcctctgttctgttccattggtctgtatatctgttttgataccagtaccatgttgttttggttactgcagccttgtaatgtagtttgacatcaggtaccatgatgcctccagctttgttctttttgcttaggattgtcttggcaatgcaggctcatttttgcttctatgtgaactttaaagtagttttttccaattctgtgaagaaagccatcggtagcttgatgggcatggcattgaatctataaattaccttggacagtatgtccattttcatgatattaattcttcctatccatgagcatggaatgttcttccatttgtttgtgtcctcttttatttcattgagcagtggtttgtagtactccttgaagagatctttcacatcccttgtaagttggattcctaggtattttattctgtttgtagcaattgtgaatgacagttcaatcatgatttggctgtttgtctgttattgttatataggaatgcttgtgatttttgctcattgattttgtatcctcagactttgctgaagttgcttatcagctgaaggagattttgggccgagatgaaggggttttctaaatatccaataatgtcatctgcaaacggggacaatttgacttactcttttcctaattgaatatcctttcttctttctcttgcctgattgccctgtccagagcttccaatgctgtgttgaataggagtggtgagagaaggcatctttgtcttgtgcaagttttcaaagggaatgcttccagtttttgcccactcagtatgatattggctatgggtttgtcataaatagctcttattattttgaaatgtgttccatcaattcctagtttattgagagttactagcatgaagggtgttgaattttgttgaaggtgttttctgcatctattgatataatcgtggttttcctcgttgtttctgcttgtgtgaaggattacatttattgatttgtggatgttgaaccagacttgcctccggggatgaagccaacttgatcatggtggaaaaggtttttgacatgcagctggattcggtttgccagtattttattgagggtttttgcagtgatattcctcagagatattggtctaaaattctctttttttgttgtgtctctgccaggctttggtatcaggacgatgctggcctcataacatgagttagggaggattctctctttttctattgattggaatggtttcagaaggaatggtaccagctcctatttgtacctctgatataattcagctgtgaatccatctggtccaggactttttttggtttgtaggatattattgcctcaatttctgaggctgttattgttccattcagagattcaaatttttcttgatttagtcttgggatggtgtatgtgtccaggaattcatccgtttctttagattctctagtttatttgcatacaggtgtttataatattctctgacggtagtttgtatttctgtgtgaacagtggtgatatcctctttatcatttttattgtgtctatttgatttttctctattttattctttatttgtcttgctagtggtctatttattttgttgatcttttcaaacaaccagctcctggattcattgatttgttgaagggtttttcgtgtccctatctccttcagttctgctctgatcttagttaattcttgtcttctaccagcttttgaatgtatttgctcttgcttctctggttctattaattgtgatgttagggtgtcgattttagatttttcctgctttctcttctgggcattcagtgatataaatttccctttacacactgatttaaatgtgtcccagagattctagtacttcgtatctttgttctcattggtttcaaagaacatctttatttttgccttcattttattatttctctggtagtcattcaggtgcaggttactcagtttctatgtagttgtgcagttttgagtgagtttcttaatcctgagttctaatttgattacacagtggtctgagagactgttgtgatttctgttcttttacatttgctaaggagtgttttacttccaattatgtggtcaattttagaataagtatgatgtggtcctgagaagaatgtatatgctgttgatttggggtggagagtttagtaaatgtctactaggtctgcttggagcagagctgagttcaagtcctggatatccgtgttaaccttctgtctccttgatctttctaataacaacagtggggtgttaaagtctcccattattattgtatgtctctttgtcggtctctcaggacttgctttatgaatctgggtgctcctgtattgggtgcatatatatttaggatagttagctcttcttgttgaattgatccctttaccattatgtaatgaccttctttgtctcttttgatctttgttggtttaaagcctgttttatcagtgactaggattgcaacctctgctttttttttttttttttttttgctttccatttactttgtagatcttcctttatcactttattttgtgtctatgtgtgtctctgtatgtgagatgggtcccctgaatacaacatactgatggttcttgactctttatacaatttgccagtctgtgtctcttaattgggccatttagctcatttacattttaggttaatattgttatgtgtgaatttgatcctgtcattgtgatgttagctgattattttgctcattaattgaagcagtttcttcatagcattgatggtctttacaatttggcatgtttttgcagtggctggtaccagttgttcttttccatgttaagtgcttccttcgggagctcttgtaaggcaggcctggtggtgacaaaatctctcagcatttgcttgtctgtaaaggatttcatttcttcttcacttatgaaacttaatttggctgcatatctgattctgggttgaaaattctttcctttaagaatgttgaatattggcccccactctcttctggcttgtagggtttgctgagagatccactgtttgtctgatgggctttcctttgtcggtaacctgacctttctctctggctgcttttagcattttttccttcatttcaaccttagtgaatctgacaattatgtgtcttggagttggtcttctcaaggaatatctttgtggtgttctctgtatttcctgaatttgaatgttggcctgcctcgctaggttgggaaagttctcctggataatatactgaagagtgttttctaacttggttccattctctccatcacattcaggtacaccaatcaaacatatatttggtcttttcacatagtcccatatttcttggaggctttgttcctttctttttacacttttttccctaaacttgtcttcttgctttatttcattaatttgatcttcaatcactgatatctttttttccaactgatcaaatcggctattgaagcttgcgcatgtgtcatgacgttctcatgctatggttttcagctccatcaggtcatttaaggtcttctctacactgtttattctagttagccatttgtctaaccttttctcaaggcttttgtcttccttgcgatgggttagaacatgctcctttagctcagagaagtttgttattacagactttctgaagtctacttctgtcagctcatcaaagtcattctccatccagctttgatccattgctggtgaggagctgcaatcctttggaggagtagtggcgctctgctttttagaacattcagcttttctgctctggtttctctccatctttgtggttttatctacctttggtctttgatgttggtgacctacagatggggttttggtgtggatgtcctttttattgattttgatgttatttctttctgtttgttagttttccttctaacacccaggtccctcagcttcaggtctgttggagtttgctggaggtccactccagaccctgtttgcctggtatcaccagaagaggctgcagaacagcaaatactgcagaacagcaaatattgctgctggattcttcctctggaagcaaatatattatgcatatatatatatatatatatatatatatatatatatatatacatacatacatacatacacacctccttgtctggtgtgggatcagggtaatgctagcctcacaagatgatactgaagtgtttttgcctttttgactttttgatggtttggaagagtgagaaaaagtgttattaattattctttaaattttgttgaatttcatagtgaagaccttagctcactggcttttttaatgagactttattactgatttaaacttcttcttcattatttatttctccttgtttttatttcttcataatccagtcctattttatgtgtccactaaattgtttattttcctagatttttccatttattggcatatgcatgtccatagaagccttttatagtccttttcatttctagtgtcatttttttccttttttttaagaatccttaagattttagagatgaaatgtcactttgttacgcatactggagtgcggtgacattattatagctcactgaaacccaaactcctgagtttaagcaatccttctacctcaaaattccaaaattcctgagtagctgagacaggcatacaccatcaagactggctaatttatttcaaattttgtagagatgggttcttactaagctattctcaatctttgggcttcaagtgattcttcagcctctgtctctgaaaatgctgggtttatagatatgagcctctatgcctgatttgctttgtctctttgtaatctcccattttatttgtgtcttttctggtttgtttcattttgttatgttttcagttaccttgctaaagctttgtcgattttatctcttcaaacaactaactcaatattttgctgattttccatatagtattttatttctatttcatttatttctgctctaatctttgttaaatatcttgttttcctaataattttgagtttccttgttcttgttttctaattccttgagatgttatcataaattgtttatttgatatctttctacttttttgatgtgtgtgttcgttgttgtagactttcctctttattattctgatttcttcctcaattctctaatattatgattgcattattttccaagtttcttttgtttttttatttatagtttatgtgattcctgaacttgtcaaagagattattgtgaatttgatgtcggatatttaagcattttcaaaacttttggtgcattattgaaattttattggtttattttagagatgtcatacttcccagtttttttttaacaatacttgctctttatattgatgtctacatatttaaaaagataaccacctgattcagctttttaaggtgatatgcagtggtgttaagtgtgtactgcttaatatcagagctgaatcactgccctgaggattctttctgttctgaggagagcttgtagttaatagcagaacctaaatagtgcagtagagctaaatctcttccatgctgttgttttcctgtctggggaagacttatcatgaccatgaaaacataatgctgtgccagaacttaaacccaaacctgtagtaatttctgagttgaggaaggcttaagaaataactggaacttagttactaacctgatagttgtttctgagtcagagaaatgctctgcatgatcacctgggatatttgtaaaatctaaccaaagattctagccttcccttggattgtgtctcctgtactactgtagtgctggctaggtcctcatcagtgaattccctgctgataggaccacaaagcatctgccaagatctgtttgccatttgctgtgattagtgcttctgctctttgcttccaattcaactcaggtggttcagcccttctgacactcctaatacctcctgtgggatggaacatagaaggcttctcacaatgattcacacactgatatggagattgaatgtccagttgcaactattttcttccacctgtgtaattgcaggtacagggaagttttctgtgactgatgctattttggtttggagaatggggtgatgtggcacaatgatctttcttctttctggtcatggattttttaatttccatgaacccataagatttttcacttttcttctgagctctggtgctttcagagtggtatttttatattcgaatagttgctagttgtacttttaaaagcgattgatgctggaggtcttctattccaccatctcgctgatgtcagtcctcaaataataattttatattttagcaaattattttggttttaggattttgtgtctacgtgacacagacatgaaaagagatgtactcattactgaaactttttgcatactgttttggttgtgcgccttttctagtatgaatgattacatatttaagccacatgttttatacatagactgtcctttaaagagactagatagttctgtgtgtcagcatatagggacagaatataactacacattaataatttctcaagtatttattttagaagtgtaagtaacctttattttaatttttgttatattatgcctctgtaatgcagataaatttttatcttcaggaaatggaaaattttgtccagagttcaggggaagatggtattgtggtgttttctctggggtcactgtttcaaaatgttacagaagaaaaggctaatatcattgcttcagcccttgcccagatcccacagaaggtcagtaaaacctccaatcctgataagcagctattcacataatgaaacagtatggttttatttgggtcttgaatctcattttccacttagcataacaggtaccaaaatttgcaaaacattatagtagtgtacatgggcataactgatcatttgcctactgagtcttgctgttactggaaacaactttcttgattgtcatttgtttataataaaatagatataataaataaagccctaccttatattttaggatttgaaatctaaaagcgtgtgccaatgattccaaaaaaaaattctgacatctattatttcaaaggaccagaaaaaggaaaactgatataaaaaaaaaaagaagaatcaatctcaagaatatcttctcatatttgtgtgtataaaaactgtattcagggtagttttgcttagaaataaaagctcagattaatgtagtctttctaaataattagaagtttcaaaagtaaaatgtcaattacaattatagtatagtaacaattatttaagtaatgtaattatttatgatactccactaattttaactttattattactgtaattctagaatttcacactttagatagtgctatatataaactatccaaaagatatttcattttatatttagctaaaatacttcaaactcaataaaggcaagcatactaattaggaatttgaaatattgtaattttaattatgaaattatctgttaagtagtttgaaacatctatgccgttctttgttttcaaatgtataaaatttgtataggtgtccaacaaagaaaaattgtgtaaaaaaaaggtacaatctcaaagaaaatttatcattgaacagtggaacataagtaattttctagctcattcttcttcaataaaacaattaaatataagaagaaagaggccaggaaggaaatagagaagaaaagacacctgattatccaaaagacacacataattgaaagcaaatttttatctgcagggaactgtaaatttgatggtagaatgagattggctccatgagttaaaatgacacacagatcaggtacttataaaatttttaattcttatataaaaatagattagccactgctgaattatttttttaaatattcactggtattctcattctcaaatatttttaattggtaataaaataataatagcatacctaataggcaactggtacacattattttaaaagatctttgtaaaacgtcctactatatctttcagtctttacgcggtagctctacacacccctgtctcaaccatcacctgaagtacaatgagtttataatttataactatatctacatccttagaatgctaatatcctgtggttcactctgtgaaatacatgtgtttcttccgtaggtgttatggaggtacaaaggaaaaaaaccatccacattaggagccaatactcggctgtatgattggataccccagaatgatcttcttggtaggtctatgagaaagtaaaaatatgaactagacgaggaaaaaatgaataaatgttaaacagcaagcaaattcagcaaagatctaaaattataaaactttattttacttactcttttgaagcagatataattaaaggattgactaaaattgtatagattcacactttctattgttaaggtgagagtgacaggaaattcagaaggaattaatgcctatttttctggagatagaaatgatctttagtagcaatgctccatgtgctcaccttctaaagaaagtgctgtacgcttcagtgagttatctcgtaattcccatctgtagtctttaaataattttaaaagtttagaataaaatatctcaccatttctcatccaatttacatactaggtcatcccaaaaccaaagcttttatcactcatggtggaatgaatgggatctatgaagctatttaccatggggtccctatggtgggagttcccatatttggtgatcagcttgataacatagctcacatgaaggccaaaggagcagctgtagaaataaacttcaaaactatgacaagcgaagatttactgagggctttgagaacagtcattaccgattcctcgtaagtactactgcttgtacagactgatctaacattgactatgttatacattataccagaaaatgttaaatatcatcctggtagacatgttgagggattttactccacaatattgagtcattcatcaccttgttactggaatagttgtggaaattgtagttcatagagtgtcaaactttcttcatggaaatattaggtttaagttaacaactggcttactaagcttttattcacatcttaattttaccccattttgttaagaatatactctttcagtctctccactatatctgtttaatactatgtaaccaacaatattcatgtcacaaccagaatcaatcttttactgaacatgttcttggcttgcataacatatactacggtttatctacctgtcttttatgaaaacaaaactacaactttctaagttctatgtgtgtttttcccttccagttataaagagaatgctatgagattatcaagaattcaccatgatcaacctgtaaagcccctagatcgagcagtcttctggatcgagtttgtcatgcgccacaaaggagccaagcacctgcgatcagctgcccatgacctcacctggttccagcactactctatagatgtgattgggttcctgctggcctgtgtggcaactgctatattcttgttcacaaaatgttttttattttcctgtcaaaaatttaataaaactagaaagatagaaaagagggaatagatctttccaaattcaagaaagacctgatggggtaatcctgttaattccagccacatagaatttggtgaaaaccttgctattttcatattatctattctgttattttatcttagctatatagcctagaattccacgatcatgaggttgtgagtatatctcattctttcgttgtattttcctaggtgtctttactctcttctctcactttgtgacacaaggacatgaatacatctaaattttcctatttctgatatgactgttttgatgatgtcattacttctataaccttaagtgatagggtgacatgcaatatgattattcctggtgtgcgcccaaacacatggatataaagaggtaaaaaacttaaaattcacaaaattcagtaaaccacacaaatcaggtaagtgttctatgagattagctggctatgagaaacataatgatgtttctttttcaatttaaataagcccttctacatagccagcatcagtgatctcagaaaataaattgctaataatgatgacatggcattatgcttagaaaagtttgctgtatttccatagacctcatctagatgtcatggcctacatttctgccatcactcaaccaatacttttttctgttttcttgatgataaaaagacctttctcatgattgccatcaaataacaaaagaaactattttttttctcacatagagaacatgtcagtaagatattcaaggtgaacagattatttttgggattagtaactatttgaaatatgtggtgataattactgagtttataaaatttatttgatagtacacttaaagaagatttatatgtttattctttaaaaatgatgaatactcataattcttatctctataatcaaaagtataatttactgtagaaaaataaagagatgcttgttctgaaagtaagatcagtgaactgcttttcagtctcaatctttgagaattgtaaattcatcaaataattgcttacatagtaaaaatttaaggtattagaaaacctgcataacaaatagtattatatattaaatattttgatatgtaaagctctacacaaagctaaatatagtgtaataatgtttacactaataagcaaatatgttaatcttctcatttttttactgtcatataatcttagtgatatgcctattaatagttttaaataaataaattggctcatctggctttttgaaaattttgaaattcttacagatgttgattaggtatatctacaaattaatttcaattttaaaatgatgatataaaaataaatataagtatttttcttgtgtatgtatacaataaatataaataaaattgtttactgttttgaaa

SEQ ID NO: 586 - DNA, 97026 bp, Homo sapiens
ggaggagccgggcgcgcctgccacgcaaaactaccgggctggcagggcggcgggcgcggtgcgcgatcccgggtggcggcggcaacggcggtggtgacggcggcgactgcagcggccggctctcacctctcccctgtgcacccgcatctcgccgcgccgccgagcagccagcagtccccgggtcgcccagcccacgcgcgcacggccgagcccagcgcacaatagcggcgacagccatggggaaaccggcgaggaaaggatgcgagtggaagcgcttcctgaagaataactgggtgttgctgtccaccgtggccgcggtggtgctaggtgagcggcgcggcgggtgggcgatgcgcgcaccctcacgcgctctctgcgcccaggccgcgtgcggctgagggtgggcttggcgctggcgcactccatgcagggtccctcgatgccccctcggccttagcctcgggccccctgcgggggctttcccccaagcgctctaattactgcacaccaagaacaaagctcctctgggactcccatttgagtgctccttgagctgctggttcctgctctacccaaaatgatcaaaggggcttgggggtagaaagggaagcaagtagctcttggttctgctcgtttgaaaacagggttcgatttttttctttgttaatcccgcaccgtatctccccctatcaccgccaccttcctcaccccacacccccagcctcgctgcgcgggcagagattgagtgtggattacagttctcagtcgaattggaagaggcaccctggcctccgggatgggccggacccttaggggagggaggctgagaacgctgtcgccgctcatcctgggcagtgcgtggaaaggtgccttcccacgcggcgagcgccgactgcctgcacccgggctctgaaaagctgccagattcgtgcctgaattctgggatgtgccactgtggcccgcgggaggtcaccggggaagagagctaagagaactcagccgtctcttctcctgccttccttgctctccacgttgtttttgtatttaagataatgtttaagccatccttgcctgtttttaaacaagggtgtatttaagtgatccacccctcacagatcactggaccaggtggatgtctgagccattgctcagaggtatgagttattcctatttagattctgattttttaccaaggttgtgtgtttctagctccggcccggggatgcacttccttgggattagcgccatatctgtcgccttcccagtgatagctcctcagcaggtgagggctgttgcaccctctgaggaatgtggattcctcggcaggctccaccttccccttggaaactgcagctgtgtttgctgaaaaggcaagtggggacagcttgtttcctcccaacctcaggtaccttcctctccaactgctgctcctaaatctcagaatatatggtgttgcttgcttctcctccgaaccgccccctcccctcagggtggggatagggcatggaaatggcctttggaagttaatgggattcttggggtcagattggattctccagaaccttggggaaaggaaagtcaggtttctagtaaataaataacatcctggaatggccctagcagaggctatttgtaggaggaaaggagagaagtacagaagcaaatcttgactatttcccccaagaagtgccaagtggttttggaacttttttttttcggttttgaacatttttaagggaaagtttatcctactctaccatatttaaatagcatacgctacaaagaacgacttgatttcctttaggccaaagagaagagatggccttgtttgttttcctagtgataagagtcgaggattaattgttaaatctctttttgaagactgagagatgccagggcaaggtggctcatgcctataaccccagttactcgggaggctgaggcaggagaattgcttgaacccagaaggcagaggttgaagtcagccaagattgtgccactgcactcccgcctgggtgacagagcaagaatccaccaaaaaaaaaaaaaaaaaaaggaaaaggacttttagagggccaggcacggtgactcacacctataatcccaatattttgggaggccaaggaaggaggattgcttgagcccaggagttggagaccagcctgggcaacatggcaaaatgccatctctacaaaaaagtacaaaaattagcgtggtggtgcacatctgtagtcctagctactcaggagactgaggtgggaggatcacctgagcccagggaggtcgaggctgcagtgagccgtgatcgtgactctgcactccagcctgggcaacaagaatgagaccttgtctaaaaagaaaaaaaaaaaagactttgcaggataaacattggcttgagtctccctcctgattccctgtggaagtggagttatcctgccttttcagcatggggctctccagagatactcacttgctacccaagtgttgcacaccactcgtcagcatgcgattcactggagactggtttggagaaggttttaagcaattgttccctggcctttggaatcagttgcgtgaataagaagaagtacatgctcattttgcagacatggcctttggtctcagatgggcactttcctccaattttaatgtctgtgagccccaagagcttagtttgagtacttttctccagaaaggaaagtcaccacttaaaaatcaagtgcccagctgaaatcttcctagatatttgttccttcagatggcaacaaagggcagtcctgcttctggtctgagaagtctcaaacctagaccacccccgatatgcccattaacaggggtccttttcttgtcctttttcttcagagtactgggcctgagtggaaactcatacttgtttgtgtagtctgtaagggctgatttgtttaattgacagtgaaattccagtgacttataacagtggcactgagtctattcataaacccttgctagataatgatagtaagagcttattttataactgccttaactgatccagaaaaatcgcaagagctctaatgcagcctcccttttggacttttcagcatgtggaacttaaagaagaaaaaaaactgtgaaatttattaactatcatgacaaaacatcttcttctgattatagccgttcaaatgtttggtccctgaccaggtgcagtggctcagacttgtaatcctaggactttggaaggccaaggtaggaggaatgagtgagttcaggagtttgagaccagcctgatctcatctctatttctaaaaaaaataatttaaagaaataataatgcaatgaaatgttcagtcactactataattcagtagccctaatactttgaaatatttgattatagaaataagaggcaaagatttttatgagccagcttaaagcctgatttttcaagatacagcacatgaggggaaatgtaataagggtcatctttattaggtgtggaagttcactcttttcatggacaaggaaatgctaagaactaaacatttctcaaattcttgttcacaagatgaagggattcaatagttaggtgaccatctttttaaatttctgcgacaccctacatggtcctgaaaatagtatcttggattttcacaggaaaatcctctgctaaaataccactagaaacactttcacggctttcattacaattcttataggcttattctctgcttccatagaatggtagaatgagcacagagcctggagtgaagagtccttgggatttgaattctggtactatcaagctctatcatgcaggcaaactgtgtatttccctacaagcctcaatttcctcatctggaaattggagatattacttattacttcgtttgttattagaggtgtgaaagatactcagttgtgtggctggcatatattcagcactcaatagttgttattttaaggtaaatctgaataatttgattatgagaaaattaatattttcttatgaaataaattctctcatagtatgtctctttctgtgtcctgcttagtgtcccgcctataatttagggtgactcaagtgttttgatgacctgctctgtctgagctaataactgtccctgtagtattattcatttctttaaagaggaaatggaaagaatgaatcatttatttttgtgccccaccggctaatcctcaattcatttaaatataatatttaaatatataatttatataaatataatttaagtatgtaaattctgaaggaaggttttatgctctaagtgggaattctgtccaagcagaattactgagtgagaattctgccagccttctaatgcgggtcatccaataatgattatatagtatatgatgttgttaaggcacttcttatatcctcaccctattcacaatataatacctaatctttctctccagaccagttatgccattacttctgtcatttgaaaaatctgtgatttcaacttagagctattcagaaaaagcaataggtattggcatttacatgacagagctggcaagcttattcattctaaattgttttctttggagcgctaaggaagcaatcatgcatagattctgattccattatctaaaatcagaaacagctccttcatggtcttagcaatacccttgcccagcctcgtgtctctaccctggagctcatgtagcgtgcatctggcagtgctaatttgagacgtggcataggctttcccgctttgtctgtgaagcccctgaggacagggcccagcggcggttcacgctggttccaggcccagcccctcacctgcatagaaccttggctcagcagtgtttaggaatatccctgtaataatcaacacttaagccattcattcatttaacagatatgtatcagacccccactgtgcaccagggattgttctacagccgggtcacacagcatgtcctcatgggacttaatgttcaagtagagagaggtagaccataaatagaatacataggtaacctactgtatagagcatgttagatgagaatagtgttctggagtagtatagagcagggagtgggctggcaaggtggggggttgcaattttaaacagggtgacaggggaggccatactgagaaggtgacagttgaatcaagacggaggagaggtgaaggaacaagttgcacaggtatctggggagcatcctagtttgtgtgagaaacatcaaggagtagaatgagggagggaaagagtaggaggagatgaagtggaggtgaggctgggggcagagcaatagggtggttcaggtccaaggtccaggaaaggggaaatgggtgcctcagctgagcagccaggagtggaacagaatgaaaagacagctgcttgaggttaacctgcagggcttggctggatttggtccaagggagaaggcagtggctatctccagcaaaacagagagtcctggaaggggcaccgacttggaaaagaacatggcatgttccacggtggacgtgttgagtttgaggagccagaagggtgtttgggtaaaggtaggcagcaaacacctggctaagtgagtctggtgctcaggagacaaatgtggagtggagtgtcgacttaagacagcatgtcagggacctggttaaggctttgggaatgaatgaacctatcctgggagaaaagggagaagagaagaccaaagacagagttctggacaaccccaacattggaggtctgggaagagaaggggcccacaggagaaaccggacgtggtgtgatagaaattaagaacaggaacagtgatgggtgagaggctcgggggcaggagtgagagggtctgaggaggaagttcaacagcgttggggatacaaaggacagggatgtgaccttctgggcttttatttggaggcacttaggtgtgaaagaattcagagaaagtggaagtcacgtttaagatccagagagtatttttctttctttttttaagagacagggtctcgttttgttgcccaggctggtcttgaatgcctggcttcaagctgtcctcctgcctcagcctcccaaagtgctaggattacaagtgcaagccactgcactcagccttgttttgttttgtttttgtttgttttttgttttttaaggagacttgagtctgactgaacctgaagagaagtgatcattaaaaataaaaatgcagctgagcatggtgactcatgtctgtaatcccagcactttgggaggtgaaggtgggaggactgcttgaggctaggagttcaagaccagcctgggcaacacagcaggacccctgtctctgcaaaataaaaattaaattagccaggcacgatggtgcgtgcctgtggccccaactactcaagaggctgatgtgggaagatcacatgaggccaggagttccaggctgcagggagcttgatcacatcattgtacactccagctgaggtgacagtgcaagatcctgtctctgaaaaataataataataaatgcagaagagagagaaaataatgaatgctgttgggtggagtgaggcctgggacagtagaagacagtgtgaaatggagggacctagttggggattggccagagaacgggactttatactcctgagatggaagggaggagttaagggtgaagcattgtattcctttcctgtggctgccctaacaaattaccacaaaccgggtggttttaaaaaacagaaatttttttttgagacttaggtgtatccattactctgtgccaagaactgttctgagtgctatataggtattaaatgatttaatctttccatcaagcatattttcaggaaacagaggcacagagaattaagaaacttgcccaaggtcgagggcagagccgggattcaaaccctggaagtctggctctagagcctctgcttctaaccactatcctctcccgctgctgtgtgatattattaccctatattctgatgtttctgcctccctcaccaattcaggaaccctaagggaaggacgtttgtgttgctcttctctgtgcccatagtacctatcacattgcacagtagggtgaatacatttgttgaattgctgagccatttatgacccagagagttagtaaaatgttgtccttgtttgtcaagggaacaaatgagcctaaagcttaaatcaaactctattacctccataaattctcctctgcctgtttcagccccctctgatctatgtcagcaacatagattaacacttgatgaatctatataaatatcaagcatgttgatcttttctttctcaaaactagattacagaccccttgaggtccctcttattacatttcacaggcactaaaaaataaaatgaggccataaagtaatgagactgactcttaactgtttttttaatttttaaaaaagtatatctgatacctatactctctgagtctttgtttcttattaacaagaaagggacttagattagctgggagagcaaagaagattctattcatgcatctattaccacttataggtagtggactatctggtatgatctttattgaaaaagagttgaaaacaaaagtctgaaattgattactgctgtctggcactggcttaggatcaggaactagtggtatgcgtgctgagtaattgttgacttgggttataaaacctctgagagtccttctagctttaagaacctttagctttatgactgtatattcattcctcagttcattgctgggagccagaggaactcttctgtaaggagctaagggggttcaaagggcattacaagatgataaaatgacctagacattgagtcaactgttctgtgtttgaactgctgatcagtgacatagggataatcatgtaaattgtatatggggctattaccatggtaatatgttctatgtcagtattattagatggtttattacaacagtaatagaaggtctaatatatgtatgtttttggactttatatgtctctaatttaaaatatttgcaaagtacacaatactccaaaaacactaaataaaataatagtttcttcaaaatgacaggaatagcctagttcctatatcctcaaaaccagtgatttccacaacaataatcagtttgacatagggaaaacaaaaaaaagcatagttattcatatataatggggacttttgctttcaatgaggaatatagctttatgtttatgtatttctgaaaagtgatgaaaacagacaaggttgctagtttagtcatatatatttaatttgtattaatatatttattccatagcatgccacagacatgacaatattagcaaaataatgagcactactaattagtttccataatattttctagaaatttgggagttgctagtgagttaagttcatctgcaaaaaaatatatatatatgtgtgtgtgtgtgtatatatatgatattgcttatactttctctaaaatactgagagatatgtggtctctgtctctgtatatattacatgtatacatacatatacatatgtatgtattatatacataatatatacatatatattatatatgtatatataatcttatatattatatataagattatatattatatatatataagattacatattatatatgtatatatatatcttttttttttttgagaacaagtctcactctgtcacctaggctggagtgcagtggcacgatcttggctcactgcaacccctgcctcccaggttcaagcgattcttctgccttagcctcccgagtagctgggattacaggtgcccaccaccacacccagcgaatttttgtatttttagtagagacaaagtttcaccatgttggccaggctggtctcgaactcctgacctcaggtgatccacccacgttggcctcccaaagtgctgggattacaggcatgagtcacggggcccagccatatattatgtatctccatctatcttatctccttagttaagtaccttagagaagagatccttctggcctcgccaaagttctacatattaaagaattaggaaaagaaactgggctttgaatgcttatgcctggtgttttcatttttgcaactaaatcagaatcagatttgaagcatcactgaaatgattctgatttttggttgttctatgcaaggtatatatgactcaagtctatcaaaactccaacaaaatgatctaaacacaaaattataaaatgaatctttaaaatgattttacatattagactctgcacatgcaggttggtatatacaatcttaatgcctcctatgaggaagactgaatataaattgctagtggttggcaaatattgaatatcttgttagatgttgcttaatttaagatacggtgttttatttagtacagtaaaactacaaaattgaagttgctcacctgttaaaaatttgagcactgggcataagaaataaagaaagcttcaaatgaaaacacgctgtgtagaaaatttttgtgtgcaaattcaggatgtggtggagctcaggtgggtaaagcctgggttatgtcagacaaggtaggattaggaatcagttgttagagagcatgtatgcatgtgagagcacttgcttataaagagagaaagctttccacattaattgcttgtgagaaattgtgattacctttaacagagccgagactgaaaataactgtcctagggagtccgtgacacactggcctggtgccagggaagctgtgttcgcctgaggtattgcaaatttcccgtgtcgctggagatttggggtcacagatgctgtgacaactcaagcactctcgaagaaaatgaactcattttagatgacattgagtggcccgtttaaactccccatagcagtgtctattaaagtagaaagtgttttaaatggccttttctattttgtttgttttattttgagacagagtctcactctgtcacccaggctggagtgcagtagtgcgatctcggctactgcaacctccacctcccaggttcaaacaattctcctgcctcagcctcccgggtagctggcagtacaggtgcctgccaccacaactggctaatattttctatatgtttagtagagacggggtttcaccatgctggccaagctgctctcgaactgttaactgcaggtagtctgcccgcctcggcctcccaaagtgctgggattacaggtgtgagccactgcactgcgcccaagaaactgatttagaaagagttaatacattatacttgctgaggaacagccccaaactgcaacaaagagtactctgttgtaattagtacagcccacagtaacacctctgttaatagaaaggaagtgtttcagtgactcactctttttcagaaattttactactttactttgaaaattatctgctgactgcctgttccgttaccaaaggtagaatatttcctttccaataaatagtcctatactttctgggatggacagatctcatcccagctcacagatgcttcatgttcctctcccaggcccagcctcggctatgtgagctccgggcagcggttcccactcagccaagacagggagggatacagtgccctgttctctaccactaatccccagacccagccctgagaagataagacgtcccaccagtcctgcactcatgctgaggtcaccactcccgagccctttcttagtctcagagtccctaaccgtgtccaacacaggacaattgtcacagcagatctccgcatgtctaggaaggctcttgatagtagaaagtgttttaaatggccttttctattttgttttgttttgagacagagtctcactccgtcacccaggctggagtgtagtagtgtgatctcggcaactgcaacctccacctcccaggttcaaacaattttcctgctatcatcatgtgactctctgcttggtctgcatgttgaagcaatagcagactttgggactggaacttggcttcggaaacaccctcagagagggtccacatggccacatggtgtgtttattcttataatctctctgagacaactatttgggtataacacttccagatgtagttaaaactacagcactttggccaggtacggtgctcacgcctgtaatcccagaactttgggaggccgaggtgggcagatcacctgaggtcaggagttcaagaccagcctgaccaacatggagaaaccccatctctactaaaaatacaaaattagccaggtatggtggtgcatgcctgtaatcccagctactggggaggctgaggcaggagaattgcttgaaccctggaggcagaggtcgcagtgagccgagatcacgccattgcactccagcctgggcaatgagagctaaactccatctccaaaacaaaacaaaacaaaacaaaacaaagaaaactacagcacttactcaaccaagggggaaatccttataggagagagcttaggtgagaatgtacaattatttttctaccattgttctattgcttaagagttacctcgttactaataattcagtaaggaattaagtcaacataaaaaaatgcaccatcaccagaaatgcctaaactacagagagcctaatctctgagcctctccccattactggaaaataaactgatactgttcaacttctgtgggtatctcaaagacttgttttctgagccacttagcaggtttcatttaagatttccccaaattatgggccaggcacagtggctcacatctgtaattctagcactttgggaggccaaggcatacagatggcttgagcccaggagtccaagaccagcctgggcaacatggtgacacctcatctctacaaataatacaaaaattaaccaggtgtggtgggtcacgcctgtagtcccagctactcagggggctgaggtgagaggatcacttgagcccgggaggttgagtctgcagtgagccaagatcacaccacagcactcctgcccgggtgatagaatgagaccctgtctccagaaaaaaaaaaaaaaaaaaaaaaaaagattccctgaagtatgagacattgagagagaaagtgagagtgacatattttctcccttgaaaagttctctttggctaaccaaccctaatatcaatatttattgagaatttaccacgagttttatgtacatttatctcccatttgaccctcagtacaatgagttagggggttcccattttaccagatgaggaaactgaaatttacaaggcttaggtcatgtagctgagcacacagagctaggattagcacccaggactgtctgattccaaagcttaggttactaattattaatcattaagcaagtcttcttccttcctagtaaaccttgatacacctacacctaattggtagttagaaccatacttggagacaggcttctttcttgcaaagtggccaaataaagcctattctcctccttcttgcttcatcctttctcagtcttgtagctcatctttattgcgtgtggttagtcctttccgctacgcttctcctacataaaccttctgtttgagcttgaattctagtgaaactcatctagttgctttcccagaactgttgtactttcatgccctaatccttttgctcaaatgtttcactcactgttatcctgcctatccttgaagatggatttaattaccacttttatgttgtagacttctctgactgcagttggagataatctcccttctctacattcttaacccttgatttatatgcataaattatcaccattagcaccaccattcccacgtctgttctgtggcagacatcactgattacagtactcttcactactgagctctgtcatggcctcagaatcctcgaaactttgctccaggcaaccactgttaatcaaacagaattggtgcctaagatgaaaagtattgtttgttgctgggaaaagtttattcatttggcaatcaattaggaactgaatttaaattgagcaagtactgatgttactgataagagaagcagagtcaaagtctgtattttgtcctctcagtccattggtggcaatacatccacaatcactaacatgatcctgagtgtggtaaatgctgcaaggaggctgcagcatgctgtgggccttcaaagaaggtgcaactgggaaagttcctggaggaggccataattggaatggccttgagcaggtgtggtaggatttctgggcttgaagactggaacgagcaagtctgtataaaggtgatgatacacataaggagggcttatcatctcttaggttcaatttcagtattacatggaactataatttaatatatgtgttgctgtgctttcgcactttttcttacctgtttcctaaggacaagaatgcaatactacacaggtctgtcacatcatagcatccagcattgtacttacttcacaggaggtgcccccagatatatctgactgattacaaccttcttcactgaagaattaaaacaggtaaatctttgatgaaccaatcccattgatcccctagaagcccactcagttgtatgagtttttgagtgaagaccatgaggaactcttatgctagcctaagtcatcccaaacatacttaactcctggaatggggaccccagaagaagagcaagtctggttgctaacagttttgaagccattttattgtgagcactgcatgaccctgaagctcccagactggagagcatctctgtaccctaaggaagatctgatcttctcaagaaaccagcaccagaacccacctgatctccagataattctctgggctaattagagaaaatggaagatccatctctttttccataattgggctacagcttggcactgaatcaaccctggatggtagagccttttcagctacggtatttagcaactcttacaccattcattgaatttatttctggattttccccctccaagtgtcctttcacatccttatccaaattctgcccacttctctccctgtctggagattatttctatgataagaaattaattagcctgtctgtactacctgttccaggagactttgaacaactgcgtgggtaaacactagatgtggtcaccaaagagtcggaaaataagtttttactttttcattagcaaaagttaattgtcaaccaggagatgtaacaggcttgctccatttctgctgccgcttcttggatttctttcttgcatgtggagaatttcctgaggtttcaccagactgaagagattctgagttcttgaagtgatggagataaagatcttgttgtcataaaacagcaaagagcactgtgattgggtttgaaagatttttgattgtgttatggacagtgctcttactggtttttaaaaagttgatgttttcttctgtgtaaatttaaataatttctttaaaggcagtaagcttttatatttaatatacctttcactgtgcaatcacaacaggaagattttctaaattagacatctttaccttgaagaagaaacttgtctgtttcagtgtctttttgtagcaagattgaccaaaacaagtggtaaataagtctgtaatatttaactgtcatgaaatacctttgctaataaggaaatggcctcggtttggattaggtggagtttcgtgtgtgcgatgtgggggtgtatgtgtacatatatttctttttttttttttttttttgagatacagcctcactatgtcgcccaggctggagtgcagcggcatgatcttggctcactgcaacctccgcctcccaggttcaagcgattctcctgcctcagcctcccaagtagctgggattacagatgtgcaacaccatgcctagctaatttttttgtatttttaataaagatggggtttcaccatgttggccaggctggtcttgaacttctgacctcaggtgatccacctgccttggcctcccaaagagctgggattacaggggtgagccaccgcacccggcccatatttcctttttttatactggatagcaatatagggtcttgtctttcaccttttaagttcacagaacagtttgtcctgaccacacataagttaccagtataatgttttatgaaggtttagaaatgagctcccagaaaaataatattttaatatctacaaataaataatctgaggatgtttctcaattcagcatcaatgctgggttgtgccttgtggatttccattggctctacgtgcaaaagattaagttagttagaatgaggaagacatttttaattactgtgaaattctttgttgttgttgttgttgtttttctttttgttttgggaaggtgtctcacactgttacccaggctggagggcagtggcatgatcttggctcacttcaaccttcacctcctgggttcaagcaattctgctgcctcagcctcccgagtagctgggattataggcatgtgccaccacgcccagctaatttttgtacttttagtttttgggatggagagtctctgtcacccagaatggagtgcagtggcaccaactcagctcactgcaacctccgccttccgagttcaagcgattctcctgcctcagcttcccaagtagctgggattacaggtgcccaccaccacgcctggctaatttttgtatgtttttagtagagagggggtttcaccatgttggccaggctggtcttgaactcctgacctcaagtgatccactcacctctgcctcccaaattgctgggattacaggctcctgccgtctgacttaatttttgtacttttagtagagacggggtttcgccatgttagccaggctggtctagaactcatgaccttaagtgatccacctgcctcagcctcccaaagtgctgggattacaggcatgagccatcatgcccggccaaattactatgaaattctatcctgccagtgctttagaataacttgcattttaaagtacatttgcacattttacatataatgctatatggttgtgtttgggctttgtgtacagatgacttttgttattaagtggaaaaggcctgaaatatgctgttctatgttaagtaaattgatataacctaagaaaagatcttgttgccaattcagaaaccataaccttaaatagcatgcctgggtctcctctgtatctggtttaacatctgcattgaatattggtattttccaataatctccaactagcttatttattttgaaaaaaaaaaatagaaatctacgtctacttttgcttaagtggaaatacttgagtaatgcttggttgcttttttaacctcaagtcagtaactgtgaaagactggacttactgcacctaagatctagaaccctgaagttatctaattggtgctcatcactgagcttgtgtaggcttcctgaagcctattcagggccctgtgtactagggaaaagggttggcagatcacagtgtgtggagtatgcagccagtaattctttcttagattctctctcccctcttagaacctcccctcatttcccagggaacatctgttttccatgagggcagtactaagggggctgaagattcccacagacatataataaaaggttccaagagtaggctggcggcagtggctcacgcctgtaatcccagcacttcgggaggccgaggtgtgtgaatcactaggtcaggaaatggagaccatcctggataacatggtgaaaccccctctctattaaaaatacaaaaaaaaattagctgagcgtggtggtgggcacctgtagtcccagccacttgggaggttgaggcaggagaatggcgtgaacccgggaggtggaccttgcaagtgagccaaagtggcgccactgcactccagcctgggtgacacagcaagactctgtctcaaaaaagaaaaaaaaaaatagattccaagagtaaacaaaatcctcaagtgttactgtgcaaagattatactcaccatgtttgatttttttggtctctggtggtcatcccagatgcattcacagtcatttctggacctttaatgtaatccactgttgttattaaatgagctgatccacatggagttactttttgaaatcatgaagttccttatgaatgtttgttattgtgtcttaaattctttaaattcttaaaatatgtcttaactcacttaaagataaaagtaaatgtttctgtggtccttctgggagtggggaaagttacaactccacaaatgttaagagagaagggtgaacagttagcagtcaggcagcatggttgggagtcatgaggaagagcattcaagatgacacaagttttgtaagcagacctaaggaacgggctgaagaatgttgtggagacccaggtacttcgacttagcattctgagttcagagttcgcccaggagttccaggcttgtggcaggtttagaaaatccaggatgatcggccaccttctttctcccagaggtcgatctgatcttaagttgtacctgactaaaacctgctgcaggagagatggtcagattttatttacacacagggagatggcttcctaagattgtgtagtgaaccaagaaggtgtttacaggcatgtgaaactggctattgtaaagaggcagtgatctgggacacgtgatgttagttaaagtggaggaaaaggtgtacccttcaagcagaggattccagggcctctccaaaccgtacaagtctgagccaagggacagaaattccatcagtggcttggaagccaaatatttgccctgatactgaggaagggaaagagtggaacgtgaccgtgggatagataaagggtcttcacaggaatgcaaacaagatgataggtagaatcacccatgagattagcaaacaaatcactttaagaggaaaaaagtagaataaagagagtcaaccacaggtagaaaatgcaagactttggaatccacaagtcatagatatgtatctcgggaaataatccaagcacacatgcatggtactgatacacctgtgggagagtgagagtctggttgtcccgagactgatagattcacccacctgctgggctctaagccagttggatatttgctcgagagactagattcctgtgggctggtcctaactttcccaactaagctcaccctcacttgagcccaaaggactcctaagactccatccccaggaggcatccccaggtgaggagctgggcacttgaattgtcatgtgtacagcaccatagccattgtaaaaggagaacatctcacaagtcaggagttactggagagactgtttatgacacacttctgggttcgatggccctgagacaataaattcatccacattcctgtggcccagttttcatgctttgctcatgacatcctccctcagtgattttctcctgcctttcataatcaggtttgatgagcaaaggttagaaagtgcagtggcttcctgggcatgtgcattaaatagcaattaaaatgcagtcctggttcggctcaatgcagcaggtgtcaatcaaacacctacagtgtgtcaagcttgatgccggggcggtggggtacaggaatgagcagacaaatgcttctgccttgggagcttgagatgaaagggaaggagagcacgaattagacctgtttgagggggtaatagaaattcagataaaactgagtagggtccagaggagagattctttccacctgagaagacagcctaggaaaggctttctggaggaggtggctttttaactaggctttaaggggtgggtaggagtttattaggcagagatagtggcaaagggctttcaagggagggcgatctgtgtgaacaagagtgtgaaagcaaaaaagcatgtaaacaaaaaagcatggagcatctttaagaaatagcaaggagtttgctgtgactggatctgctgggattggggggtgagaaggacatgcaggcctgtattggttagggacctggcaggaagcagactcaaaagagtttcactgagcagaattgaatcaagggactatttatagagttcagcagggtaaaaggaatcagcaagggatggtgaggcacccagggatgaataactgggaagctattagctcatctaggcctgaacagacaagagagggtgatggggtttccacagtacagtgagggctgagttgtggcagggaaccaaaaggcagggcctatgtggctgcagaagaacaggggaagggagggcgggagaaaataaaaaaaaaaacccaacctctgtctctttctaccattaagatctacagctactgcctctcatttgctaaacccagccaaaaccagaggcaaggaaccctggatcagccctcccagtgcacagagcaggacaaagaaagacagagggtgaatcggagggcaaatggagagtgactagcacagagccatatggcatgaggtgccatgctgaaaggttttctcgggacatcaagaagtgttgaaaagatacaaagtctaggaatgatggcagggaaattattatttatttactgagatggaatcttgctctgtcccccaggctggagtgcagtggtatgatctcagctcactgcaacctctgcctcccaggttcaagcaattctcttgcctcggccttccaagtagctgggattacaggcatgtgccaccatgcctggctaattttttcatttttagtagaaatggggttttgctgtgttggccaggctggtttcaaactcctgacctcaagtgatccgcccaccttggcctcccaaagtgctgggattacaggcatgagccactacgcccagtctattttgataacatctggtgatactggtggctgttgcttaagggcattatgggaaatgagaggtaagaatggcttccacagcctctagctatataccagcaggaccatctcctgctgttcacacaagcctagccctaggcctctacatctagaaagcattgcccgtgcatctaccagcctttcttccatgcaaggagggcaaatgtggctggcggagaaggcacctagaataccagtggcagcttctctgtctccccactataatttaggactcttctaattgtaagcaacagaaaatccagttcaaacaggcttaatccagaaaggtgtaaggaggcgggggtgacatataaaatttatggctcagataccataagagtctagaaacagtacctggcttccagtacaggggtttaatatcatctggacctgttgtctccttacatacagtctctttacacctgtgtcattttcactcccaagcaagactcttccctggtgttgatacagctgccagcacaggtcaaggtttctttttcccagttccacacccagcaggagagataaagtttctgatccctattagttcaaacaagactccatggccttagccttaggctaactcagccctgagtcagagctccattcctcaatatagtcttgggaccaaaggaacatggtgatctgattggctagaccagggtccctccctcatcctaccatgttcccccaagcttctggactacttagggcttcagctccaccgtaaacaaattgagagttagaaggtatgctgttcactgcagggacaagggatactgtcccttagcaagagcaacagacctgccttttatctgttatgttcttgagctatttcctgaaagcaatcaatacaacactcataagttaaattttattgaattcatagttacaaaagccaggaagtcgtttagttattaaccacatggtttgaaattgatggaattgagacagaaatcactttaaaaactgagagagggtgtcatagtctgttctggctgctgtaacaacatcccacagactacgtagcttataaacaacagacatttatttcttatagttctggaggccaggatgtccaagatcaaggtgccattagattccgtgtctgctgagggcccacctcctggctcatgaatgatgccttctagctgtttcctcacacagtggaagtggcaaggcagctctctgggactctttcaaaaaggcactaatcccattcaggagggctctcccctcacgacctaatcacctctcaagggccccaccttctaacaccatcacattgatgattaggtttcaaaatatgaatttgaaggaggacatacacattcataccatagcagaggagaagaaaaattaagcatgttttgccttaaactcttaagaattctacacacacacacacacacacacacacacacacactacactacactacagcttatatttaatgctgaaagtctgaatgctttccccctaagagcaggaataaggcaaaggtgtccattctcaccatttcttttgaatatctcactggaaacctgggccagtgcaacagggcaagaaaaagaaataaaaggcattttgaaaagaaagaaacaaaactgtccctattcacagatggcatgattttctacacaggaaatcccaagaaattacaaaataaattttaagactaataagtgattttagcagggctgcaagatacaaggttaacacacaaaaatcacttgttatttctatatgttaacaatgtacaactgaaaatggaaatttaaatacattgtgtgacatagctccaaaaggtaaggattaggtatgtaacaaaatatatataggatctatactctgacaattataaaacactgatgaaagaaatcaatgaatgccaaagtaaatggagagacataagttgttcatggattggatgactcaacatagtaatgatgtcagttctcccataattgatgtatagatttaatgcaattctgatctaaatcccagcagggatttttgtagatataccagacaagctgattctaaaattcatatggaggcagggtgcggtggctcacacctgtaatcccagcactttgggaggctgaggtgggcagattgcttgagctcaggaattgaacaccatcttgggcaacgtggcaaaactctacaaaaaaatacaaaacttagccaggcatggtggcatgcgcctgtagtcccagctacttggtaggctgaggtgggaggattgcttgagcccgggagattgaagctgcagcgagccatgatcacgccactgcactcaagcctgggtgacagagtgagatcctgtctccaaaaaaaacaaacaacaaataaaactcatatggaaagataaaggcattagaagagctaaaataattatgaaaaagaagaaagttggaggaatcatcctatcttatttcaatatggttttcaagatatcaagtgtaatattggtgaaaaggtagacatggcaaaaactgcaattacttttgcaccaacctaatagatgaatgaagcagaacagagattccagaaatagacccatagaaatatgcccagttggtcttttttatttttttttaaattgagacagggtctcactctgtctcccaggttggagtgcagcagcatgattgtagctcattgcagccttgaactcctgggctcaagaagtcctcctgcttcagactctcaaagtgctgagattgcaggtgtgagccactgtacctggccctccaattgatttttgacaaaggtgcaaaagctattcaaagagcaaaggatagtctttccaacaaatggtattggaacaactagacatcatatgcagaaaaaaaaatgaacctcaacctaaaatcacattacattcaaaaattaactccaaaaggaaaagagtaagatataagacttttagaagaaaacataggggtaaaatctacatgagctggagttaggcaaagagatctagatgccaaagcacaattcataaaagaaaaaaattggtaagttggactttaacaaataaatctctttctctccaaaaggcacttaagagaatgaacaaacaagctacagactgggagaaaagaattgcagatcatatatccaacttgtctaaatttgtatccagaatatatagagaaactctcaaaactaagtaataagaaaacaaatgatcaaactttaaaaataggcaaaacctgaacagacacttcaccgaagagggtatactgatggcaaataaacacatgaaaaaatattcagcatcgttggccgttagggaaaagtgaattaaaaccacaataagatgccagtaaatacctattagagtggctaaaaaaaaatacaacaccaagtgctgatgaggatgtggagcaactggtactattaaacactgctgatatgggaatataaaatggtacagccactctaaaaaacaatttggcactttcttatcaccttaaatacagctttatgatatggcacagcagtcccactcctgtgtataggtcctagagaaaggaaaacatgttcacacaaaaatctgtatgtgagtgtttatagcagcactctgcataatcaatcaaaatgggagacgagtcaaatattcttcaataagtaaataaactactgtctatccataaaacgtgatctattcagcaagagaaaggaacataccattgatacgtacaaaactcagatgaatcttagaggcattatagtcagtgaaaaaaccagtctcacaacttacatagaatatgattccatctgcatgatagcctcaaaaagacaaaaccatagtggtggaaaacagactagtggttgctagaggttaggaatggagaaaggtgtgactagaaagatacagcatgagagagctctttggcgtgatggagctgttctatattctaattttgatggtggctataagaattttaacatgttaaccatagaactgtacactaaaatagtcaattttattgtatgatcaacacatgtacacacacatacaaacatgcccttaagagtcagttggtgcatacatgtccagcatttgcaagagagggtctgtgtttactggtggggaattcctgttttctactgagttctcatccctgaaaagagcaaaaccttgagtggcctgatgctgccgtaattcccattgaggatatctgacctaattgttttgggtattgttgggcatggaaggttcactaacatcttaagataacattcacacggccagccagagcctccctggttatctggcttggggacgcacatgtcacatggatcttggaggaggttgggaaggctttccaaatacacttgggctgagttttgaagtcactgaaatggtaatcagataaatgagagagcagagggagcaataaataaaggctcaaagacatgagcgcagggcagaactgacacagtgggcatggttggggttggggctggggctagggtgggtcagagagcttgcatgccaccctatgttaggggaccactgaaggggctttaagctggagagtgactccgccagatttgcatcctggaaagatagctctgacttagtttgcagaatgaactggcagagacaagattgtatgcagaaagagttttaggaagttgatgaagtagccttggtgagaaatgcagcggacctgaaccaagacagtgtcagaggccatcactcactttacattacattacattactttacattacagtgtaaaggccatcactcacttgtcttctgactgggctggcaggattcaagcagccggggctcctgtatcccttttctcgctgactctctctctcctcttctctttctctctctctctcccccaacccccacccccactatactccctcttgctctggttttcccatgttgcctctccagcatggcagcttcaaggcagctggacttcttacatgatgcttcagggcttcaaagtgagtgtcccaagaagaaaactaatcagatgctggcctcttctaacctatctcagatttcacatagcctcactactgctgcattttgtctatcaaggtgatcacgaaggccaacccagcttcaagagacagggacagagcctccattttctgatgggaagagtatcagatattctataggcctatttttaaagtaccaggggacccagaatgaaaagtctgaggttttctgaagggaggatagatacgtttatttttcctttgttgggtctcatgtgcaggtatccaggtagagtcccagcaggtaattgtatattgagtttgtcactggggaaacagcatgaggcaacagatagagatggaaatggaagctataaaaacagatgggatccctgtgggagagtgtgctgcccaagaagagggtggaagacaaacccttgatgaacatcaacaatgtcaaaggtggagagatgagaacttatccagctggctgagttcctctagacatccaactggttttcactcctagagtactgcagtctgagacttctctgggattcagtattctcttggtaaaagagtcatctttccagcaggactgaacccttgcttgcccagatcaagggtcctcttccacctctcacagctggctgctgagtcagaacctcctaccttcctcccaaggccaggctgtgttgtggagccttctgtcctgtgtgtttccagtatgggacaaggcactagatcctccaccctcttcccagttagctatgttccctggagtaaaagagtctttgaacaagttgttaggaaagtttctcctcttcaaccacttcaaaatgtccttttgagtgtaagccacatccaaataattagtcttcagttccagatcctgttagagagccacactggtacaggagctttcctgattcctcttttgtgagttgccataaagaaagaggaaatgacctataatctatgaaagagccaggttctaaaacagatcattctgacttcagagctcagcccttcaccctaggcatccctccaagagacaccagcatgaacttacccagaacgggcctgaacatttgaacaactgaacacaatacaccccagctggctcctggcagattgcactccagtgtggtgagtttaatttgagcaagcagttgaaataaaacagggctggctgtggggatgtggcagagccagaatggcttctcttgatcttttttttctctctgggaaacaagatgaattaatgaactgattcatactcccttttacccaaagtctgaaataaaccacccttatcatctcatcaaacctttacccgacccaaactatggatctgggattcttactcttctcttgccttcaatctatcccactcctgatgaagttccttcccaacttccaatcccatgggcttcactttcctgcctataaacagctgtcaactgcctgatttccctatgctaatccattctacacattttaaccaggcttttctccaatctaggctggcttttacacaaacatgttcaatggctattcattatccttaaaaactaatctttgtatattatagtttaacacacggtttatctcattttatcctcacaatgaacccattatatggaagggaacttagggtcagagaagtataaattctcctccctggcattcaagggctttcatggtgtgccccaagtgatttcctagtcttggttttctaaaccacccctcaagcaccagccaaactactgactgaacacactcttatcacctctttatggaagaaacagaactttggtgtccaacagaactggatatcgaagctggccatgtgactttggacaagtttcctaacctgtgttacattattatctttatctgtaaataacaggctttttagatcagatgattaaataaaataacgtattataaaagtgtttgggccttaggcacctgacacgttaatttcttcttcccctgcccctctgtctttaggtgttctctccactctccaccgtcctcaatagtccccgcctagtgaattccttctcactctcacatccaaggttcatctaaaattctttcttaatctcacctagtgtgaatttcaagggtagctctgaactcctacaactttggggtggccgttcctatagactagcttgttctcttgtcttctgtcttgtcctgcctactagaatacaatttctcagtggcaggagcagcgtcctctctttgacctcacaacatagcacctctgtggtgctggcacgaagaagtcatccagaaaacatttgtaagattgactcaagaccacgggaggcttcttgtgttccacgtgctgatttcctgattgctgtgatatttgctttcggctgaacactggtcaccttccctcttctgttattgtgtaccagaatgaaagatgacagccaggaggaagtttgcttgcagaggtatgtgggctgagctcacaaaatttaacaattgtttttagcttttgttcacattttaaaaattgggtggtctcacacaaagacctagatttttagtttctctttaaaaattcaggagaaaaggccaccatggaccctcactttcatgtgatggggcttgggcagagacatcaagaccaccacagacccatgggcctgcttccctcacttctgccctgatccctgtagccttgtacgtttgcagtctttgatgtcaactgaaaattgttgaaatgtatttcaaccctatctttaagaatgaagttgtagccgagcacggtggctcacgcctgtaatcccagcactttgggaggctgagacaggtggatcacttgaggtcaggagttcaagaccagcctggccaacatggggaaactccatctctactaaaaataaataataaaaaaacttagccaagcatggtggtgggtgcctgtaatcccagctactcaggaggctgaggcaggagaattgctgaacctgggaggcagaggttgcagtgagccgagatctcaccattgcactccagcctaggtgaaagagcgatattccacctcaaaaaaaaaaaaaaaaaaaaaaaaagaatgaagtccttactttttttttgattttaggacagatgaccaaggaggtgttacttccttgagtggtgaaaaggttcttctactgcatggggttttttgtggttttgttttttttttgtttttgagataaggtctcactctgtcacccaggctggagtgcagtggcatgatctcagctcactgaagcctcagcagcctgagctcaagcgatcatcccactttagcttccctaatagctgggattacacacgtgggccactgcgcctggcctacagtatggtttttaaatatctttgtgctctccctctgtagacatctttcatttgcttagaatctgtggtgatggaggcctcatgccctattccaactccagctgcctgtcaatgtagtgtctgtagcttctttcacatggagaagctatcagtcccattctgtccatcaaggtagagtgaaaaatatcaggtcactctgctgcctctaccacctttcagcactgatggctccactccctgaggggagaggcacaagtgacagggaaggaagaaagaagaagaattttctcactttgtgatttattgcatttaattctcaccctgagtctgagttgggtatcattccttcttgacttatagcaaaatcaaggcacatagaggctgtcctttatgctccatcccaaagctagaaaataaatgatgagtggtttgggcccggttgtgtctaattgtgtcatgttttttcactattctgtctgccttagggtctccaacccctttcagctgtatttataagactgatgtttgcagaactgtttattagtttgcaggactgtttattagacaactacaaacggagctgaaataaaactttggtttctgtttgctctaaagagaagtttctgttcaatcctccactgggagtgtgtctttaggcctctaaattttataccataactatttgtataatttgaatggtctccaatgaaatggatacaaataataataaatacattctaaaatagcaataatgcatgacattggtttagatcacagtgtttcctatgtacattttctctttgggttcacccaacattctcgagataccctcactcaagtttttagataaagcaatcaaaaagcaagaggatttaaatgacataggtaagtatgcatgtggtagaaatggaattagaatccagattcttagctcctcttttcattatctgatcctgcttggtttttactcacaccaggcaataattttgaaagctctgctctctctacttgtgatattattatctgttgttattattcaatcataaatatttattgagccttcctgcaggccaagggcagggctaagtcctgtgcattcattatttcacttaatgctcaggacagccatatgacataggtactcttctcatttctctttaactgatgaggatacagaggcttagagggattcagtaacttatgtaaggtcacactgctagtaactggtaggacatactcaactccagataggtgactcatggaaatttctgctgtgtcttacatcttcacctagattgtaaaccacatggggacccggaccacatgtcctccacagagcttagcaaagtggttgtatgcacaggtatgcaagtcattaattaatgacagttgattttttctcggccattagcttttattttactttatctatagggattttcagatcacactgttctcaaaataatcctggttttctgttggctgttttgatttatctttagacactgtaattgaaaattaagctcttaagcatctcctttacaggctatgttccacaatctgtaatcacaacttttctttaaattgatcatcatcttttgagctgttaataaacatgtctggcttcatttgggttttcaaattgttatttccagacggtgagactttcagatctgataggctcacacacatcctgccaagtggaagtttgagcaaaatgtcacatctttggcaatatttgtgctattagtatgatgattaaaggaaaaagaaaagtttcactgtgatgtcagcagctttcccacctcatgaaaaagccatcaaattatcaaccaatcaaaattaaatgaatcccatttaattttattattatctatttttcttttttccccgttttaaaaatgaatttggttcatttgctttctgcttctggatttgcctgttctggacatttcatataaatggaatcatataatacatggacttttgtgactggcttctttggcttgtttcacttagtgtaatgttttcaaggctcatccataccacagcatgcagcagtgctttattcctttttatggctgaatattattccattggatagagatacaatattttgtttatccaataataaattgggcacttagattgttttcacatttggctattaggaataatgttgttgtgaacatttcttgtacagtttttgtgtaaggacatgttttcaattccagaggctatatatctaggcatgcaattgctgggtcacatggtaactctatgtttaatttttgaggaactgccaaacagtcttccacagaggctgcaacattttacattctcaccaaaaaggcaaaaagattccagtttctccacatcctcaccaacatatatcattttctcttttttgtgttttttaaaaatagccattctaatgagtacaaagtaacatcttattgtggttttgatttatatttccctaatgactaataatattcgacatctttttatatgcttactgtccatttgtatatcttcattggagaaatgtctattcaaatattttgtctatttttaacaatttggttgtcttttcattgttgagttgtaagaattctttatgtattctagacccttaccagatacataatttgcacacttctcttttttgaataaattgcaaagcaacatttttcaaaaaaatttttaatttttttctgccatattgtgaagcttggttgtctctaccaggtactacctcctatttacccataagtatttggaaggtcatcaggatttatgctcaaaaatggagtttgggggtgagaaggaagcactttgtttggagagggttttactgttgaggccctgcattaatcccctctgccacctccaggaaagctgtggtcacatctggtatagtagaaagtgccatggtggctgaggaagcttgtgggtttatcacatttttatccatggtggcatggacaccttgtttttgcttccgaattgctcttaaagaaaaattctggggcggatgaaccccatcatcatccaggaagaatatttgcagcacattttttcttgtcatgatgagtttgctgtttgagacggtatggtaagaagctttataatggctggctagtgtcattttccctcatttaggctcaaccgtgactttatatctgtatactttatggaaggcctggagcctcacactgaggcagaagagggaaggggcaagtgcagttgatggtggcagctaagtgggagagaaagtcagcgaagacaattatttattcaagacctttacaaagggagcagccccacttgtttgcatgttgattgaaccataccttagtgtccagttgcttgaggcttgcagcagcatctttatgctcttcaaagtgagtgctgccattggtagcaaggtcttatggatgcccttgctaggcccatttccttctttgttattccaagtatacttctaatgaatcagaacctgcctctttttttttttctttttttttttttttgagatggagtcttactctgtcgcccaggctggagtgcagtggcacaatctcagctcactgcaagctctgcctcctgggttcgtgccattctcctgcctaagcctcccgagtagctgggactacaggcgcccaccaccacgcccggctaattttttgtattttctgtagagatggggtttcactgagttagccaggatggtctcgatctcctgaccttgtgatctgcccgcctcagcctcccaaagtgctgggattacaggtgtgagccaccacgcctggcctgaacctgccttttaacaagaccccaaggtgattcaaggcacatcaaagtttaagaagcatagatttacattatattctgtctatccctgcacatctcacatggttattcagcctaatgtccgtgtgagtcagtcttcctctttcttttcatgccttccatggatttcacctggtgtactcttgataccatctgtattagcctgttctgacaaggctataaagaaataccggagactgggtaatttataaagggaagaggtttaaataactcaaagttctgcgtggctggggaggcctcaggaaacttacaatcatggcaaaaggggaagcaggcaccttcttcacaaggcagcaggagagagagtgtgagcgtgtgaaggaggaactgtcaaacacttataaaaccatcagatctcatgagaactcattcactatcatgagaacaacatgtgggagacccccacctccatgatccaatcaccttccaccaggtcacctcccttgacacatggagattatggggattacaattcaagatgagatttgggtggggacactgccaaaccatatcaccatcctagtactggctgcagcttcctttaattactggatgaagaaacacaatcttttgatcaactagcatttccctgaagcacttgtaaacaattccataaaaatcctgagataggtacctatttgtgtttactcttgaactttccccagcctcctcctccccatccctgtcttcccacagctcaatacttccaccttccattgttcagtaccccgctgtgactcctgcctgtgctgagttgcatctatgattgactctcattagatgtgagctccttgagggaagggtcttacatcatccatttttataccttgattcccacccctggacctaacacaggtccttggacatagtaaatatttgcagaatttaattaagttattgagtcacattggaaataatttcagaagataccaaatgccttttctttttttttttccacatgccatttgttctcgtaccactaagaccctaagacttttattttgttgatatcaagtggtataaatattaacaaacattgtattatatatcataattttaactctgaagtttttaatttatagaacaaaagttaatatttctctaccaaaataaatgtcatagactgaggaaagaattttgttaatttggtcataccaaaaatatttaacattaatttctctcctcaacttctgactctgctgctccttaactctgtaaccatgacttacctgtcaaagccaaaactcttttgagcatttcatgagaaaatctataaagagtatatagcctacaataatagctaacatgtattagctgtacttacagtgtgagccaggtactttttattctaagtactttacatatagtctcattttaaaatctcctaatgactccatgaggttgatattttgttcttcccattgttataggtgaggaaacagaggcacaggctacagggtattttgtccaagataacacagctaataaagtggtgaggccaagatttgaacagtctcttcttaaagagcctgcctcctgaagggttactgatgaattcctttcttccttcaaaatgcttcatgtgatttaacatgccttatttcattgtgtatattaaaggccctttgtttatacattactctcatctatatttccccatttggccaatgcattgtataaattaggtgatctgtaaatgattgttggctaattgatcctatgtgcatacatgggaatacttggaaaagcaatgattgttttaatataacaagttcttgatgtagcaagattgttcctatacattgtggaactctcaattttaatatttactgactccattatccatcttaaaatgggcatatcggaaagggtaaggaataaataattgatggtggtgtcacacatctagtaatatgatagttgagctaatatgaattggttctcccaccatctcaaacacaaagaaatataaaagtcccctccagaccaatgcagagccaaacccaaactcaaaagcaataaaggaaatgcccttgtgccagaaataaaaagggaactcaaagccagaagtataaacaagatctggtgctaaggtctagacctgtcttaatctgttttgtgtggctgtaatagaagacctgagactgggtaacttataaagaaaagatgtttatttaggtcacagctctgtaagttgggaagttcaagggcatggccctggcttctggtgaagactttcgagctgcatcaaaatatgatagagaaagtcatctcatcttgggccatgtgtatataatttaattttaataactaatataaaattattgttaaaatatggtagagaagatcaaaggggaagcagatctgtacaaagaggaaaaacccgaggggtatcctggctttataacaacccactcttgagtatactaatccattcccatgagaactaatccagtcctgccagagtgagaactcgctactgcaagaatagcaccaaactattcatgagggatccagctcatgaccccaagggctcccactgggccctgccttccaatactgccacagtggggatgaaatttcagcatgagttttgctgaggacaaaccaaccatagcaagacccacttacaggctttaataatgggagataggggtcttaatatccacatggggaaaagtgatatgatcttggcccacgtgagtgaaggagtctaaacgaaaccttgacataaagtctggaaccacaaaatttggccctgcccttggaaacaagagcagagaaattctacctagtgactaaggaaaaccttaagaaagtttgccatttgtccatggctaaaataagaggttaagagggtacccatgagaagattaaaatccagatttatacttccctcagtgcatcatctaaatttacaccactgtgtaatgccgatttatcaagctgaaaaattaatatgaaaactgtcctggaggacttgaaactcctaagtccccagaaaaaataagtagcctgtaggtagactttcacaactcagaaaaaagccaaccccctcctcaaaagacaagcctatgatcaaaaattacaaattacacaggaaaagacccagtaggagaataggtatcccccaaactggagatgatagaacagtctgaaataatatatactaaatatgtttagaataactaaagaaaaacaggtggaatagaaactagataatagaaaaatgatagtgtgaaaaggatactgtaagttctagaaatgaaacttagagtggaattaaaaattcagtgaatgaattaaacatccagtaaatgcaactgatgtaaggactggaaactgcaaaataggtgtgagaaaaatcagtcaatgcatcacagagagataaaaaatggggaatatataaaaaccctccaaggacccatagatttggaaactgaaactcatattttttcaaagaatttacagttcaaagaaaaaaatcacaacatagatttataagatatttagaactaaacaaaagtaaaaataccatataataattcacaggacatcaacacagaatttagaaggaaatgtcttatatgcatatactgaaaaacaaaaacaaagctataattccagcactttgggaggccgaagcaggagggtcagttgaggccaagagtttgagaccagcctaggcaacacagtgagaccctgtctctacaacaaaacaaaacaacaacaaaaaaactcacaaagataatgataatgagctaagcgatcaactccaaaagggagaaaaataacatagtaaacctttaaaaattagatggaaagaatttattagataagagcagaatttagacatatagaaaacaaaatagggaatgtgatatggaatactgaacagcactttgaatgaactggatctacttgtattaatattaataaatctcaaaaacacaaaagaatttcaaaaacacaaggcaagagaatacatccagactgataccatgtgagttagatttttcaagcacaaactgacgtgagtagtagatgtataaaggcatggacaaaaagtaggctcaaattaagtgattatctaatctatctaagagaagatggaattggggaggatgcaatggaccctcaaccataatgttttatttggaaaaaaagatctgtggaggatttgttcagtctgcgtggtggatgtatacatgtttatgtatttttacttttcattgaaacatttcagaatactctttcaaagaatcaataattcagattctgtatactgaatagaattctaacaaaattacaattaagaaataaagttaatgccagtgttgcatgaggtttttactcatgtggtttggttgtagtaagggatctacaatagttgtagtaggcagttctgagacggcacccaagattgctacttcttggcaaacataccctgcataatccccttactttaagtgtggatatgatgggatttcacattcataattagattacattctttggcaaaggtaaagagacttttgcaaatgtaattaaagtccctaatcagttgattttgagttaatcaaaacagatgatcctgggtaggcctgacttaataaagtggaagcccttaaagagactgggcccatcctgctgactctgaagagggaagccactgtgttgtcagagggccacatggcaaggaacagtaggacttgcaggagccgagaggagcccctgttgacagccagtaagaaatcctacaactaccaggaagtgaatcctgagaacagcatcatgagcctggaagagaaccctaagctccaggaaggaatacagcctaattgacaccttactgaagccttgtgagaccctgagcagaggactcagtgtagctgtgctcagactcctgatccatggaaattttgaaatattacccgtgtgttgttttaagctactaaatttgtggtgatttgttacacagcaatagaaaactaatgcagtagctctatctaccctgttgtatgaaagcagtttgtaaattgacatgctatataaacagtgctggttttgttatggcattgattattcacattttatctgagtactatgatcaatacactagactgttatggtatactacatttgccattctgctataccttctcttagagcacaattttgatggagataatcaaaccaggttctcattttagataaaatttccacaaaagatctacagaaattgtttctaagcttatattacaaaaatggcagcacctatccaatgctaatgtctatgcgaacatctctattatatggagtttgagttttgagaccattttcttaccgttttgaagccatactatggggctcacttcactgatctagtagatgttctgggtatctgtcatggcaaagtggtaagtcttctgaaaagaagtggcatctcaacttgaactttagaaaatgcaagaaataaaaccctcctgaagtaagaccaggagcacatcagaagactcccttattggggtcacaaactaagaacgaaagaatacccacctcttgttactcagcttattctgtgcatgttatcctctgtgtttatttccctctcgtcaccccctagtttttagtaaagtctcatttaaaccttctagtgtagcttctgttatgccagggatattaggagcatggacactttgatgcataccacgatgcggtgatgacagtgctaattgatcagagtctccccaagggaaagacatctgcaggaacaagacacaaaactgtacagcccacctccccttctcacaagaagatacttcctgcatggaaaatcttggaggactggagtttgattttattaaaaatgcaagttaggaggtgggcacagtggctcatgcctgtaatcccagcactttgggaggccgaggcaggcagatcacggggtcaggagatcaggaccatcctggctaacatggtgaaaccccgtctctactaaaaatacaaaaacaaaattagctgggcatggtggccggtgcctgtagtcccagctactcgggagactgaggcaggagaatggcgtgaacccgggaggcggaggttgcagtgagccaagatcacgccactgcactccagcctgggagacagagcaggactccgtctcaaaaaacaaacaaacaaaaaaatgcaagttagattttcttatagtttgagagtattctggtttaagaaggtgggaagaagtaaaattggttgaggatctaaggtataaagagatgataccagaggtttgataaattgagccctaaccttaacagtacatgcttctcagtctacattccgagttggctgtaatatatgcggcctcatccactcttacctttctttgtgacactgatacccttatcaacacacttcatccacgtctctttcttgtgctctatacacacatatccgtgtcttcattaagcatcttcccctcagtgtcccatccaaaactgaactcatcatctttagaactatccatattacccactttggtaggtatcaccatccaccctgttacccaagctagaaaacaagaaccccagaacttcactttcttcctcatctctactgccttccaccttcagacatataatttatcaccaaatactaactcgtccacctcctaaatttgttccccttctccactctttaacaccgctcaccttggatcacagcagccacttacaggattcgcacactgctttctaatgcaaaactccttccaatgaaggagtaaatcctccagaggcttcccactgccttcaggatcagcttcaaatccttagcttggcgtatgggatccttcaccacctgcttcttcttacttgtgcagttacgtacatctacctaattatgggccacactgaattgcttgaagctgtttaaatgtgccaagatatcccagatttctgacctttaagcctttgcagtagtcttacgaattcatactcgtcctttcccagacaaatgtctctactcttttgatgaaactgtactgtcttccatccttaagggcaggggacatgcatccagctgtctttgtagtcacacagtgtgccatgatgcctatttctgtaggtgctcaataagtgtttgatgtgtatttattaggataatatacctatgtatgagtgaacaaatgaatatgcagatgaatgaataagtgtaaggaggaatgaaggatgaattagataattaaaagcctctgccatcagtcaaaatgaaactttttttgtgtgtgtgtgtgtgttgtagagatggtgtctcattatgttgcccaggctgatctcaaattcctgggctcccaccttggcttcacaaagtactggaattacaggtgtgagccaccatacctggactcatttttaaaatatatatatacttgattacttcaccacaatagtgtccttttgctcatggcccatgggcctagtcccttttagagttctcagtcacctgtaagatacatgccttgaatgctaccaggtgataaatttgagttggacaatgaagaaaatattgtacatgtattttcttatttatttagaccaaataggctgagagagtaacttgaatatttaagagcttccttaaaatgcaccataaataatggaaagtgaatgacttgattacttcccttatttttctcttatttttatttgggttgataggaaggaggaggtttgtggagggggagaaaatataaaacagtggaacatgcaaaaagagggcccaattcttccctttctctcaatttccatgatataactaactctgatctctcatggtgggcaatggaatattgtggataaagtctggataactgaattgtcaaaaccctccaatatggaccactaattaaagcactgaaagcacaactaagtgtactcagtatgttaatgatgcagaatacaatgtaacctttgattcaggagcggcttcaagatccaagcgtcctgggagaagcagcaatccctcttcctgggcgcagagatgctggtttaacacagtcatgtgtcagagaaaactagtttttcctgcaggcccaaatcctaccctagagaaacccattagacctttaccaaaatcaacttttcttctgagtcagaccgaattcttaattgtaggtgatagaccaaaagggaaagatgactcaatgtaaataatcgttgctattgacaaaacagtgcaaaccacatttcctgttgatggtggagtcacccatgacggaaaacatttttattgctttaataacacaattatattattttttaactcttccccttcaaatcctctagcacttaatatagtgcttgggatatatttggatattaataaatgcaaaagtgttattgcctctttttgaattaacatactacaaagaatgtgtttactgtactttcttaccttaaaacttaaacctaaaaatgtatgctaatatgaacctttgcttgacatttcatgcttgcctctttggtcgctaggaaaagtcagcaacattcagcaaaactgtcaaggattggagcatttaatagttggctgatggtccacaggcaagtccatccaaacagccaaagttgtattactcagtgtttttaaaagatgaagatttggggtggagccaagatggccaaataggaagagctccagtctacagctcccagcgtgagtgactcagaagatgggtgatttctgcatttccaactgagataccaggttcatctcactggggagtgtcggaaagtgggtgcaggacagtgggtgcagtgcaccgtgcgtgagccgaagcagggcgaggcatcgcctcacccgggaagcacaaggggtcagggaattccctttcctagtcaaagaaaggggtgacagatggcacctggaaaatcgggtcactcccaccctaatattgcacttttccaacggtcttagcaaatggtacactgggagattatatcctgcgcctggctcagagggtcctacgcccgcagagactcactcattgctagcacagcagtctgagatcaaactgcaaggcagcagcgagactgggggaggggcgcccatcactgtccaggcttgagtaggtaaacaaagcagccgggaagctcgaactgggtggagcccactgcccctcaaggaggcctgcctgcctctgtacactccacctctaggggcagggcagtgccaaacaaaaggcagcagaatcctctgcagacttaaatgtctctgtctgacagccttggagagaatagtggttctcccagcacacagctggacatctgagaacaggcagacagcctcctcaagtgggtccctgacccccgagtagcctaactgggaggcaccccccagtaggggcagactgacacctcacatggcagggtaaccctctgagacaaaatttccagagaaatgatcaggaagcaacatctgctgttcaccaatatccactgttctgcagtctccgctgctgatacacaggcaaagagggtctggagtggacctcaagcaaactccaacagacctgcagctgagggtcctgaccgttagaaggaaaactaacaaacagaaaggacatccacaccaaaaccccatctgtacatcaccatcatcaaagaccaaaggtagataaaaccacaaagatggggaaaaaacagagcagaaaaactggaaactctaaaaatcagagcgcctctcctcctccaaaggaacgcagctccttaccagcaatggaacaaagctggagggagaatgagaatgacgttgacgagttgagagaagaaggcttcagatgatcaaactactctgagctaaaggaggaagttcgaacccaaggctaagaagttaaaaaccttgaaaaaaaaattagacgaatggctaactagaataaccaatgcagagaagtccttaaaggacctgatgaagctgaaaaccaaggcacgagaactacgtgacaaatgcacaagcctcagtagccgattcaatcaactggaataaagggtatcagtgatggaagatgaaatgaatgaaatgaagtgagaagagaagtttagagaaaaaagaataaaaagaaatgaacaaagcctccaagaaatatgggactatgtgaaaagaccaaatctacatctgattgttgtacctgaaagtgatggggagaaaggaaccaagttggaaaacactctgcagaatattatccaggagaacttccccaacccagcaagtcaggccaacattcaaattcaggaaatacagagaacgccacaaagatactcctcgagaagagcaactccaacacacataattgtcagattcaccaaagttgcaatgaaggaaaaaatgttaagggcagccagagagaaaggtcgggttacccacaaagggaagcccatcagactaacagctgatctctcggcagaaactctacaagccagaagagagtgggggccaatatgcaacattcttatagaaaagaattttcaacccagaatttcatatccagccaaactaagcttcataagtgaaggagaaataaaatactttacagacaagcaaatgctgagagattttgtcaccactaggcctgccttacaagagctcctgaaagaagcactaaacatggaaaggaaaaaccggtgccagccactgcaaaaacacaccaaattgtaaagaccagagaggctaggaagaaactgcatcaactaacgagcaaaataaccagctaagatcataatggcaggatcaaattcacacatagcaatattaaccttaaatgtaaatgggctaaatgctccaattaaaagacacagactggcaaattggataaagagtcaagacccatcagtgtgctgtattcaggaaacccatctcatgggcagagacacaaataggctcaaaataaagggatggaggaagatctaccaagcaaatggaaaacaaaaaaaggcaggggttgcaatcctagtctcggataaaacagactttaaaccaacaaagatcaaaagagacaaagaaggccattacataatggtaaagggatcaattcaacaagaagagctaactatcctaaatatatatgcacccaatacaggagcacccagattcataaagcaaatccttagagacctagaaagagacttagactcctacacaataataatgggagactttaacaccccactgtcaacattagacagatcaacgagacagaaagttaacaaggatatccaggaattgaactcagctctgcaccaagcagacctaacagacatctacagaactctcctccccaaatcaacagaatatacattcttctcagcaccacacctattccaaaattgaccacttagttggaagtaaagcactcctcagcaaatgtaaaagaacagaaattataacaaactgtctctcagaccacagtgcaatcaaactagaactcaggattgagaaactcactcaaaaccactcaactacatggaaactgaacaacctgctcctgaatgactactgggtacataacgaaatgaaggcagaaataaagatgttctttgaaaccaatgagaacaaagacacaacacaccagaatctctgggacacgttcaaagcagtgtgtagagggaaatttataccactaaatgcccacaacagaaagcaggaaagatctaaaactgacaccctaacatcacaattaaaagaactagagaggcaagagcaaacacattcaaaagctagcagaaggcaagaaataactaagatcagagcagaactgaaggaaatagagacacaaaaaaacccttcaaaaaatcaatgaatccaggagctggttttttgaaaagatcaacaaaattgatagactgctagcaagagtaataaagaagaaaagagagaagaatcaaacagatgcaattaaaaaatgataaaggggatatcaccactgatcccacagaaatacagactaccatcagagaatactataaacacctctacacaaataaaccagaaaatctagaagaaatggataaattcctggacacatacaccctcccaagactaaaccagcaagaagttgaatctctgaatagaccaataacaggctctgaaattgaggcaataattaatagcttaccaaccaaaaaaagtccaggaccagatggattcacagccgaattctaccagaggtacaaggaggtgctggtaccattccttctgaaactattccaatcaatagaaaaagagggaatcctccctaactcatgaggccagcatcatcctgctaccaaagcctggcagagacacaacaaagaaagagaattttagaccaatatccctgatgaacatcgatgcaaaaatcctcagtaaaatactggcaaaccaaatccagcagcacatcaagaagcttatccaccatgatctagtgggattcatccctgggatgcaaggctggttcaacatatgcaaatcaataaacataatccagcatataaacagaaccaacaacaaaaaccatatgattatcttaatagatgcagaaaaggcctttgacaaaattcaacaacccttcattctaaaaactctcaataaattaggtattgatgggacgtatctcaaaataataagagctatctatgacaaacccacagccaatatcatactgaatgggcaaaaattggaagcattccctttgaaaattggcacaagacagagatgacctctctcaccactcctattcaacatagtgttggaagttctggccagggcaatcaggctggagaaggaaataaaggggattcaattaggaaaagagaagtcaaattgtccctgtttgcagaagacatgattgtgtatctagaaaaccccattgtctcagcccaaaatctccttaggctgataggcaacttcagcaaagtctcaggatacaaaatcaatgtgcaaaaaatcacaagcattcttatacaccaataacagacaaacagagagccaaatcatgagtgaactcccattcacaattgcttcaaagagaataaaatacctagaaatccaacttataagggatgtgaaggacctcttcaaggagaactacaaaccactgctcaatgaaataaaagaggatacaaacaaatggaagaacattccatgctcatgggtaggaagaatcaatattgtgaaaacggccatactgcccaaggtaatttatagattcaatgccatccccatcaagctaccaatgactttcttcacagaattggaaaaaactactttaaagttcatatggaaccaaaaaagagcccacattgccaagtcaatcctaagccaaaagaacaaagctggaggcatcacactacctgacttcaaactatactacaaggctacagtaaccaaaacagcatggtactggtgccaaaacagagatatagaccaatggaaagaaataatgctacctatctacaaccatctgatctttgacaaacctgacaaaaacaagaaatggggaaaggattccctatttaataaatggtgctgggaaaactggctagccatatgtagaaagctgaaactggatcccttccttacaccttatacaaaaattaatacaagatggatgaaagacttaaatgttagacctaaaaccataaaaaccctagaagaaaacctaggcaataccattcaggacatcggcatgggcaaggacttcatgtctaaaacaccaaaagcaatggcaacaaaagccaaaactgacaaatgggatctcattaaaccaaagagcttctgcacagcaaaagaaactgccatcagagtgaataggcaacctacagaatgggagaaaacttttgcaatctactcatctcacaaagggctaatacccagaatatacaatgaactcaaacaaatctacaagaaaaaaaaacagccccatcaaaaagtgggcgaaggatatgaacagacacttctcaaaagaagacatttatgcagccaacagacacatgaaaaaatgctgatcatcactggtcatcagagaaatgcaaatcaaaaccacattgagataccatctcacaccagttagaatggcaatcattaaaaagtcaggaaacaacaggtgctggagaggatgtggagaaacaggaacacttttacactgttggtgggactgtaaaccagttcaaccattgtggaagtcagtgtggcgattcctcagggatcttgaactagaaataccatttgacctggcaatcccattactgggtatatacccaaaggattataaatcatgctgccataaagacacatgcacatgtatgtttattgcagcattattcacaatagcaaagacttgcaaccaagccaaatgtccaacaatgatagactggattaagaaaatgtggcacatatacaccatggaatactatgcagccataaaaaatgatgagttcatgtcctttgtagggacatgtatgaagctggaaaccatcattctcagcaaactattgcaaggacaaaaaaccaaacactgcatgttctcactcacaggtgggaattgaacaatgagaacacttggacacaggaaggggaatatcacacaccagggcctgttgtggagtggggggaggagggagggatagcattaggagatatacctaatgttaaatgacgagttgatgggtgcagcacacaaacatggcacatgtatacacatgtaactaacctgcacattgtgcacatgtaccctaaaacttaaataataaaaaaaaaagatgaagatgtttaatgtgggggaaatgcttatgacttaacattaaatgaaaattgctttttaaaaaaatcacatgcggccgggcgcggtggctcacgcctgtaatcccagcactttgggaggccgaggcgggtggatcatgaggtcaggagatcgagaccatcctggctaacaaggtgaaaccccgtctctactaaaaatacaaaaaattagccgggcgcggtggcgggcgcctgtagtcccagctactcgggaggctgaggcaggagaatggcgtgaacccgggaagcggagcttgcagtgagccgagattgcgccactgcagtccacagtccggcctgggcgacagagcgagactccgtctcaaaaaaataaaataaaataaaataaaataaaataaaaaaaaaaaaaatcacatgctacaacatggatgtaccttgaaaacatgctacgtgaaataagccagatacaaaaggctgcatcttgtatgattacatttataggaaatgccagattaggcaaatccatagagacagaaaagtagattagtggttaccaggagcccttgggggtagggagaagtggggagtgactaacaggtgtggaattttgggggggtaatggaaatactggaactagacattggtgacagttgtacaacattgtatgttaaaaaccatggaattatatactttaaaatggtaaattttatgttatatgaatttgatctcaaaaaaaatttacaaaaaactacatatatagccattaaaaattatgagatatttcagcagaatacagattgtaaataattttttaaattataagagataatacaaaagacaattcatttgaaatgtttagttcaaggcctgacatatagtatgtgtttagtatatctgagacaggtctcagttaattaagaaagcttattttgccaaagttaaggactcacctgtgacagcctcaggaggtcctgaggacatgtgcccaaggtggtcagggcacagcttggttttgtacattttagggagatatgagatatcaatcagtacatgtaagatttacattggttcagtccagaaaaggcgtgacaacttgaagcaggcaggcagcttccaggtgacagttaggtaagagacaaaggttgcattcttttgagtttctgattagcctttccaaaggaggcaatgagatataaaattatctttgagcggagggataactttgaatagaatgggaggaagatttgccctaagcagttgccagcttgacttttccctttagcttagggattttggggctccaagatttattttcctttcacagctgcaatatataaggaaaaatagaaacaatacaaccttggatgtatttgagttgattagtttgtggatgaatttttgcatttatttttattgcaggcagagctgctataatatattgccagtatagtaaatactttatttaaaggatttgaaaataaaaaataaaagctttatggactccagcatctgtgctttgagccggaattcccgtgaagagcctgtattggtggagctactcagctctttagggaggcaggaagagatgagaaagggatacagattattacagcctaagggcaggatggagaaactatccgtctatttatccactgaatgcatgtagtcatttgtcagtaagtgttcttctaaacttatttactcatcatcaacgttcatcttagattagctcccaaagggcaaaaagacacataattaatttgcttaatgtagtgcctagcatgatgacatggtgagatatgttttagcaataattaaaaatactttttcctttgccagtaattcttatttaatcaagccaaaattaatttacatagagaactactctatggctttcatttaaaaaaacaacagatgatttcaatctcttttctgcaaataccccaaaagaagaacaatgctgttttcataaatcttagtcaaatgaaactcagctactatccccaggttaattttataactgtaaaaagtgtgtgtgcataagaacaaaggctggttaggacctggaaaaaacgagagagggagagatagactgatgtaatgatatgtgacttttttgttcttttctgattcccagtattgtttcctgaacaatattttttttataaacttagcaacaaaaaacaaatcacttcagaacctctgagacaaggctgtggactggcagttgttttttgagacaacatggaagaaatgatattctgtgcatcttctcttttaaactttcatctttgaacttaaagatgatccctagctgagatcatgggtgttttcctcccatgtttctttctttgtgttttaccaacttatttatttatttattttttgagatggaatctcactctgtcatctaggctggagtacagtggcatgatctcggctcactgcaacctctgcctcccaggttcaagcgattctcctgcctcagcctcctgagtagctgggactacaggtacacaccaccaagcctggctaatttttgtatttttagtagagatggggtttcaccagcttggccaggatggtctcaaactcctgacctcgtgatccatctgccttggcctcccaaagtgctgggattacagccatgagccactgtacccgaccttaccaacttacttatatttagcataaaagctggagaaagcgatagggacaggaggcagagaaattctgggcagaagagggcagtccccagcaagggcctcactctgaagcctggacccatggcccaaagtgagaacatacattcttgttttcctgctcaaatgttgccttttccaaaaccacccatggccctcctgccacccatcatgtgcccataaaaaccccagtctccaacagcagagaaaggagaagaggagaagcagctagacattggagagaagcagcttgacttcaaagggatggcttgacagtgttacctcagggaggagtctggccagggatggccagactctgggggaagattatcccgctccatccccttttcagctcccctccattgaaagccatgttcatcagcaataaaatcctccacattcaccacccttcaattcattcatgtgacctgattattcctggacaccaaacaagagctcgggtgccatgggtgaggatgctaaaggctgtcacactgaccctgtgctctcggtagagagcaactgtctcatgcaaaaaggcagagggcccactgaactgttgacacttaagccgtccgtggatggcaaaagctaaaagagcgctgactaaaacacatgccctctgggccttcaggggtaatgggcacccactagacactgcctcaggactctgcacggagttcactccagctgatgcccagaagcactcaccctggctcctgtacctgctcacctgtggactcccttctgcaaggggtgaagtgcaacgggtccaagtgagtggagtttgcccctgccagtgacaaagcggccagctagatccagcacccgtgcactgcagttcccacctgcaacggtgtcagggaaatttcctgcttcaaaagcacaggcagctttcttggaaatgagataatgtgatctcattttaaagttgaggacatcaaggctcagaggtgattagaggcattagaagggacttctgaagacagctaatctaacccttgaaaataggagaagttaaagttatggcccaggttccacacctcacaattggtggaaccaggcttgagcctgcttgcctaataccagtgtccttcccaagcttcccaagcatctgcttgaaattacctgtgtctgtggtgggaaggaagcgcaagaatggtgtcctgtgtccattgctggggctttgggggtccaggtacttagtttacttttgagaattccttgttggctctgctgaagtccttcctgctacaccgttcagggaaattgttgatcttgtcaacctgaaataatcaaaaggatcagaatccagttttaaagagtttattcaagcaaaaagctgggaatagccatccaagaatcatggactctagagaaatggggtcagtgcttcgaagttaaaagttaagtacttgcttctatacagcaaacaaagaagtttagtaggattataatattttctatacaagcctggtttatgagtgacaatttagttcgtttgttttcttttccatacagcttgttttcgtttcctttccaatttaaaagcaagtatttaacattccatcctagttagtgtgataaccatgaagcctttgtgtgaaagaggaaagagggaggctagtctataatgaagatccatacttagagagaaagggtcttccctggcaccctttagtaatttataacactttaccaaacaatgtaggtaaggaaaaggctaatctataatcagagaaacaaaggttacagctgcctatttatgtgactcaggttccataatcacattcccttaaggctcaaaataaagtttcaacggctgagattttcaattatttattttcacaatctttacctttcttagttctgggagtggccttaccaggtgggcctggcctgcgtactcccagaagggcagttattcctagcagcctttggctttgggaacctctccataattcttaatccagcccaaggttctgactctgttaatgggtaaagaaaggttatgccctatgagactctgacctcttcttgggacctggaaaatcttctggtgattttcctcatcccgaatctgctgtttctaaactgcttgagaccaagataaagcacaccaatttacaaggcataactcctaggtgaggtcattcactagccatttcttgtatttgagggtctcagtgtgacatcccaacttcatttccagcactagattggtatttctattcttctttttagaaaggaaaggagaggggaggggaaaaggaaagggagagacacggagggagggaggaaggaaggaaggaatattggagtacaatttgtggcactcaatttcaagaacaagcttgatagaaagttgtaattgccaaatacagtaacctacttggggtacatgtcaccttttattgctttcaagctactgtacctggcaactcttatttctccctttaaaaaaatcctgtatctggctaaaggctgaaaaatagcaagtacatatctttctaatgaccctacattaatttagcatagagataattagaggcacagttaatcattagtaatataagccctgagattggggcacatgggtttctcttgctattcaacagagtccttgtgtggctagtgtttgagtacagacacatctttattttttacatactgagctttctttgacatacaagccaaaaatttacttgaagcaacctgaatagtatgagagagaatatttgttttttaaagtcctgggaattacagcgtatccttagggcataatataggtatgttcatatagaacagctgaacacaggcagtttataaagcaggaagtgagcacatcgtactttttaaatttatttaaaatactttgaattcttggtgttcttatccattcaagagtctctaacactagggttgtaaaatagaaaccaaatagcattgataatagagttttgtttcatctttgtcttagctacaatttgggaaatgtttatatgtttgttccaaaaatgatttaaaattgtgtattcacaatgcagtagtgtgtaaacactactgaatcaccagaaatgcatccagtagtgcatgcacaaaatagagatcaaggcaaaggtagaatagggaaataaaattaagctaaggataaggttagtatacaaaatgcatcttgtgaggttcatctatttggtctactagtgggcatgggaaggatgcctgaatttaaatgaaaattctagtactgattataattcacatattctttcattgccctagagtttttaattgtgcccaaataagtcttggtattcacaaactaattacttgagtttttaggttcacataccagtgatatcctccttgaatctttctgccacttagtcattttacttccaaatatcatgacatccaacagaggccgatgaaggaaaaaagatgcaaaagtcatcccatttatttttctgccttaaaataagagtgtgtatattgggagaaggaaagggtaaagcagttagatgttattagaaatacttggaagagaatagaaataaaaatttgtgatttttagttattaaagtcatcattaaattgtgttatccatacaactgaaggatttcaatatgggcatcttgttaaggaaaagctttcagagaatggtaacatttcttaatagtgaacatgtccctacactcacataattataagacttcatgtacaaggtactcaaaatcagaaactttgtaaaaagccttttaatcagataaacctgaatatatcattatctagaaataactgaaaagagtgcaaaacattagagaacagtcatttgataatatggtaaataaatcaataggctattatattcctattaaaattataaaagttgcataaacaggaaagattatacaaatataccataaaaagtacttataataaaaatatgagaaaaatacaaactgatatgtaaactataaaatatgtaaaatagccaagcatggtggttcacacctgtaatcccagcactttcggaagtcgaggtgggcagatcacttgaggccaggagttcgagaccagcctgggcaaccgaatgaaaccctctcaagaaaaaaatacaaaaattagctggacatggtggtgcgcatatagtcctagctactcgggaggctgaggtgggaggatcgactgagcctggaaggttgaggctgcagtgagccgagatggtaccactgtactctaggctgggtgacagagtgagaccctgtctcaataaaaataataaaatatgtaaaatatctctgcaggtagaaaaaggtggtgtgtgaatgcaaaagagttatactggattgactaagatgattttttttctcacagtattctttgatattttgtcataataagtgtaattgatagcgaagaaatgacaacaaagctttcatgtatagaatactttttacagatttactgaataatgtgtactttctgttcactgtcttttaaaatataatttcagtctagattttacagactcatgggaaatgatctaaactatttttcttgccattaaaatgtgcatttgggagtatttttccatagacatagatacaggagaactcaataatgttcctcttccttctttccaactcttgttttccttaggcattaccacaggagtcttggttcgagaacacagcaacctctcaactctagagaaattctactttgcttttcctggagaaattctaatgcggatgctgaaactcatcattttgccattaattatatccagcatgattacaggtaccttgagaaaacagatgttctctatattagtccattttcatactgctgtaaagaacttcctgagactaggtaatttataaaggaaagaggtttaattgactcacagttcatcctggctcagaaggtctcaggaaactcacaatcatggcggaaggcaaaggggaagcaagacaacctccttcacaaggtggcaggaaggagaaaggctgggcgaagcaggaagagcccgttataaaaccataagatctcgtgagaactcactcactatcacgagaacagcatgggagaaactgccactatgattcaattacctccacctggtctctcccttgacacctggggattatggggattacaattcaagatgagatttgggtgggaacacaaagcctaaccatgtcattctctatgattatttaaaaagctttcacctaagttgttcttttctaattacgggaaaaattgaaatacattagatgtctctctctctctctctctctctctctctccacctctctccacttggaatgtctatatttgcttctgtggaaacattttactgttctcaacatggcattgctttgtcatatgctgtgcctacagctctgtccaccactgctcaaatcttcatttgaccagcatgtgatgtcttgggaggaaaatgtcattttcaaacatataaacaaaacgttatctggggcatgggaaaaaaaagcatatttggtcactgaaatgtcagctagtgtcctcaggaaaaatatagttgtcaattttgatcatgttttcagccattcactcatttatttcccaactgcagctgtgctgcccccagcctctcagcagctgccttcagggtctctgcactccttacccactttctactcaaagccagaacttgctatgtgtctgccctgcatatttgctgtggggaccagcagtcaagttctgtgagaagggtttaaatatggaagtgcaccatattcgaaaagcctagtatttttaaaacttgtgacacagttgcatttggaaatgacttttcccttattgatcattacattgcagggctcctttgaagaggaagcttccttaggtagatagagatgaatttggtttacaaaaatgtcatttgtctggctgtgataagtttctctgcattgcagtttcttgtacttaactctggcaattagtaaaatgtggcatgacagtagctggtggtgttagattgaaaatcaaggttttatgtaaacatgcaattagaagtcgtgacatgtccccttctagaacatttttctccactgccactgtaaaggtctgggactggccctggtagagtactggacgttggtgggggcacgggagggtgggggtcaggatctgctgcattcagggactgcattgcttgaagagctgtcacatttggcctttgaatttcccaaatgccaaactcgaattagactagagtcccttgggagctttgtccttaaatggtcttgatgttctcggcttatgagaaacctaaagagaacatttaattatttttatgaatgtatttaattacgtttggaaatgcctggttccttttaaccctagcaacctgattgacacagccgcagaccaattatttgtcccatgtaatatttgtttatttgtttaaattgtcataagcatttaaaattggaaagatttcatgtaaatatccaaattgctggctttctctgaaaaaaaaaaatgaagatctgggaacactggcccagtatttccacctatcaacggtggtctgaaaccaagagacaactactccatttagctggagcaaatgcatttgagaatgccatagtctccactactcccgattgcccagtactttgtccacttcactcttacgttacctgcctggccgccgtaaggatggcagttataatcccttagaatcttctccatatcaaagattctttaaaaaaatgtttttaaacatggggtcttgatatgttgcccaggctggtcttgaatttctaggctcaagcaatccacccacctcaacctcccaaagtgctgggattatgggcatgagccactgcatccagcccaagattcctaattttttcttgggctcctttgagaatacaatgcaaactttggacttcctttcgagaaaaatcttcacaattgtacatatatactatattttgcacgcaattgcacaaggtgcataaaccacctgatgagcaatactattgaactcatgtgtctatgaggggaagtatagaagattgatccaaattatgcagcaaacccaaaactcgaggtaaaacaggttttagaagaaaaggtaaaaatacatgtatgaatgtctaattctgtaatatcagatgtttgaaaatacatgccactcttgacagtcaataacaagtgagttttgttttggtttggttttttttctgggaagtatagcctttggccagaagccagaaacagatacttcctctagtgagatttttgcagtctggatgttttgtgtgttagctcagccttgcaaataatctaggaaaataatttacaactcagcattccactgacatagcccagctacttttgaagctatagcatggatcaagtagtttctccacttttcctccaccaaacccccagcagccagtcaagaactagaggcagcgagcaaaaccaccaccccatcttttgatttggagcaatgaaatagtcaaagattcaagggatatgaacaaagcagggtggggacaatgatggcatatccatgttttaaattgtcagattagagggaaaagcaacaagactagtgttggcacagttataggaaaataagttcattcatacactttcagttacctaataaattggaacaaactttctggagaacagtttggagcatgttctgatctcttcacccagtaattctgtttctcagaattgatcataaagaaataatcagagatatgttcaaactcctaagtacaaggatattcatggtagcatttttttgtaatggtgataaattataagcaacctaaatgtatacaaatttatattgtatacatatgtatacaaatttatcttttatactatgtatacatagtatacaaattttcatactaagcaactattaaaaacttgtcttagaatcatatttaattacatgtgggaacattcccaatacagtataaagtgggaaaataaaattacacaacaggatagtgtatacaatccaaattttattaaaatgtatatacatttttaaaagttgtgatcaaaaccaaaaggttaacatccagaaagtaagaaaacatgatctgttctgctttctttacattttcaactgaacctgtgtttttgtttggtttgtatttttaatgaaagagatggggatggagtctggcctgagatcctccaattttgcctctggtcgcttctctgcctcatctctgctcccttcccctgccggctcagtgccacctttacctggtacacagctccttcctccagaccctgaagtagtcttcagcctccctacccagaagatggccgtggaaaacacacaggaagggccatttcacattgcaaatgccctcatgaatccagcaggctggtagcttaacgtatacagttattaggccgaaggaggatgcaggtgggaagctgaggagggttgaatgagtcccctaaggatacgtaaattagaagcagaaacacagctagaattcagacccaagattaataatctgtgctcctgcataaaggaaactctcttgccaaattaacaggtagaaaaaaaaattctgccatcaaagcctctggtgagattaaaaaaatactttatagcttttttaaaaaacaggaagaacccctttttatgtgatgataaggttaagaagccaaatttaccagggaaatttgaacatagactggctgttagatggtatcaataatttgttaatgattttgttagagatgatgatggcatatagttgtataagaaaatgtccttactttttaaatgcatatggagttatgaaatgacataatgtctcaaatttactttaaaacagaaaaaaaaaatggcacagttgatataaactcaagacattttcagagacaatcattgtgggtaccaatagaatcctaccgataaattacattgtgaagaacatgctcccgccctgctgaggaatatctgtgtttgggatctgctaacatttaggcttgtaagccgtatttatgtcaaagcaccagagaaataacaggaaatagcttatgaatatgcctgagaattgtggctctggaaaaatcctggtccagccagtgagtttaaattcaggtcacattttctttactacttcccaaaattaaactatgatgattggagcctcctatgaccaacacagggacagaacagcacctccagtcccgctcccagaggtcccctgagcatccttcccggatgctcataactttgctcaggaagaggttgcagctcttccactttagcctctgccacccccgcctgggccagaagcactccagtgggcacagctgcgcctcctggtgtctgctgtggctgccactaccccggtgacctaaggagttccgctctttgctcctccatcctaagacaggagcagaagcttaattctccaaagtgcagctgagaccacacttctactcaggacataatctttgctaaaggtaaccaaaagcagatgaaacaccaatggtgacatccaactgctccctgaaggggctcccagggcctcttaacagggatgcccctctgcttagctgcttgcctccaggaggctagagttcatctctaaaggtgttccaagctttcctgcaccccagatcccagaacctgacaccaagttctaagaaggaaaaattccgctatcacacaggccatcctgtcctgacctggagtgacctcttcctgggatgcttgccattgtggaatatccacttcagagaaaacccccctcacggccacagggggatagcctttcctcgtggaccccatcaggagccttccatagactccataccatagtacctgctgggttattgcaaccaccctgcttgtagaacctgggagtctgtccaggtcaggctgggccaagtccatgccagttcctgtgcacatttcttcctccagagcaaggagttgctcattcctaacccttcctgtgatgtcgcagctctggatttcctaaaaacgcctgctcaaacaagggcacacacagctcctcaagaaacagcaccagtttgcagctcagtggatgtcaagccaagcagatatcaagccaagaaaactccctcctttccctcctctctcccccaggccactgagtgtgagtcctagtactgattctgcttcctggacaagtcacattattaaacactagacgtcaggagaaaatatttgcgttttgtttatcaatgactttcagtttccaccagacactggttgggtgactggatttacaattgaggatcttctccaaagataaatttaacactctacccttggaagatttaaaaaacaaaaaatgctccagacttttagatgattgttactccagctttcatgttaggatttcaaaatttttagggcttgacctcaaccataggatcagaggttttctactactttttgttgggaaagggtgggaagacagggtctcattctatggcccaagctggaatgcagtggtaccagtatagctcactgtagtcttgaactcctggactcaagccatccttccacctaagccttcctagtggctgggactacgggtggcccacaccaccatgcctggctaattcttacttttgtcgcgatagggtcttgatatattgccagggctggtctcaaactcctggcctcaagtgagcctcccaccttggcttcccaaactgctgtgattacaggaatgagccaccacacctgccctactttttaaccaagtaaaaaagtttaaagccttataaaaccttaggtatattcagtatttattaaacaacagccagatgtagaatgcatatgtgagttggttgcctttcaagcaaggatttttctatgaagggcccaatagtaaatattctaggttttacaggtcctgtgtattttgcccaactacccaactctgtttgtcatgggaaagcagccacagaccgtatgtaaatgattgagggtgactgtgtgccaatgaaacattcatttacaaaaacaggaggccagccaggagctgacccctgcccagctagactctgacactccagatgcaatctagttgaggttgaatccaggtaacaaaataaactaccacatcaggcaaggagtatgaatgcactgaagagactgaagaatagagggtgagcagaataaagtgcagttggtgatagttttagagcaccttatttgtaaactcaggctttacagcagatgacacacttaaatctttggggctgaggaaggcttttttttaaaggctatgtattcatttactcagaggcagctgtgtatctggaaacaatcccacatcctcctatgaaaagaaccatgccacgtgcctccccgagacaaggttcagttttattcagctaacatttgttaactccagctgcatgaaaacagactaacagaaaaccaggtataagagggtgaggccctaccactcacatggtcatggagctgaggtcatctgatagtcaggtccaggagtccctcgttagcaagaattgcaagacttgaagacgcatatcactttgttgtacaacttgctattaaatgtaagctactgttcataaacataggtggctaagagcatttaatgtcaattttagctacgagggaggagtatgcattcttttcttgaaacattggtggtccattatacagtttagtttctatgaaaattgccattcaaggtggtttataaacttaaaactccaggcaggaagacaagtttgttgcctaagactgtacagtctgagagtgaacttcttgcctcatttgcaacatctggaaccagtgggctcttcatgcactttaagtgctcctttccctaagattatcaagaaatttgtgttgagttagaatacagctgttgaagccaaaggacttattgtatcaatttgatttctgaaatgcctggcctccaaagacaaaacgaccacatagtgtataaggaagagctcccataatgaacatgccatttgcaagtaataaaatgaatagtggcaagagataaatatgccctgctttagtctttcctgagacagtgaagcccagagaatcaaccatgcatgagccttctttctgactaaacaggtattagacttgttcatagctctgttcagctgtaagataacctgatttgattacttaaaaagggattctaaggaccttctatatattggaggcatggacctggaagaccattcgttcatttatttatttattcattctatctttaatgagccaggctctgctagacacacaaggtgtaaaattaagtcttatctcagcaagaaagagtacattacaatgctgtgtgataagcactttctgggaatgaggtcagtgcaggggacattggaaggagccattttgaaggaagcatagaaatcaagtgaaaggaagagggtgggtattccaggcaagagaaaatagcatctttgtcctcccaaaatagcatcttgggaggacagtgagacttgaagtgcgatgctggaaacgtgggcaagaggaatgggatggaaagggggagcacaagggtttactggcctcgtgtgccttgccaaggggactggacttgagcctgcaggcgagggaagcaattctagcagtgactcccacctgtgccattctctacagagggacacctgaataagtatccatcctagaggggcaagagagtccagtggttaagagtacagacaggagccacactgcctgggtttgaatcctggttctgccatggattagctgtgaaaccttggattttacttaacttgtcctcagctttaaaatatggataataataatgtttcatagaacatctagaatgccatacaatttttttacttactcttttttgtctgagaccttcagaagttcctataaagtacctgaactggcagcagaatctacagggccaatatcagaattgagctacgcagatatgaacacactgaatgcattcattctggaaatgagaacaatataaaaagacttgctctgccatcagtttgtaaagttcaccagcatgtaagaagcttttgcctagaagtccgagataccaattttatggataaagagaagcaaagagacagctcagtcatatttaggttgtggcaaaaacccagaaaagtctcactgagccattagctagctgctgctgtcagagcattcatatggactttggaaaagaacagttgagttcctcagattctttggggtatatttaatgcttttactggacaataagttcagggagtcaaaaagttcatggagtcttctgaaaaactggtcctaactacaaataccaccgtgttccatagtaatgaaaaaaatgttaaaacagctcctggactgctgaaaccaggacacagcccaccgcttctttttttttttttttttttttgacagagtctcactgtgttgcccaggctggagtgcagtggtgcgatctcagctcacttgcaacctccacctcctgggttcaagcgattctcctgcctcagcctcccaagtagctgggactataggtgtgtgccaccaccaccggctaatttttgtatttttagtagagatgaggttacaccatgttggccaggctggtcttgaactcctgacctcaagtgatccacttgcctcagcctcccaaagtgctgggattacaggcatgaaccactgcacctggagagcccactgcttcttgatgcatgttttgaacttcaaatgtggaccagctgacagaggcttcaaggggacctttagctgattctgctcaaggaccagtttattttgttaacatcaccaaatagcctagagtggtgatattacctattttaagagagttcttcatgtctctaagaaaagtagatgtcataggtgatgcatgcacagaaagattttgcatgctcctctttgcctcttcctttccctttgaacatccagggagtactaatcaaggctgcagagatttccctatgccctggattaacaaagtaagatcatatcctgccttgttttctctggggaataaaagaaacattttggaatttaaaaatcatgaacctgtttatttaatcctcatagcagccctatgaagtcatcaagtaggtgggaccttaactccatctttagagataaggaaacaggaggttgaagacagattaagccactttttcaagatcacacagatcataagggcagcagctggaactggcaagttttgttctggcaacactctgctgccaaggggccagagcctgggagagggatccagggcagtcagccatacttaaatacctgttagtcattcaatcagcatgtttactgagcatctcctatgtgctgggcactgagtatacattcgtgaacaagcagatagctaggtctcctgccttcatggagcttaaaacctagcaagaaagagatataaaataatgaaccaatgataaaaattgttgagatatgatatgcacaggatgccaagcaaggaaatcaggacaccctggtttagggtggataatcagggaaggattctgaggaaaggacttaaaagccaaatgaagagtgaggaagagcactccaggcagagggaagagcctgtgcaaaggccttggggtgggaaggagcttggtctgttccagaagaggctggaggaggggatgagacaggaagatggcacaaagaggggctggagaggcaggcaggtgcctcccctgcaaggcctgttggccaaggtaaggattttttctttttatcttcagtgccattgaagggttatcctgatgtataaaatcacctgatttatgtttttaaaggatctctttagtgaccgtgtaatgaaggaatgaatgagggagggaatgaatgaatcagttaatgcttgttgaataccttccatctgctcagtgatgcacatcatctttatcatttattcagtaatcatgcaggctatttactaagaacacactgtgttctgggcactgtactaggcctgttatagacattatttctaatcctcacaacagctacgcaagctgaggttgttcactttgttcctcacaattaacctaaaggcgatagaggcatttcagatcctccaatttatagatggagaagctgagtctgggaggaggctgggatttgagcccagtctgtcccaccaaagcccatgccttctctctgcacaggtggcctctctgccggtgacagagacaggagtcatccacatggcgagttttaactcctatgcaacaatgagtttcttggatgtggtgtccacttataatggcataacaccaccaaatgtcagacctaaaagaacttccaataaggggttgaattttgataccttaacagcaatgtggagagattgtcacgaaagctttgttctcagtgggtggttgcttaatcagagagctctaggaggagtcttttgccctcagatgtttatttttaaaacatgctattgtttagccaggcaactgcttcctttggagtgtttttgtaaaaagttcagatgattactgctttggctgggagccaacacccttgctcatcagagccttctcctgaggtgaaaaaagcaaataaatgcctttacctaaaataaagagctagcaggtgcccctgacttccaaggacaaccggggattttatccctgtttctaggccacagccgagcctcaaaactgtcccaggttctaatggataaccctgggttcacagggaactggaatcgtgctcttctttttctgcccaattcaggtgccacctgttccatcaagcctctcctgctcatctcaatctggtgacagttcaggctcctctgaaagcccacagtaactggtctccgcaccagggcttcacaaaacatctagtttttaaactggatggagcaaatccagttgttaaaatttctgatctgttacagatcaataaccttcgtaaactatagttagagcaaattactagaaaagttatattaaaaatagacatacaaaatactagccctatttttttttttttttgagatggagtttcactcctgttgcccaggctgaagtgcagtggcatgatatcggctcactgcaacctccacctcccaggttcaagagattctcctgcctcagcctcctgagtagctgggattgcaggtgcacaccatcacacccagcaaatttgtgtgtgtgtgtggttttgtttttgtttttttgtttttttaagtagagatggggtttcaccatgttggccaggctggtctcaaactcctgacctcaggtgatccacctgcctgggcctcccaaagtgctgggattaccggcgtgagccactacgccccgcccctatcttttattattacattcaacagaaataaagttactgtccaattactataaacattttaaatactcactgttgatttctgtgcagatgccatcacacctgcttagttcattctcatttatcaccccctataggacagctttcaactcccaggagaaacgagttctgatagtgaactgtaaagagagggggtccttcagacctcgccagccaccaaagatggcctgagagcaagaaacccgggggtccattgagaataaaaactcagaactaaagggcaaatgaggttttacttgtttgggactaagttgggcctgatcttcgacgtcaacgccagttaagagtctaatgcctggattctcattctcacagtcaacattcattgcgctagaccacaagttctcaccaagacaatatcgtccccaaggcagcaaaagctgtttttatttggtggtggtgagttgggggagaaaatcttactctttttatgtaaaaaaacacatgtatcatttactatataaccagatatacagtttgcggttttagaatttcagaggggtggtgattaggaaaacggctttggggggtggttttgcacaacaacaacaacaataaaacaaggttgaaaaagactgagatgttacatgtgttcccctgtggagtcttttatggctgaaaagtgttctcgttggctgccctgggaaccaaactaaaccaccatgtataagcggtttctaaggggactacctgctgaggtccaagtttcggacccagaaatggatctttgaaatggggtcatttgtaagcagacgattacttgcaaaaatgcagctctttctgtcatgtggaaagcttcaagtacaaacattcgtagagcaccttatttaaggcactgggggcccagtgaagaataagcttcaggccttacagccatatgatcagtgcagtgatggaactacgtgccaggagatttgcgcgtagcatcttcctttcccctgcccatgcttgcaaggcaaagagcttttcctgaatttgataatggagttaagctatagtttgttcattcgacattgtcgagcacccactaaatgctaaacactggtagggtctagagagattgggctgtccaatatgatagccattagccacgtgtggctacttaaattgagattaattaaaactggccaggtgtggtggctcacaccaataatcctagcaatttgggaggccgaggtgggaggatcgctggagctcaggagttcaagaccagcctgggcaacatagtgagacctcatctctacaattaaaaaaaaaaattaaaatagattaattaaaatgaaaactcagtttgtcagtcacactagccactttccaagtgcttgctagccatatgcactttgtggctactgcaggggacagcacaaaaacagaacgtttctatcatcaggaagctctactgggcagcgctagtctagaattttgtagcacatggatagagccaatatggaatagtggttaagaatatggcctttgaggtaaaatgtagattgagatcccagctctaccactcaccttaccagctttatgatcgtatggtacttagcctttctgagctatagttttgtcctctgtaaaatgggggtaataatgcccgcctccttgggttgtaatgagaattaaagatgatgcattaacatgcagtcaatatagtgtttattgtcatcattattatttgtattatgattatcatcctcatcattattgacattactcgcagatggggtgtttacaaccatccagacagatattttatggtcattaagttctgtaatgttcctatttatagaggttttcaaagattaggctgtttccctgtatctgttctctccctctatggtggtcaccacccttatccccaacaatgcattataaatcatccaacagcctggacttgggggccagctctgcccccatgttgatgactagagaggtagagggtaactatagagtggtaactatacagaggtagaggtaactatacagtgtagagaagtataatcgttgatttgtgtaaatatctgatatatccgggaaattggtaggatggaggtggattagaggaatgggaaacaaagacccgtgctgaaagttactacaagatagttgctgtgctccaggacagaggggaaattggatgactacttggggatgtatttgtttaagatattttcaccaagatctcattattatcaagccttttattgccagctgagtcctggagtacaagcagaggcaccagcccatggccaaatcattaagacaaattaagacatattaacatatgctgggaacaattatccacatagatttaatttgtttcactgctggaagaaaatcctgagagagtaccaaacacatccccgagaacagctctgtaactactctgtgactctcacttgtcagcacttcaggggctggaatctgcttaaactggacatctaccaaagaaggacgacatatctgaaaatagatcccatattagggctacagatgagttacttggagtctgttaaggtggtgattctttttgtttctttttaacctatgcatcttagaaataattattacagttatcaaaacaatataccaagctctaaaatgaaacaggcacatattttataatcatataatatacttagcaagcttacatatttgtattatgatttgctctttctttaagagacctaaactaaatatgagatagtgaacttgtttctgaattttggccttcaatctctcttgacttttttgttgttgctgttgtcccttgcctaattgttatctttcattgtcttactgggaggaaaagaaagactcttcaacacagcaaactgcatttttctcaaatcgaatagaatctatcatcaagattattctagaatgtgactattgcagtatgcccattatatggcaattgcacaatcttttctcagtggttgatgaatggcgccttaacaacatcctggggtagctgctacagaggccagagcaccttctctcaaaatattaacttccaaaggagcaatcaacagccagagaaatggtgtgtttagagtgagaaatgacttgttctgtcatcataatggtgatcacttccttgcagattttcttcctgtacatcaaatatgtatgattatatatgagaagcataaacccccagtcacttaaaaaaaatggataggccttttagtgtgggaaatgaacataaaagttacctatgcatgctgatagccatacaggtttactgcctttcccttggggttgccttgtgacaacctcttcctttttcctgctaccctgtaccttaggctttgcaaatggttatgggacaactcatgcgtgttgaatatgcaaaatcattttctataatgctcctttgactcaaaatatgaccctcattttggaaatcaggcttggtagtgtctgaaacctccaatgacagcttgccgaaagatgattcagttgtttctcaacttggcccattccccacgtccaagtccaattggagaacggcttttgactccgtttatatgagcatctttgatagagagcaaaggtttctggcaaggcgggatgcctgccttccacctctaatccagctgtccttgacactccagacagccctttcaaatctgggcaacacttagtcatcttactggtagccaaggaccatttgaagtgagatctaacaatatgatcgtaagtctctgacattacctgtgccctgggaaattatttattaatatctttcctttttcaaatagaaattttaagatgtctcacaataaaagctatacacaataaggttgtttacacagaagcaatttgaaaatcatgaaaagaggaaggaaacacactaaccagaatggataatgacattactgtgaatgtggccccgggaccatttaaagatccagcaataagtggatcattaaatacattctggtacagccacatgacagattactgagccattaaaattatcctcagggtgagtttgtaacaatgtgggaaaatgcttacaactataatattaagaagaagagagagggttagaaactataaaattctcccagctgtttacaaaaaattgagaaaaatattagaagaaaatcaccagaatattaacttggttgatgagatgatgtgatttttgttgtcatctttaccttttctcctttttcagatagttgtaatgaatatatattacttttataattgtatataaacattattttttccagttaagcctaagcttcctgacagaaaaggcagaaaggaaaactatcatgagttacatgattctcaagtgttaaaaaaaaaaaaaatctcaggcaggacatgatgactcacacctgtaatcccagcactttgggaggccaaggttgtggatcacctgaggtcaggagttcgagacaagcctggccaacatggtggaacctcatctctactaacaatacaaaaattagctgggtgtggtggtgtgcacctgtaatcccagctactcgggaagctgaggaaggagaatcgcttgaacccaggagatggaggttgtaatgagccgagatcacaccattgcactccagcctgggtgacagagtaagactctgtctcaaaacaaacaaacaaacaaacaacaacaacaacaaacgatctcagttctttgagataaatttttcctagataactgaattccaaaggaggtttatcacaagggatgttgaatgatataatacaaatcttggtaaagttcttagtgcaaatgtgggacagggactccttatgattatttcctgaccaactccaggaagatctgaaggcaggacactcctggaggtgaaggctgtgggaagctgcctgcaggggaacttgcacctgactgggcttccctctcttaaatctgtttggaattttgaagtgttgcttttgcccattgcatgttattgcccattgtctgtagatgagaacgcctctcagctctttatttcacaacctgaggattaaatcgcgggtcctggaaacctgtcttttaaaattaatgtaatttgatttctgtctccccttcaggtgttgctgcactggattccaacgtatccggaaaaattggtctgcgcgctgtcgtgtattatttctgtaccactctcattgctgttattctaggtaatacttatttctgaatccttactactttatgtaatggtgattttttcattcgaaaagtagttggtggccagatgcggtggctcaggcctgtaatctcagaaatctgggaggctgatgtgggcagatcccttgaggtcaggggtttgagaccagcctggccaacatgaaaacccgtttctaccaaaaatacaaaaatattagccgggtatggtaacatgcgcctgtagtcccagctacttgggaggctgaggcaggagaatcacttgaacctggcagacagacttcaaaggaaaaactttatggtactttgacaatactactttctgattttaaaaaattgtatgttaagaaaagctcaactactttttaaaatatgtatttttttaattaaaaagagacgtggggagtcttctatgttgcccaggctggtcttgaactcttgggctcaagggatctgcctgcctcagcctcccaaagtgctggaattaccggcatgagccactgtgcctggccctaactacttttttttttttttttttttttcaagagggagtctcactcttgtcacccaggctagagtgcagtggcatgatctcggctcactgcaacctctgcctcctgggttcaaatgattctcctgcctcagcctcccgagtagctgggattacaggtgcacaccaccatgcccagctaatttttgtattttttaaatagagacagggtttcaccatgttggccaggctggtcttgaactcctgacctcaggtgatctacctgccttggcctcccaaagtgctgggattacaggtgtgagccaccatgcccagccacttacataattcttaaagtggatgattggtctataatagtggagttgagtataattataaaatatttccagaaatatagcattttagtgcatttcacgtagtaacaagagctaacagctaatagatccttgttaaggataaatcccacttgtaagagggagaaaattctaataagggaggagctgctcttatacccttagcatagttttttgaagaatgcttggtctttgtaaccctgagtgacattttaagaagaatgcccaattcccacctatgagtgagaatatgtggtgtttggttttttgttcttgcaatagtttactgagaatgatgatttccaatttcaaccatgtccctacaaaggacatgaactcatcatttttatggctgcatagtattccatggtgtatatgtgccacattttcttaatccagtctatcattgttggacatttgggttggttccaagtctttgctattgtgaataatgccgcaataaacatacgtgtgcatgtgtctttatagcagcatgatttatagtcctttagatcacatggacacaggaaggggaacatcacactctggggactgttgtggggtggggggaggggagagggatagcattgggagatatacctaatgctagatgatgagttagtgggtgcagcgcaccagcatggcacatgtatacatatgtaactaacctgcacaatgtgcacatataccctaaaacttaaagtataataataaaagaaaaaaaaagagagagagagaaaaaaaaaaaagaagaatgcccagagggggaagacagaaggagcatatactcagatgtggcagcagctcggcccttgtagccctgcttcaatgagctgataagaaggggtgggatgtggtgaggctttagtggtattaggccaagggacccaggagggcttgaactgtaccataaaacaaaaccacatcatctcatgagtttcctgaggaagacagacacagagaaaaaatagcaatgagaatcaagatactgctctcttattagctggaggcgtatagcccttctacaaccctgagagaggaaaagagtgggccatgcccagtcatggccccttattgcccaggagttcctcccattagcaaaatggacccattcagcatcccagagccctaccccctggattaccattgcctcttcttgagggaggagcaataaagagcatgaggacctttttcttcttcacttccctccagtcaaacaccctccaatgtcttggtctcttctacagcctcccatcttggcttggatactcaagtgacaggaacccattacttcccaaggccacaatgatgctgtcagatgctctgccatgtagacagttcttccttacagagagatgaaccttctctccctataaatcccatctatttgtcctcattccacccccggaacagcattttcctacatgactgctttctagatacttgaagacctacggtatggaaggaaggcaaggcttgttttgtatgatcctcaggagaataaccagcatctgggtaaaagttgcagaaagacatcagatgcattctctgggctagaaaatggatcatccttaccctaacaccttcctaggctggtctcataagttcaagaaaaagaatattctcatcagcaggtgtttccagaagcaattctgggatgcagccccttcatttaaaacacacatacacacacacacagacgcacacgcacgcacgcaagcacatggagttctttctgcttactcatttaaatggaagagtaattaaggtggctgctgaggttccagaggaggctcagcattttggctggacctcagggtcctccccatcacactattgcctggtacaaccatgcccattgttctaaaggtgccagctgtgccaggtgccctggaaggttcctaatgctctgtggacgctgttcttggccacaggtattgtgctggtggtgagcatcaagcctggtgtcacccagaaagtgggtgaaattgcgaggacaggcagcacccctgaagtcagtacggtggatgccatgttagatctcatcaggtgagtgttttgccacaaggtggcttcaagggcatgcggatagcagcacaaggccttgtatgtggtttaatattctgctgttactgtattgaaatttttaataacttttgaattattgtgcactttcattttgcccaggaacccacaaattacatagccagtactgtttgccaagtcttggttccaagagggaagggaagaaacaggcttccgcatcaggatttaggatgaacagagatgcagctacatgttccagagagatgctgggatggattggtagtcagttctgaagcgcacttagaaaaatacatcttttaattgtacaggagaaactctcttatctaaagcaaccagaggggtaaataggtcagtcaataaaaaataccagttaaagcagagactcataaaaaaagacataagatacacattacaattttgttttcacttaaaacttagtgcatttattcaccaattgtttgacataaagctaaggtcttttcttcaagtttgttagctcatggtaatttcttacgggttctgttgcatatacagcccttataaatatatcatctgcaatttccaggtaaagtttctatagaacagagcaccaaaacttttagacattgcaaagaaagctaagtgcaaatctttccagtttttctttttaatttcaataatcttcccatacctaatctaaccataaaaattttagtcactggcctttattgagtttccaggtatgtggcttagattttatagaaaccataccttctttttatgctcatatttcactggtttacataatatgaaatgcagtaattatgatgatatttgcaactggtataaagaatttgggaacaaataaaatgaacccttggtaagtgtattagtccattttcacactgctataaagaactacctgggactgggtaatttataacgggaagaggcttaattaagtcacagttcctcacggctggggaggcctcaagaaacttacaatcatggcagaaggcaaaggggaagcaaggcacatcttacatggctgcaggagagagagcaagggcgaagggagaagtgccacacactttctaacaaccagatcttgtgagaactcactcatgatcatgagaatagcatgggagaaaccaccccccatgatccaatcacctcccacaaggcccctcccctgacatgtggggattacaatttgacatgagatttgggtggggacacagagccaaaccatatcagtaagcatacaacctcattgatgaaaacagaagtgttcagaatattaaagaataaatagtctcttgactgtgagtgtccatttcaccaaggagcgtaagcatgtcagttactcagtgaatcaattaagtgatggttgattacagagctttctatacttgggtgaagctcagcaggaaaaaagaaatctcaatacaaggaagtattacgcaaagcaggggccagaagagaaaccagagtactagttttatgttatactaatttctaccaatatattaggtatgacaaaacaatactttttgccctaacataatactgccttttatgtctccaacaggaatatgttccctgagaatcttgtccaggcctgttttcagcaggtaatattaattacttgtgcccttaacttgctaccctcttcccattatcaattaaaaatgtttttttctgctgtgactcaagaaatggaattagccccgtgaaaatggcagcaggaagtaaacctgtgactggccaagtttaaggtgatgtctctgttttgtatgcagcctttctggctcacagtaaggtgcatgtcacaatttacactgcttccttttcctttatgctttttcccccaaaaaggctcaaatggtacaaatcagaaatctgtcaaataatgagtattttaaaatgtggcctccagtacctatttttggagaaccatagtatatttgtactgaagtttaaactttctgcagaaaaaaggtagctctctatctcctctttgcttttcctctggtattagaacccaggatctaaccctcatggtgtggtccacatctgggttcagtcttctccttaatcattgtgtcccagagaggcgtggaagctcacacctgtaatcccagcactttgggaggccaaggtgggcagatcccttgagctcaggagttccagactagcctgggcaacatggcaagaccatgtctctaaaaagaaataatttaaaaaaaaatataaaaaatcgttgtatccccattgctggagctctacaatgcagtgtaacaaagccatgatttttttttctgtaggaaaattgaacaatctcttcactccatttacttcaagcctttccctcctatttatctatgtgctttaagacagctgagtccatcacaaactgctgtattcattcacataagttacatgaacacagacttctgtgtataccaacaaaaatggcaactctgttgctctctgccggcctccacgagggacagaacctcctctattacagggggcctttgcagatcagtcacagtggttgtttgtaaggttctcagtgttggcagagcctggtagtgggggacatttatgcctggtgtaataatatactcactctttcttaaatccccatgtggaagctccacagaaccaaacagggctgaaagaagagaattcaactgcagtctcactcactgaatagccccaaggggactgttgattttggaacaaccatatcgttaaacctttcttgatgcttattaaagttgtagtgatgttatcaaagtaatgaagtgtgtttgctcagattaaaaatcatttattaattaataaaaacaaaaatgattgacaggaatccttacagagtctgtctctgacagcacctgcagatcaagcctgtactttcttttgtattattcttctatcaacttgtcgtttattgtgaaagtgaaggaacattttgacataattgaatggtgatcgtgggagtcaggggtttaaatttctgcctcgcttttagttccaaaacctgatgggaggtaccgttgacaactggagccaacagaggcattggatgtagatcccttcagtggcactgtttggccaaaataacatgttcctgtgatttagtctcaaaagcttaaaaaaaattctttttttgtttgcttgtccttgattttctccaacatgcagtacaaaactaagcgtgaagaagtgaagcctcccagcgatccagagatgaacatgacagaagagtccttcacagctgtcatgacaactgcaatttccaaggtaccattcttatttcctgttcctcttccccaggagacaggcactgagtcatgactgagcaggaaatacaatcaatcctcgtcattcacagaatcgcatttgcaaattcacctacttgctaaaatttatgtgtgaccccaaaatccatacttaaggggctttcatggtcatcatctcgcacacaaagagcggcaaaatatttgagtcacccgacaggcacgttcccagctaaggtgaaaaaggctgtgctctgctttcttgctttgattctcatgctggaaacaagtgtcccttttgcagtgtgtttagtgtcatattttttgcatttttgtgatttttcttgctgatttcgctgtttgaaatggaccaaggtggggttcagtgactcatgtctgtaatcccagcatgctgggatgccgaggcgggaggatcgcttgagcccaggagttccagaccagtctgcgcaacatagtgacacctcacctctacaaaaaatgaaaaatagccgggtgtgatggtgcacacctattgtcccagctactcgggaggctgaagtgggaggattgcttgttccagggaattcaaggctgcagtgagccatgattgaatcattgcacttcagcctgggtagcagactgagaccctgtctcaaaaaaaaaaaaaaaggaccaggctgggcatggtggctcacacttgtaatctcagtactttgggaggccaagacaggtggatcgcttgaaaccaggagtttgagaccggcctgggaaatatagtgagaccccatatgcacaaaacattttaatattacccaggtgtggtggcacatgcctgtagtcccagatacttgagaggctgaggcaggaggatcgtttgagctatgattgcaccactgcactcagcctgggtgacagagcaagactcttgtttcaaaaaaaaaaaaaaaaacatacacacaaaaaagcatcatattgaagtggtctccagtgttcctaagcacaagaagactgtgatgtgccttagggagaaaatttgtgctttagataagcttcattcaggcatgagttatagtgctgttggctgtgaggtcagtattaataaattaacaatctatatgaaacaaggtgtctttaaaagaaacacatacaacaatgttatatattgattgtttgctgaaaaggatgtgtccaaggttcccagaaacttaaccctgtatttcccccaggagcaacggttcagtatttgctaattcagtgttcatgagcactttatagaacataactaccaggaatagagagagtcgaccacaaagagcaaaaaaagagccctgttgcctctacctctctgggtctgcttacagtagagctggccatctctagaaactgctatagatttgtcaggtacataagcatgcaatgcaggcccacaattcctagtctgaatctctctgcccagatgtaattcagagttcagagtttctcagactttagaaaggccatgtggtgtatatactgcatattatgcaacctttataagtgggatgggcaacaacatgccagaatcaaccacatcaatgtttttataacaaactcataaatattctgccaaggagagaaatggacccttagtagccagtagcctcatctcagtttaggatgggatttgctgccaaaagagtttgctataaacttatcaataaaatcaacatgctttgagagcttttgggatttcagaattggagatcagaatgtgtgggcctgcattggtacctctgtaagcctgtagcagatttctcccgaatgttctctcaacttcacacaggaaggaatgatttaaggagaaaaggagtgttcattagacttaagaattcaaattaaataaaccaccgttggctccctgcttcctactgcagaaagccttaactcctctggctgagttcagaggccctgcatgacctggcttctctctagttttcacagcttacttccagtgggcacctctcttctttccagattcacctcctccatcactccttattcctgccttttgatgttgttccacaaatactttctgagcaccctctataccccaggccctgctgggcattgggattataatggtgaaaagacagatgccaggcctctgtcctcacacaaagaatgatgagtattataatcaggaagaatgggatgtttgggaggcattcagcaagggatgttaaattagtctggaggccataatgaatgagcaagaattattcaagcagggtgcaaaggcccagtgcatgatcgtttttgcctttgcttgccatctttctgaaacatgctttttctcctggctgctgattcctcagccctagctttccctaaccttgaaacccacattcatgtcccactcttcatatgacgcttgtatctcatagtttgggcgcacaattaattacataccttcctgctattattggctcatgcttctcacagtcagtcttgtctctccagctgaatcttaagaccttatgctatagccagtgcagtaatactctagcttttccctaaatatatgtttgatcataagtaagaaatgactggtagcccagtgggtcctcaacataatttttttttttttgagatggagtctgactctatcgcccaggctggagtgcagtggcgtgaccttggctcactgcagcctccgcctcctgggttcaagcaattttctgcctcagcctcccaagcagctgggattacaggcacgtgccacaatgcctggctaatttttgtatttttagtagagacggggtttcaccatgttggccaggctggtcttgaactcctaacatcaggtgatccacctgcctcagcctcccaaaatgctgggattacaggtgtgagccaccgcacccagctaacataattctttataaacatagttggcaccactcagttatctctctgtaaatctcaggctatttttacccaggataaagtgaagaaattaagccaggcatggtggcatgcccccgtagacccagctacttgggaggctgaggtgagaggatcacttgagccctcctttgaggagtttgaggctgcagtgagctatgatcatgccactgcaccccagcctggacaacatgagaccctgtctgtttaaaaaaaaaaaaaaggtaaaaacatgattcacagtagtaggtatttggctaatttttatatgtctaaaatcctaccaatgatagactggataaagaaaatgtgtacatatataccatggaatgctatgctgccatttaaaaagaacaagatcatgtcctttgtaagggacacggatggagctagaggccattatccttagccaactaacacaggaacagaaaaccaaatactgcctgttctttcttataagtgggagctaaatgatgagaacacatggacacatagaggggaacaacacacactggggcctatcagagggtagagggtgggaggagggagaggatcaggaaaaataattaatggatactaggcttaatacctgggtgataaaataatctatacaacaaaccccatgacaccctgtacatcctgcaccacatgtacccctgaatgtaaaagtttttttaaaaaaatcctggctgggcacagtggctcacacctgtaatcccagcactttgagaggctgaggtgggcggatcacctgaggtcaggagttcgagaccaccctggccaacacggcgaaaccctgtctctactaaaaatacaaaaaattaattgggtgtgggggcggatgcctgtaatcccagctactagggaggctgaggcaggagaattgcttgaacccgggaggtggaggttgcagtgaactgagataccaccactgcactccagcctgggtaacagagcgagactccatctcagaaaaaataaataaataaataaataaataatcctattggtcatccaagaccgcaggcataaagagtgttactgtgcttcattatcagggtaaaacagaaggtaaaatgtcctaaaagtgttcacactggtaagtattctgtacttcctgcattattaattcctgtgtttttttaagcagactccaaatgtagctagcagttaaaatgaccctgaaaagtgccttcaatctaaaattcataataaaaatataaaccattccagaataagaaatctttataagaaatattcaaatatggacttgttgaaagaagagaaagcattttaacttcggggagcaagggtaaagtttgttacatgcataggtgtttttattattgtttttatattttctatagttttgttgactctgcctgggagatcaccagtttattatgtttggtcattgtatcttctcatttctggacctgtgctttctaacaagattataatcgtgcatcaatatgttttcttggttttgatccacagaacaaaacaaaggaatacaaaattgttggcatgtattcagatggcataaacgtcctgggcttgattgtcttttgccttgtctttggacttgtcattggaaaaatgggagaaaagggacaaattctggtggatttcttcaatgctttgagtgatgcaaccatgaaaatcgttcagatcatcatgtggtgagcagacactgtttaatgtcattttgcttcccctgacaattctgtctcctcaaaattagaaagaagaggttttatgtttgtcaactgatgaagctagagaagttggacatttaatattgaaccaccagagtattttgtgggggcttttgttgctgttctttgtttttgttttagaggcagagtctcactctgtcaccccagggtggagtgcagtggtgcaatctcggctcactgcagcctcaacttcctgtgctcaagcgatcctcccgtctcagctacctgagtagctgggactataggcatgtaccaccatgcccagctatttttttgtattttttgtagagacagggttttgccatgttgcccaggctgatctcaaactcctaggctcaagcaatctacccacttcatcctcccaaaatgctggaattacaggcattagccaccacacccagccaccactagagtattaaataattccacatattacccaggagttagttcatgaacagaagtctagctatcaaccattgtcttttccctcaaagccttgggagatcatcttgcactcaaccagccttcgtgtaagaagtaattctttaaaaaatgatttgaaggatttcactgtacatgagaacacaaagtgctttccctattgcaccccatgcaaaagtgagtttcaaaatatttataactggcactgcatgggcactaacccatctgaatgaaagctaccatccgtgagcataccagtgacaccatttcagtgtctgtcctctccctgaaaatgccaaaaagtccacctttcttaggatgcatctgtctcgcttacctcatatttaatttgttcaacattatttaatccaaagtgtagatactgacagtgatgtaaagggttcagtaaaaatggcaaggcaggtcacttaatactgcagaaacctcagcttcatcatctgttaaaaaggataataaaagctacccccagggataggagaagtacattaaatgaaatgatgcatgtaaaatactttccctcatgcaagatacaacgatagctccacaaatagagctattatgatcacttccagtactaatactatcgcctctattgctgatacctgggaaacagatgaccgtggctagaaagagccatatttggcagtgagggtcaagctcaagtgagatctgcagataggacaatcagcaggatatatatgcactaggaacacggcatgaggtgcgcacccatctaaccacatgttcttgccaagtttgcaaactaccctatggtagtttggatgggtagaatttaaggtgcacacaggtactaaaaactagagccaatattgttcacccaggacttgaaacaactcttagcttcaattcccatcctgtgctccaccaagtgtgcatgccaagctgagggtgcccacactggagtgttccttccccaccaacctagcatgagaaagcacttgatgacggaatcacgcctctgttgtgcttcctttccagttatatgccactaggtattttgttcctgattgctgggaagatcatagaagttgaagactgggaaatattccgcaagctgggcctttacatggccacagtcctgactgggtatgtcagactcaagagaagagacagaaacctcctttgatctaataggatggccgctgagaggttgggtttcagttggttaaaactggcttctgccctatgtgctgggaaagatagggttcagagataagacagcagggggaggagggctgccctttaacagctgtactgtaggtggatcatgctgtgctaattgtcagctcttggcagaacagcctggaccaggctttgtcactgcctttattggttatgttaaaataattttttacaacaagagagaaacccactcgtagcctcccttggctctctcctggccttcatttccttaagaatgtaaactagccaagcaagcaagaatagcctccatgtaccctgaacctgaaagaaattagcaagggcctaaatgaaatcagacttgagcaagtaggagcaggatggctgttggttcaaacactgttgctggggctgttaaccaccaccatgtcctgcagcatcagagtgtcagagagggtgccaggagaatcttgaggctgggaggaattgtgtgggcctttttggaagccattaaacaggaaggcagcaggggttgggtagtttccatatttattacagcctagctactgtttccttgagaaaagatgaggtgggataagttatgaatggtgcccctggacacctagacaggggcagaatatgtcacataccctaagaaatacagactaagggaataaataaatatcattgatttgactctcacaagtcaatacctacaaacacccaacttgagcaatgaactcacctattggaacttgatcgtattggagatttccaacacagcgcatttggttcttaatctgtgtttgccaaaaacacagccctgccagccaacacagaggcagatttggtccctacagtgtgaggcccctggcgctaagggaggtgggacctccaattcactggaggccaccctgctgtagggctgctgaaacaggcagtgccagggatcgtgtctcagcagtgacgtggctggggtgtatgagctgagccatttcataaccgagttctgctggtttctattctcttaccccagctaggtgtctaacaggaaactaaaagtcagttcctcatggtttttagctacaagctctctatcaagaagatcctctcgccagaactccaggatctatatttttgatggccatttcctatttcaaacacacataactgatctgtaaactctaagctgccagttacatatatatctatctgtgaaatgagtctcatttcttaagcctcctagttcatgtaacctgtgtatttccatgtgaaacaatgaacagtttgagaaggcaggaataacaaagaaagaaataatcctaaagtatggctgtggaagagctgagacttttttccttactgtaactctgacttccctcttagacagtgggcgccaccagcaagacagcagcttggtgcagggaatggagtgggtgaggactgagcgctgtgataaggggtataatgaggtataaggtagtggtgacatacagggtgccaaggaaggaaggctcagccctacctgaggaagtgagggaaggcttcctggaggaagggggatgcctatctgagtcttaagaggagaagaactgagcagcaacagaaggaaaaaagggcacttttgtgcatgtggcaggaatagcacacacaggggtgtggcagcatgatataattctgttctgtgaagccttgaatttggattcagctactggctttgtcattaactctgacaagatgcttcatgtgctgagagagcctctaaaccctcatacatggaatgggacgtatattcctgccctactcccatttcttattgggccattatgaaagtcaaacaattttataaattaaaaagatgtttgataaaaggattaagtgtggggaggtggtattatctttgaaactttaatttctctttcttgtttacaggcttgcaatccactccattgtaattctcccgctgatatatttcatagtcgtacgaaagaaccctttccgatttgccatgggaatggcccaggctctcctgacagctctcatgatctcttccaggtaaacagaagaggggtttctggaagaagcctccaggctcaacgttatcaactctcacctcactttacaaaacagactccagcttgcggtttttgtagctgtctttgagaaatgacctccgtattctcggcccctggccctgaacacattgcttcatgctgttgcatatttcctgctctcttggcatgacctgcagctcaggaaggggttatggaataactgggagcagtggtgggcacagcaccttctgattcctggacctgcctaaagggctagcatgatttggatcctttgtttcattttgttttgttattttctttacttttctcgacaagattacctaaaaggaccctttgtttactttttggaagacaggcatgtcttcaggcagggactaaggtccagcatttctagacataagttcctttctatttttatcacacagttcagcaacactgcctgtcaccttccgctgtgctgaagaaaataaccaggtggacaagaggatcactcgattcgtgttacccgttggtgcaacaatcaacatggatgggactgcgctctatgaagcagtggcagcggtgtttattgcacagttgaatgacctggacttgggcattgggcagatcatcaccatcaggtggggcatggtgtcacattcattgtcatcactgatacagggattaccgccagtaaaaattgtccatgaagggacaccaagaatgtcgcagtgatgaattctttttcttgatctataaagtcccttcccaagattaaatacgactatatcctggtatgcaagatttctgcttcggggtctgggtagccaaagccatcactctgtgctcagtttactgaagccagtaggatctaggcacaggctagcacaaagactcaaggctgagtaagggccagtccctgctttcaaactatccctgctagatgggcatgcacatatccaaatgaatgctgaagaccatgatgagggatgtaagagaactctgtatggtgttcacagaggactccagagagggaagggctggttctagctgggaaggtgaacgatggcttcccagaggaggggaacatttagctgaatcttagaagaataggaatttagcaggcaaaagaaaagctaggagcatttggagtggcagaaatagcttgtgatgcagccatgggctagttacagcatacagatttcttgctatggctggcataaaggatacataaacattcctttatgtttaaacgaatgaggaggcaggggtcatgtcatgaaaggttttgtacgaagagcttgtggaaagctcttagatgctttgtcatattatggacagatttgcattttatgtatttatttattttttgagatggagttttgctctgtcgcccaggctggagtgcagtggcacaatctcggctcaccacaacctccgcctccagggttcaagcaattctcctgcctcagcctcctgagtagctgggactacaggcgtgcaccaccacacctggctaatttttgaatttttagtagagatgggtttcaccatgttggccaggctggtcttgaactcctgacctcaggtgatttgcccacctcagactcccaaagtgccgggattataggtgtgagccaccacgcccggcagatttgcattttacaaagataagcagcaatatggaagatatattggatgggagcagggaccaaatctaggaaaccagttaggagaccactgcagaagtccaggcagggtattagaaggcactgacactgaggttggagaagagctaatgaattgaagaagcatcagctggattcagggtgaaaggcgagggaatgccaggatgactcccaggattggcagatgattctaaattggtgggtggggcttaccagaacaggaacgagtgtaagagaagcacatataggtgggaaagataaatagtaaatactttttgacagattgaatttgaaatgcctttaagacttccagttgcacatatgcaatgagaaatataggtctggctgcagatacagacatcaggaacatgggcttaataatggtcttcaaatgtgtaagtcacaagttattgcttgtattggaatcgcggctacatcatgattagctgtgatcttgggcaagtgacttgaatttttaaacttctgttttctcatctgtaaaatgaataatagtacctacaacttattcaagtagtggcaattaagtaatatgcatataaaatgtttataactgtgcctatgtagtgagtactcagtgaatgttgaaaatggatgacatgacgtagggagagtttgcagagaagagaaggagattaaggactgaggcttggaaaaatcctaatactagaagcaggtagagaagggaaaacccaagagggagagggagaaggacagagagatgggagggaagccagtaaaccttggtatcatggaaacccagaaaagagagattttcaagggtgaaatggtccacagagtcagaagctgcagagaattctagtgaaatgaggatagacattgtctgcccaagtagatggtagaactgtcattagtggattttgccagatttgtttctctaggacagcactattcaatatggtaaccactagccatgtggcccactgaattggatagcacagacacagaatagtttcatcattgcagaaagttcttttggacagcactatgttagagtgataggctgggattagagttaacctgaagacttttgttcagtttagaatggaagtttaagactaaactggtccctaggcctgctcaaggttgaatctgaactttttagagttaattcattcttgtgtcccagcctaaacataaattctagggataaaatcagagtttgttaactaacaatgttctaatacaatgcattttttaaatcctccccaaccctaaatcgcaaagtatttctgttggctgaagacaagtgcaaaatacaccatttggcacaccagctggggaactatcccaatgctgtgtaatctataaaaagtgttagcggctaaagaagcctgtgccaaagagattgagcaaagtcctgtaattataacagcagagggtatgtcaaaattgaaaccttgaatcatgcctgaaaaagtttctgctccacaaccacccctgtgcttccaacagttgttacttttacatttccaagggttttttcccacttccctcaccctgggctgtggaacccagtcttcactgaactgatttccaaggagtggtttatgaagtgcctattcttttgtgtatttgacactttgtgatgaaatccctccctcttttttggttgtaagttttctagatctttctaatcatttttttaatctcactgccagaggaatgaactctgggcctagaagctaaatagtcaattctcattaaagcctctccggctacctctggtatattcttaaatcagatttgctgaaaactactggcccagagccaataacaactgtgaggcccaaagtaatcattggcttaaaattaaaaatcctcactggctctacatggaaaataataaaagttggttttgcttgacagttaccattatagttcatgtgactaatggttaaagagatttttagacccaaagtatatttctgtggactggacatcaaagaaacataggtaccatctacccaaaacatacccttttgtggctttatcataatactcaaaggttacaacggattgaaaattgtgtgagaatatgtgtcaaaatggaaaaaaaaaggataaattgtcttataaaaataattagggccggaagcgatggctcagacctgtaatcccagcactttgggagacctaagtgggtgaatcacttgagtccaggagttcgagacaagcctgggcaaaatggcaaaaccccatgtttaccaaaaatattctaaaaaagaaaaattagccaggcatggtggcatgtgcctgtagtcccagctactcaggaggctgaagtgggcagactgcttgagcccaggaggcagaggttgcagtgaactgagatggcgccactgcactctagcctaggcaacagagtgagattccatctcaaagaaaagaaagaaagaaagaaagagagaaaagaaaaagaaagaaagaaaagtaaagctaattatacagcagggcgcagaggctcacacctgtaatatcagcactttaagaggccaaggcgggcggatcactttagcccaggagtttgagaccagcctgagcaacaaggcgaggccccgtctctacaaaaaatacaaaaattagccaggtgttatggagtgcatctgtggtctcagctactcaggaggctgaggcaagaagatcgcttgagcccaataggtggaggctgcagtgagctgtgatcatgccactgaactccagcctgggcaacagagtgagaccttgtctctggaaaaaaaaaaaatatatatgtgtgtgtgtgtgtgtgtgtgtgtgtgtgtgtgtgtgtgtgtgtgtgtgtataaggaataaagaagaaagacaattgtaggatttggggcctagaaagagctgagagaaaaaaaaagtagcagtagtaatagtagtagtagtagttgttgtaatagttgttgttttggttgctgcagtagcagtagtaataataccagtggcagcagcgacagcagcaatagaggaagcattagcagcaactgctgttgttgcagaagtagcagcagaaatggcacgtttttaatctttttgtttgttttttgttttattttactttaagctctgggatacgtgtgcagaacatgcaggtttgttacataggtatacgtgtggaaatggcatgtttttaagcatctactatacaagtgctatcccagatgccttacgtgtattaacctcatttaatcttcccagcagcttgcagtagacatactgtccccatcttacaggcaaggaattgagattcagagaagtaacttgcctgaagaaatgccatcagtaaaatggtagagcccaaagtacatcacccaggtgtgtctgacactaaaacctgtgttccctccaagtcacaagccatccttcaacctgtttagagagccaagtccaatggccggtcctaaaactaggacctcagtgtgaggaaagaactttgtaccactgatatttatgttttcttctgtggaaatcctctaactcaaagtagaatatgttcaagcagcaggaataggtttttatattattttctcccatctgaaggttcatagttctgagtttcagaccaatgccagtcaaacagcagtagtctggtaagcaaggtcaaggctcaaggacagagttttctttgactaaatgaattttgagtttcaagcccagcctcaggctatagagacatggattactgtgacacgtcagggtttccaagagggatcagctggcatggacacaaatcacttctgacaaagaaaacctgttgatgcattccatttaaatttttttcaaccagcattaaaataaacttgggctttccaaagagtacttaggtcagaagagatccaaagggttatagaggccagaaacctttgagactgaggcctgaaacctttagagtaattggtacagccccagaaatctctaatttactataatttggtggtcaaaaccactgaatgaaaatacacttgtcaaaaaactctggcctgtgtttgactgtaccctcaaatgctttctgcaacacctcagtaggcagatgaatgggcagtagaatcagcttcctaagaactctggctttttttagccccaaagaatatgaatgtgtggatagaatcagggattcttccagtttaaattgccaatttttacattttcacctttcaacacagtggaacccgggcaacagttcaggccttggcccaagggcaaggacttgtctccagaaagcactgtaggtgtggcctccagcttatccaagtcaagggatttttcagggcatgttgaacccttgtttccttcagaatgatccaattaaaataaggaagatgttgctgataaagagactgcacattacaaagaaaaaaatccctactgcctcagctgatcttaccaagagggatctttttaaatacctggtaataaagttcacctggctgcccctcctggattccagatctttctttcccacaaagtgcatctactggcaaaaaggagcagtcaggagtaaatgcttgtaccttggacaggatcagctatttctcaattcagtgccctgaagagcagttcccagaggtaaagagtcctgtgatgtcaagagagtgcataaagcctgcttaaccattgtctcattcctttgccttcacctgaaatgcccttgcccatctgcccctacaactatccttctgtccatccttcagggcaacttaaattcctgccatatattaggtgctcagtaaattattgggtggtgagtagatggaacaagggagtaggaaggcaggtgcagaggtacctggcacttatttaggatgagtgtatgtatacatagatgagtacacgaagcctcctattaacaccccatttagtaaactcctgctttcctcttgagtatctctcttacttattttttggtgccacttatgcagttcttccttgcattagagtgatgtgccatatctccgtctgcaaggagatggcatcatacccctcatagtccccctccccccacagctctaatcctgtaatgaggcagagctggggctcagcaagtcacagattctaactacccaatttagggacacagcagtaatagccatcgggactaagcgggagtaaccatttcaggccagggctttaacgggagaggtaagtgtctaactcctttcctgctggtatgtttctgcagtatcacggccacatctgccagcatcggagctgctggcgtgccccaggctggcctggtgaccatggtgattgtgctgagtgccgtgggcctgcccgccgaggatgtcaccctgatcattgctgtcgactggctcctgtgagttggaataaatgcactgccttagctggatgtgcaggcgggcttcccagcctcgcaggcgctgcagtctgtcatcattctctcctcagattgcctaatgagccacctgttgctgctttaattttcctctgaccaggccatctgataacatgcctaaaaattaactcctcataacgtggagcagtgattttaaaaagccggtgagctccattagctcattatacctggtaacactcaagcttaggagctgggtgtgggacagagataaacacagaacaaggtgagaagccaggcagggccccagagccatcctgacctatcccagccctggttcagcatcataggctcagaaccacctagttcaaaatcagtccgtcttcctaagcatcttccgaaccatcagggacagtggcacaagcacttgggtttgaatctccgtcctgtgtcttaccagcttcttgacctcgagcaagtttccttaacctgaggcccagttgcataatctgtgagatgggaaaaaatctgcctatgtcattgggttgttttaaggactgagtgagctcatgtgagtggagcatctagaacagcgtttggcagcccatacatgctcaataaatggcaagttttattgttatgattagaatgagttggaccattcaggccccaatcaacaacacttctctctctctctctctctctctctctctcacacacacacacacacacacacacacacatatggaatacagcagaacatctgggtgagaaagtaccttcagtgaccctcaaggttaaagttagaaccagcctggctccaagctttacccttgatgcccacttctgtgcatggatcttacagcatttaggtctggctctgtcccctggcattgcaggtaagtattgctccacatggagcctttgctcagaaccagctcaggctcactggggagtccagtgctatgtactgtagtttgcaggtgacagatgagatggaaagggaagcagagacatcctattgggcttgaaaacacagattcacatttcaaatggcaaaagcccctgcacctggcttggaagctgtgccatgaggtggcccctcagtagctaactgggctataggcccaaatgaggtggcacccttcttgcaaagatatcctatcattgagtcaagatttggttctttctagtgatgctggtggatttgcatttttctcctttccctgagtcttcctggaaccagttaccttccctgccaagatacccagatgagtcaaaggtccaattggaggtatgggataaaaagacactagggccagttcaatccctggacttgttctaaataacagaagggcatccagggtggtcatgtgtaagcattgtcagccttttctgttctgcaggtgtagttttcacaagattccccctgcatgcagttcctgtcaacaaagtgccagtatcaaaatggatcctctcctctgcagtgtgccttctctacctgtcttcctgccaccagtctcttccccaggctctctggaaattaagactggatgagggtggcccacagagaaatccattcctgggctgacctgtgttttctgaccccgtgctctgcaccatgcctcctggtttgctcataagtagagtgacctagattggtaaataaacaagtacaccatggacctgaacaaacacatacataccccacatgcacatggtacatactccacccacaaaacacccaagttctctgacctttgcccaaagagagcccacaatggcatttgcattgaatctagaaaatcccaagatagaggttagggctgaaaaacttactgaattctgaacctccctcagtcccccaaaaaatatctggaacgactctattcatgtttctttgggagaagaggaaggaatttagggagacttaggggagtcattgctactttgggggagctcatgctgtgcctttatgaacaaccccaggcctgtgaggagccttcagtcagtcagccatgaggacagcactttctgcacttactgaaatctaaactgaacatgtcaggtccttgcatctctccagtgatgaaggaaaatgaaatctgggcctcctgtctgactcctcccgtctctccccagggaccggttcaggaccatggtcaacgtccttggtgatgcttttgggacgggcattgtggaaaagctctccaagaaggagctggagcagatggatgtttcatctgaagtcaacattgtgaatccctttgccttggaatccacaatccttgacaacgaagactcagacaccaagaagtcttatgtcaatggaggctttgcagtagacaagtctgacaccatctcattcacccagacctcacagttctagggcccctggctgcagatgactggaaacaaggaaggacatttccgtgagagtcatctcaaacactgcttaaggaaaagagaaacactaatggccaagtgtacatttgatttgatatacagacctccagattattttctatatttggattcacagcctttgcgctctgggttttgggatttgggtgtggggtaagttgaagggaaatcaatttaaaggaaagttctattatctgggttttagaaattctataagagacaaagtttggaagtacataaagtaataactgttagaattaggtaatggatatgaaagagaaaatgctttctcatgcatagacaagtgttttgggtttttaaaaaaaatattctgtcattggttacaaatttttactcaggctttctattggcatggatttcctttgacctctcacttttttataaattataatgcatctaaaccacctgtccccagttaatgtgccaaaatgtcaatttttaacttatctccagccaatttcaaagaaaacagaccagcatagttctgcaataacagttttaagatgggcatagggtttggaagaaagggagaaggattcttttttcaatgtactgtattgggacgctggtaactgttaacccagtgttcagcatagagctatatatatatatatatgtatatatttattattttcatataatttgccagacagagatcagaattgaaccgtcaatgtgaaataaagagttctccttgtacttgaataataaccacgattccaacccaggtctgctttggggcttatcagaactcctttctaaggagcactagaatgagaaatcatgttgttcgatcgtttcacatctgtatatcagctctaaagcagagatgtattatggtgatactccaaggtggcatagccattcatttacaacttccagatttgagctgcctggagggaatccatatcagctctgcataagattatatacaaagctgtcactcacaaaaggctggatgtgctttcatccaactggaaggctttattcttccaagttcattcatactcaaagaggccagtactttgccatccttgcacttctgttatcagggcccaaataacagtggcaagctaccaactaagttgtattttaataaagattccatgggttgaacaagccacgttgcagaaaaagagcttcccctaacctgggttgttgcagagtaaatcccacgacataagctggtatcagtggttcgggggaaatagttccattctatgactcttgtctcctcctccaggaggactgttctaactagtaatcttggccctattcattacatcctctgcttgtcattctgctaatttatgaagatagtttattatagtctgtacttcagttctcatcttgtaaataatgcttaacataaacttgtacttacactgaaatccaaaatagtcatgtttctgcagtattctgtagccaacttaaacctgtgctttcatgtttaagaaatgagaaattgtgccaaagatagcagaagagtagataagtgctcagtattgacgacctacatctgaaatctacaacataatgatactgaattgttatgtaaacatcataaatagtaaataatgattcaatgtgaattttaaaatgcaaatattgctattgtttataggaaataaatctaaatataaatgaaattgaatcagtaatttatcttgggctaaatggttctaccccttactaggttgccccaattagtggcactagttggcagagctgttcatgagctgccagttatcattttggagtcagtttgaaaccagcctcttaacacactgctgttaactcataaaagagaagagtgttccatttcagtctcaataaacacttccctcattctttc

SEQ ID NO: 587 - DNA, 12369 bp, Homo sapiens
actttctagttgcgtgagtcctgggatccctaattccccacctgaaaaatggggtgagaacagaggttcccttgagaatgtactatgagcttataacgatgagggctgaagaaagtggtttgcaaagtgcagaatgcccttcagaaggtagccattgttaagaggacaaggttacagatgtgagtattggaatttctgttctttttctttttcctttgagacagggtccgtcactgtcacccaggctggagtgcagtggcacaatcatggctcactgcagcctggatctccagggctcaagtgattctcttacctcagactcctgagtagctgggactactggcatgtgccaccatgcctggctaattaaaaaaaatttttagtagagatagggtctcactatgtggcccaggctggtctcgaactcctggactcaagcgatccacccacctcagcttcccaaagtgctgggattacaggggtgagccaccatgcccagccattcttttttctttttttaaatctttcattggtataaaatatatacgcagcaaagtacgtaaatgatatgcatggtcattttcccctgcttttgaacattattttaaaacaagtgaactttaagttccttttactgtgtgtactttctggaacctcctatagtgagataatattattattataatcagaaaaatgccacctttaaaaggtatagtttctgttgattagtttccagggagaaagccttttaaaattccttatctcactggggttttaccatgcctttgggagaaaggccgagagaggattaatttccttgtgggtgaaaggaggaagtcactcctcactccgggctggcaggggactgaaggtggtgtcctatgtgggcactgggcagtgagccacctgcagactcctggcaccgagggccctcggcaaggccagttccccacatcctgcccggagtggccaccgccaactctgatggaaaacgctctggctcgccaaatcctgagctctagaaaagttctccttctgggaatctgccctacataagttgtcacgatgcagccaaagtttatgtccaaatagatttaatgcagcagtatttttaatagcaaaaatgtagaattaatgtgagtgttcagcagaaggaaattggttaaataaattcagtcgttgaaaggtagactatttcgcaggcattaaagtatggttctgaaatatagatttgtggtctttaatgtttcccaaatgaagagagataaacaattgcacagacagaggggtgtctataatgtaaatctgtggagaaccgcctggaaggaaatgtgccaacagcgtaagccagttccctcgtggcggtggcattatgagtgattatttttctttttatttaatatctctaattgtctatagtaagcatgccagttacataagtaacagaagtcaagagcaaagcattttcatcctccatgtcccccactcagccctcccactccttctgcacttttatttattttttatttttttatttgagacggagcctcactctgtcgcccaggctggagtgtagtggcgcgatcttagctccctgtaacctccacctcccgggttcaagcgattctcctgcctcagcctcttgagcagctgtgactacaggtgcgaccacgcccagctaatttttgtatttttagtagagatggggtttcaccatgttggccgggctggtcacaaactcctgacttcaggtgatccgcctgccttggcctcccaaagtgctgggattacaggcttaagcaaccgcgcccagctctcctctgcttttgaccatttgttgtaaatagtttgaaatcttttctttgaatccgtgtattggttttgaaacctacatgtccgatcagataaataatatggggagggaagaagaaaacataatgctctctgacaatgaatcataacatcatagaaaattagaaccttaggccaggcgcaatggctcacgcctgtaatcccagcactttgggaggccaaggtgggcagatcacgaggtcaggagatcgagaccatcctggctaatacggtgaaacctcgtctctactaaaaataccaaaaaattagccgggcatggtggcgggtgcctgtagttccagctactcgggaggctgaggcagcagaatggtgtgaacccaggagattgcattgagcggagatcgttgccactgcactccagcctgggtgacagagtgagactctgtctcaaaaaaaaaaaaaaaagaaaattagaaacctagacttttttttttttttgcaaagcaaatctctctttttacaggcaaggaagctgggctaagtgagggaggctgggagagctgtcaagcggctgcattgcggtttgtgtgggggcagagctggggctgcttcccctctcgggctctgggagcgctgaggagggggaggctgggctggagggaggccaggaggatgctccgggctgggtggggtggagctggctgaggagtcttctgcctgtttgtgctgggtactgggagatgcaggcggggagacacaaggtagaaggggcaaagtcctcacctaggaccttgagggagttaatgtgtaatattctaggatataagcttgaccacgagttgagaccctgagcacaggcctccaggagccgctgggagctgccgccaggagctgtcaccatgacggtgaggacactagccccctgctgcctgccccactctgttcatctttgtctttgcctgggtgggggcttttagggaaaaccattgctgtccctctctgggcctcagtttccccatctgtgcagcaaagaagttggacagaggtctttttttaaaaaacagcatcttgggccaggcgtggtggctcctgcttgtaatcccagcactttgggaggccgaggctggtggatcatctgaggttgggagtttgagaccagcctgaccaacatggagaaaccccgtctctactaaaaaaatacaaaattggctaggcctggtggcacatgcctgtaatcccagctaatggggaggctgaggcaggagaatcacttggacctgggaggcagaggttatggtgagccgagattgtgccattgcactccagcctgggcaacaagagtgagactccatctcaaaacaacaacaacaatacagcatcttgctctgtcaccaggtggagtgcagtggtggcaatcataactcactacggacttgacctccttggcttaaatgatcctcccacctcagcctcttgagtagctgggaccccaggcactcactaccacactggctaattttgtttgtttcttttctttctctttttttttttttttttgagatggagtctcgctctgttgcccaggctggagtgcagtggcccgatctcagctcactgcaacctctgctgcctgggttcaagcaattctctggtctcagcctcccaagtagctgggattacaggtatgtgtcaccacacctggctaatttttttttttttgttgagatggagtttctgttgcccaggctggagtgcaatggcacgatctcggctcaccacaacttccacctcccaggttcaagcgattctcctgcctcagcctcctgagtagcagggattacaggcatgggccaccacacccgattaattttgtatttttagtagagatggggtttctccatgttggtcaggctggtcttgaactcctgatctcaggtgatccacctgccttggcctcccaaagtgctgggattacaggtgtgagccactgctcctggcctaatttttgtatttttaaagtagagacagggtttcaccatgttggtcaggctgatctcgaactcctgacctcaggtgatccgcccaccttggcctcccaaagtgctgggattacaggtgtgagccaccccacccagcttatttcttatttttcgtagagatgaggtctcactatgttgctcaggctgatatcaaactcctgggttcaagggatcctcctgccttggcctctcgaagtgctgagattacaggtgtgagccactgtgcctggcctccattgatctttatagagataaaaaaaaatctcagcttgggcaatatagtgagaccttttctgctacaggtgcatgccactacgctttgccttaaaaaattagtgggggtagcggcacactcctcagccttgggaggctgaggatcacttgagcccaggaggtcgaggctacagtgagccgtaattgcactactgtactccagcctgggcaacagagtgagaccttgtctcatatacccacacacaaaacccaagtcttggagagcaaattgcccaaggccacaagctgcaaatcacaaggggttgagtggattcccactgaggtctctgattcgttgattctacaccagactctgccacagctttactgtgtggccttggccaagtcactgaccgtctctgagccccagtcttccttacatctgtggaaggggatcacaggctgcctcttctgaggattagatggtgtattcattgcctagggctgcaataacaaattaccaccaaattgtgggtggcttcacacgatagacgtttgttctgtcttggttttggtgactagaaacctgaaaccaaggtgctacagggctacgctcctgctgaaggcgcaaggggagggttctttcttgcctcttccagcttctggtggctcctcgcattccttggcttgcatcactccaatctctgcctccaacttcacgtggactcctctgtgtgtctccgtctctgtgtctatatttctctcctcttatgagaacactggtcgtattggatttaggaccaaccctaaaccagtatgacctcttaactcgattacatatgcaaaggaactatttttaaataggtcacattgaggctgggcggggtggctcacccctgtaatcccagcactttgggaggccgaggcaggcggatcacttgagatcaggagttcaagaccagcctggccaacatggtgaaaccctgtctgtactgaaaatacaaaaacaaaaaagaagaagaagaagaaaaaaaaattagacagatgttgtggtgggcacccgtaatcccagctacttgggaggctgaggcaggagaatcggttgaacccgggaggcagaggttgcagtgagccgagatcgagccactgtactccagcctaggtgacagagtgagacttcatctcaaaaaaaaaaaaaaaggtcacattgacaggttccaggtggacatgaattttcgggggacgctattcaagtgcaggggggatgcaggatgtgaatgtgccaggggtcctgcgtggaagggtctatgccctcatcaccctctgcctctcggggaggactgctgtggcccacggactctccccaccttctctttcctggtcatctcacctctgccttttctttcctctctctccagctccagaggccatatcatccaaatcccttatacgacagataagggaaccaaggcccagaaaggggctaagctggccccaggcccctctgccaattaggggcagagtcggcactagagtctgggcccccaactccccacccccccagctctagggacgaccacacccccacccagttctgcctgtctctctctgcgcctttgactctgttgggtggggacaaggctcccgggcctgcaccctcccgcagctctcagcatccctatttgtccaagtgcacccctgaccctggacttccgagtgcttctgccctgcagcagcccccacctctatccttggggtttgagctttgctgtttcagtcaggcagcccccaggagctgcaaggggagtgtgggtgcttctcttagtccaggcccagctcccctatcctggcctgactgttgcagggctcggggtgtgggcacaggctgctggcaggaggcagggagccatctcctgatgcttggtgttagacgtgtgtgtgcgcagggcacacgtctgtgagtgtctgtgtggcgggcacacctgtcttctgtttcttgtttgagccccttttggactgtcctcactggataacctcatctcccagagataatggtctttgtcagtgagagactgatttttttttttttttttttttttttgagacggagtctcgctctgtcgcccaggctggagtgcagtggcgccatcttggctcactgcaagcaccgcctcccgggttcacgccattctcctgcctcagcctcccgagtagctgggactacaggcgcctgccaccacgcccggctaattttttgtatttttagtagagacagggtttcaccgtgttagccaggatgatctcactctcctgacctcgtgatccgcccccctcggcctcccaaagtgctgggattacaggtgtgagccaccgcccctggccagcaagagactgattttaatcccgtctgtctggctccaaaatctggacccaaccccgttgtgttaagcaaagacatggggagttaggtgtccagcctccaaaccccactttctctaaagcagggaggttttgctcccaggagacaacggaccctgtctggagacattcttggttgtcaccgctcaggggagggtgtcactgacatccagtgggtagaggccaggaatactgctcaacatcctacaacacaagagacagaccccaacaaagaaatgcctgccccaaacgtccagacggccaaggctgagaagctctggtctgagcagcctcctgtctgacatgccgccgtcatggcccgctgtcctgggttaagcattgctgcctcctccaggcgtctcttataaaatgtactgccaggccgggcacagtggcttacacctgtaatcccaacactttgggaggccgaggtgggaggatcctttgagctcaggaggtcgaggctggcctggacaacatagtgagaccccatctgaaaaaaaaaaaaatcagctgggccaggtgggatgcctgtggtccaggctacctggggggctgaggtgggaggattgcttgagcccaagaggtcaaggctgtagtgagctctgatcatatcactgcactctagcctgggtgacagagcaagacctttaaaaaaaaatgtattaccggctgaggcaggaggaccacttgagggtcaggagttccagagcagcctgggtaacatagcaaaaccctatctctacaaaaattttaaaaattagctgggcatggtggcacacgtctatagtcgtagctacttaggaggctgaggcaggagaatcgtttgagctcaggaggctatgaggctgcatgcagtgagttataatcgtgctactgcactccatcttgggtgacagagcaagaccctgtctcaaaaaaaaaaaaaaaagaaagaaaagaaaaaaaatgctgggtgtggtatctcacccctataatcccagaactttgggaggcccagaggggaggatcacttgaggtcaggagttcgagaccaacctggccaaagtggtgaaaccccgtctctactaaaaatacaaagaaaattagctagatatggtggtgggagcctgtaatctcagtgactcgggaggctgaggcaggataattgcttgaatctgggaagtggaggttgcagtgagccaagattgcaccactgcactccagcatgggtgacagagtgagactccatctcaacatctcaaaaaaaaaaaaaaaagaacttactgcctgtggaagagttgagcaatacctaacaacctacccctacatgtgaccaaccagcgggtcacttcctcctctgcagagaggaggcggctgccagcgagagggcactgagggtcctcccatggccactgcccccttgacttctggcaaagtgccccagtccaatgagctcattcagggcatctcagatcatgctttttctggaaataaaaagtcagtgagcagaactcccacaatgtaaaagtgtcctcccataagttgttctaaatctttggtgcctgttgcgtcctggtcagaccaaccctcaccctctggtcatagatgcgaaaactggtcttgggtaatgagtttttttttttttttttttttagacagagtcttgctctgtcgcctggcacaatctcggctcactgcaacctccacctcctgggttcaagcgattctcttgcctcagcctcccaagtagctgggacgacaggcatgtgccaccacacccggctaatttttgtatttttaatagagacagggtttctccatgttggccaggccagtctcaaactcctgacctcaggtgatccacccgactcagcctcccaaagtgctgggattacaggcgtgagccaccgctcccagccctgggtaatgagctttgaaaacccagcttagaaatcttccctagtaaccatcgtgaggctagaggaggctcctactgtacagaaattcaggtgctgctttcctatggaaaataaggagcagatgaatcttaacaacaagtaatcaaaatgatggtcatttgggcagaccactgtccagaaaaaaagaaaaaatttaaaaaagaaaattaaggctgggcttggttcacgcctgtaatcccagcactttggggagctgaggtgggcagatcaattgaggccaggagtttgagaccagccacaccaacatggtgaaaccttgtctctactaaaaatgcaaaaattaggcatggtggtacatgcctgtagtcccagctactcgggaggctgaggcaggagaatcgcttgaacctgagaggtggaggttgcagtgagtcgagatcgcaccgttgcactccagcctgggcgacaaagcaagactctgctcaaaaaaacaaaaaaaaaaacaaaaaaagaaaaggaaagtaaaacaataaatgatggtggtcctgtgatttgctgttggtctacgtgaggccctgtgcatgggatttcacaaacatgttcttgaatcctctcaaaaccagcttgaaggttggtggtgtctccctggtgtgacagggtctgtcatacagctggcattcagcaacaacaacaacaaaaatagaaatgggagtctcgctatgttgcccaggctggtctccaactcctgggctcaagtgaccctcctgtctcagcatcctgagtagctggaatacaggtacacacttccacacccaggctatcaactgttttttaaatgaataaatcaaattagtcaattttacagaaggggaaagtgaggcttggagagagactttgatggacataggacttgcggagttttatagattcttagtttttgttcgtttgtttgtttttgtttttgagacagagtcttgctctgttgcctaggctggagtgcagtggcgtgatcttgtcttactgcaacctctgcctcccaggcttaagccgttctcctgcctcagcctcccaagtagctgggactatagatgcgtgccaccacacctggctaatttttgcatttttagtagagacagggttaaatgttaggcagactggtcttaaactcctgacctcaggtgatctggctgcctcggccttccaaagtgctgggattacaggtgtgagccactgtgcccggccttttttttttgtttttctttgagatgaaaagtcactcttgtcgcccaggctggagtgcaatggtacgatctcagctcatggcaacctccgcttccagaattcaagcaattctcccgcctcagcctcccaagtagctgggattacaggcgcccgccaccatgcgcagataatttattttattttattttatttattattattattattattattattattatttttgagatggagtttcgctctgtcgcccaggctggagggcagtgacgcgatctcacctcactgcaagctccgcctcccgggttcacaccattctcctgcctcagcctcccgagtagctgggactacaggcacctgccaccacacccggctaactttttgtatttttagtagagatggggtttcaccatgttagccaggatggtctcgatctcctgacctcgtgatccgcccgcctcggcctcccaaaagtgttgggattacaggtgtgagccaccgcgtccggccaatttttttatttttagtagagacgaggtttcaccatgttgcccaggctggttgctaactcctgacctcaggtgatcagcccgcctcggcctcccaaaatgctgggattacaggcgtgagcccctgcacctggccagatttagttttgggtgggccaagatcttgtgcctctgatacagtcattttccatatcatatttttgtttctggggttctgctgagggcagcgtgatttcatcacttgaacactttgcggaactgggcaggaagcactctgcccatttcatagatgggcaaactgagcctccgtcctgtgcctcttcgggttggggtggataagagcaaaacagggcagggagtggggaagctctgggaggccttgatcagagcgctctggctctgccactttccagcttggtggtctcctgcgtcctcacgtgggcagggggattgagacctgcagctgggttggcatgaggtggatgaagctgctgggcaagtgtgggattgattttctgtggggactcgagtggaatgtttctctgttggcccagggggaacttgaggttaagaacatggacatgaagccggggtcaaccctgaagatcacaggcagcatcgccgatggcactgatgggtgagcaaggtttcagggttgggggagtctgcaggcccggaataggcagggcgggtggggcaggcagggcagccctgtgaagtgctcaggcaagagggacgtcaggccaatgggccctttttcacacccttctccccacacccctgctggcccccacttcatgtctgaggctaggtttggggacctgcagaatttcagagttgatgccatatgctctattcttttgccccaacagccattgaaggggcaggtggagaagcccctggaactctgtctggccccctgcggggcaggtgcctctagggaacgcccaaatccccagagacaccaccctctttacccagcagaatggccacaggctggcatttcatgagcattaaaccagggcagccaccaggggaggctgagtggtctcgctggcatcctcttggttagaaccagcggcctcaccacctccgtgagtcacagtccagcgaaaggctctctcgcctgcagaacatgtcagcgcatcttggaactgtgctttatctacttttggttagagagggggcgggcaggtgcatgccataggagctaagggaaaagtgacttatttctcctacttgggtccctcaagtttgtcaaaatgtgtgatacccttggtctgagactcccaaatgaagacaccccatgacccagaatgccccactttcaggaaccctgcaggtctagcccaggctcctgtagtgatcttgccaagaagtcatacaaccccggttgcacacccatagtgacagggagctcaccaccttaggttggctgctggtggctaaatttaataggtcttcagatatctaagagatagcatttctctctcccaggagagccacccccaattcccgaagctgtcactatcagttacccttctctcaacagcgtgatccctgctccaaatggaatgtgctaccacagtgctaagtctgagcaggttgttacctcccttgttttaaggcacagatctcaactaacacaagctttgattcttccagcttgtggtcaaccaaggtcctccaacccaagctgctttatccaggcctgagccctgaacctcacctgctaccccttctcctgcagctttgtaattaatctgggccaggggacagacaagctgaacctgcatttcaaccctcgcttcagcgaatccaccattgtctgcaactcattggacggcagcaactgggggcaagaacaacgggaagatcacctgtgcttcagcccagggtcagaggtcaaggtgaggtcaaagggggaaagggcactggggtgatgtcaaggggagggcccagatggaagagagcctggcctggacacaggtgctggccttgtttgagccatcaggcactgccctggcccatttccagggcctcctgcctccttgacaccctccctccccacagttcacagtgacctttgagagtgacaaattcaaggtgaagctgccagatgggcacgagctgacttttcccaacaggctgggtcacagccacctgagctacctgagcgtaaggggcgggttcaacatgtcctctttcaagttaaaagaataaaagacttccagccga

SEQ ID NO: 588 - DNA, 2068 bp, Homo sapiens
agcaaagcagctcttatttgaaaaaccactgggttccgagttcattactacaggaaaaactgttctcttctgtggcacagagaaccctgcttcaaagcagaagtagcagttccggagtccagctggctaaaactcatcccagaggataatggcaacccatgccttagaaatcgctgggctgtttcttggtggtgttggaatggtgggcacagtggctgtcactgtcatgcctcagtggagagtgtcggccttcattgaaaacaacatcgtggtttttgaaaacttctgggaaggactgtggatgaattgcgtgaggcaggctaacatcaggatgcagtgcaaaatctatgattccctgctggctctttctccggacctacaggcagccagaggactgatgtgtgctgcttccgtgatgtccttcttggctttcatgatggccatccttggcatgaaatgcaccaggtgcacgggggacaatgagaaggtgaaggctcacattctgctgacggctggaatcatcttcatcatcacgggcatggtggtgctcatccctgtgagctgggttgccaatgccatcatcagagatttctataactcaatagtgaatgttgcccaaaaacgtgagcttggagaagctctctacttaggatggaccacggcactggtgctgattgttggaggagctctgttctgctgcgttttttgttgcaacgaaaagagcagtagctacagatactcgataccttcccatcgcacaacccaaaaaagttatcacaccggaaagaagtcaccgagcgtctactccagaagtcagtatgtgtagttgtgtatgtttttttaactttactataaagccatgcaaatgacaaaaatctatattactttctcaaaatggaccccaaagaaactttgatttactgttcttaactgcctaatcttaattacaggaactgtgcatcagctatttatgattctataagctatttcagcagaatgagatattaaacccaatgctttgattgttctagaaagtatagtaatttgttttctaaggtggttcaagcatctactctttttatcatttacttcaaaatgacattgctaaagactgcattattttactactgtaatttctccacgacatagcattatgtacatagatgagtgtaacatttatatctcacatagagacatgcttatatggttttatttaaaatgaaatgccagtccattacactgaataaatagaactcaactattgcttttcagggaaatcatggatagggttgaagaaggttactattaattgtttaaaaacagcttagggattaatgtcctccatttataatgaagattaaaatgaaggctttaatcagcattgtaaaggaaattgaatggctttctgatatgctgttttttagcctaggagttagaaatcctaacttctttatcctcttctcccagaggctttttttttcttgtgtattaaattaacatttttaaaaagcagatattttgtcaaggggctttgcattcaaactgcttttccagggctatactcagaagaaagataaaagtgtgatctaagaaaaagtgatggttttaggaaagtgaaaatatttttgtttttgtatttgaagaagaatgatgcattttgacaagaaatcatatatgtatggatatattttaataagtatttgagtacagactttgaggtttcatcaatataaataaaagagcagaaaaatatgtcttggttttcatttgcttaccaaaaaaacaacaacaaaaaaagttgtcctttgagaacttcacctgctcctatgtgggtacctgagtcaaaattgtcatttttgttctgtgaaaaataaatttccttcttgtaccatttctgtttagttttactaaaatctgtaaatactgtatttttctgtttattccaaatttgatgaaactgacaatccaatttgaaagtttgtgtcgacgtctgtctagcttaaatgaatgtgttctatttgctttatacatttatattaataaattgtacatttttctaattatttga

SEQ ID NO: 589 - DNA, 313791 bp, Homo sapiens
ggtgcgcgccgcggcttgggggagagttgagcgcttttcccccctcttttttttttttttcctcttcttcttaaacaaaccacaaacggatgtgagggaaggaaggtgtttcttttactcctgagcccagacacctcactctgttccgtctaagcttgttttgctgaacacttttttttaaaaaaggaaaaagaaaaggagttgcttgatgtgagagtgaaatggacgtaagattttatccacctccagcccagcccgccgctgcgcccgacgctccctgtctgggaccttctccctgcctggacccctactattgcaacaaggtgaacgctctgcttttgtttccaccgtgttcttgctgcttgatcctgggaggggagcggcggtggccgggccgcggcggggccggcttggcggaggccggtcccgggcgcgctcggctcgcagcccgctgcagcctgcgtgcgcttgggtagtaaatattgtggagtagctccgggggcttgccaaacaccgcgattgtgcggaaagtgacacgatttgctcggattctttccttcctgctgttcgcggctaaggatccctgcctaggtttgccggggggcgtttaaaaaaataataagagaaaaccgtggaatactttgggggtgtgtctggggtccaggaacggaggcagagtaagagaattcagtttatttcccagttcccccttctctctccctccctccccgggcagtgggggctcgtggcaccacttcccttctccggattagttgccaggggagcagccgggagtcggggtgcagggacctgggaggcgcccctgccccccacagggaaaactgccccacaactcttttgttttctcaaaccggttccggcagccgagcccgggttcggacacaggtccgcgggccagagcacagcggggtagctgggtcaaggtttggggaacagttcctgtttaaggggtgcgcgcggaaattgcaagtttgttgggagccgggcgagcacgtcgcgttcaagtccaaagctcccgcactcgcggagcagggtccgcggctgagctgtacccacggcccgctgacctcgggtgccagggccgcgggggcccggggagaggcggatcatgccggtgacccggaggtggggcgctggcctgggctgctgcggagttcggctgggtccacctataggacagtcagggggtacgagggagggggttactctcccggcttctcgaactctctcatcccagagagggaggacacgcagggaccggtcccccagagtggtcgcaggggcacgactgcccacgcctagggctagttggacgtgtctaagcagtcccgttggatgaacgttggcagagagaattgagttctctaaaacgctgggcgggccttttagacgcccaactctcgcttggtgataaatctgcctgatactcacagcccctgcaggcacatccatggcgaccctcggtgcattccacgggaaaaatcgttgggactcccaacatttgcctggtggcgagtcatcaccaaacggcttttttacctgatacagagatatttagtgcgctgccttctcagccctggactccgcaccacgcgaccgagtcgcagctccgagtcttggacagtgttgacacacaggcaggctctcacacacacacttccccgtggagaagctcctcgatgctgtgtccagtgtgagacccactcaaaggactgtgctgtgtgccgatggtgtttaggcaagttagaaaagagggacatccagtcttgagcaaggcagaagggcttccattgtacagggagcccttcagctacgggcaagttgaaaggtacggggaactttggcaagcgcataggagtttgtgtgatgaagtttcattatttgctggtgacatagttcttttagtctaaaatctgttttgtctgtacactcaagtattgtgttacgttttattttgcttatgacaccaatactattgctaataaaaaataataaagttgcagccctatcttggagagtaaagacttattccactgtagttaccggaaccaaaagctcagaactattttggcaatgagactggacaaatcttattaagtttatcagtgattttaggccccaaaaagaagttaatgacttggatacacatttcactcctcgttcttgtgataagtagggtcagatttaatttaaaagttaaatgctttggaaaatcaggaattacttcaatatattaaatcattttccaattaagtgctttaaataattttagtgggttgtgctgtgaattgaataaattaatttagaaagtattcagaatttctttactagctcattgaagttccttttaagtcaccccgtgtataagaagcaaactgttctttttaaatgcaaattaggcaccctttctgtagactagttgcgagtcttctatttaacttatccagagaataatagattttttaaaatccaaagtcataagacatgtttctaatagtggaagaagacttcatggaaatgtttctccagggacatctctggcccatctctgtgtagcagtccatcagatatatttgtcactggtcccgattatattaaatgtactggatagttttctaggccccacaaatcccaggcacttgagttttttcactccaccatgattagcattggtacaaaatttctgtccagctccacaattgtagttgtgcataatgcagtcaactagcatttgtttttgcaatgacatgagtggatttgcagggaaatggaagaaggacagaagtttggaaaaggtgaagtaagaaatctgtgcctacatttattaaaacaagttggatcagacatccccaaaagaacaatactgcaaagtaaatcttgcttccttcggaggcgtaatgaatatgtagcttactacaaatagcagtcagtttgtcaggtgatttgtttttaatagggtgataagatcataaattactaattatctttattttaaacctgtcaacactttgcttatttaaagttggtgtgctaaatcccagcggaaccagtatctatctgtgctttagaatcctacaactgtagctacagtttcccggtgacatttttttcaatgtcagaagagactctaatggagaaaatgaatattctcttcctgaagctttctaaactaaaatgtgattgttttactctgctgacactttccggcactgctgctctatagattgccaaaatgctacttacatttttcagttaataaactctggaggaggcatttttggaaacggtttaatctagtattgctctactgtaagactaatacacgttatgaacatatcactatgcaaagtagcctccattttcacatagcccattgtgggaacaatgcgaatgatgttggttaaggcaagtgtgtgaggcatctcttacacaaacagccagaacggatggcatgttgctgtatataggtcagtgttggaaatagcagtgtagctcatagactggacagacacatggaggctggagttaacagtattcacctcttgcagcctaatgcatggttatatttcagacattgaaagatgagtaccatagtggagtttcatctaattagactattttaagtaacattgtatcccttaattgagctgaatgctaccaaaataaattggattaaatgagcttacaattggagttctgtagtgatatagtcttgttttctattctagttaaagatgtcagatcatcagtttaaatatatacctacagagtaataacagttcttttcagtttcttagtgcagcgtcatttccaaagattgttttcactggttttatgctaagataggacaaagaagtggtactttttcatttttacaacgatgtgatgtgttcagttattgctcagtatctgcccacataaggagtagtaatacaattatgttatgacatggctaatgacagggatggtgacctcggcctgcagtgggaggagaaataatgggcttcactgttctcagtggttgcctttatggaatcatgtcctgaatctttctttggttgatttagaaacagggaagtccaaaacacaaacccatgcttcatgctggtgatatacagagtgaagaatagtgggcatttggaatattcagcttttatcattgaaatgaggaaggacagtgtatatgttctttttcgtaaaaacgcacaaggaaggacccatttgtgatgaactctgcttgaaaatgtcaggacaaacattagacatttgataacttttaagaataacgagattcattacagtctctgcaaaatctcctttgagcttattttctatttaaaatgtattatgtattatactttaatgtggcaatactcatcaaaaatacaggatttgtaagcacattaagaaggagtcattattcctattttgaacagtaaatgtaagaaaaaggaaaagatgggaggaagagtaggtcaaggaggagtatgggaagaaagaaggtaaagaagggagggttataagcagtttagagcatcatgcttgattagttcttcatccacctccataacttctaggactttgggaaattcatagttgataattcatacatcacatatatataattaaaattcccctgggagttttatcagctggcacttttcagaagttttcaggttgttaaatatgttttaaataaatgcctatgtaagaaagagcataaaccaagcaatcatggttttttggccactaaatcagatattatagaaaagtttcaaatgtagctatcttgactgtgtgggttatttcagtattgcaaattcaattttaaatgtctatgcaaacaaagttataagtatgagctatagagggatctgatgttatttttaacattgcataggtagtttagtattctcacagtttatcatatattttaaaagttagtaaatgatattaaggagaattttggtattttgcttagttacaaaaactaaactaatatgtaaatatctaattgaatgattattgtggattttgtttaaatgatgtgattgcaagggaattaagaacagtggaacaggaagaagtagggaaatttccagttttaggggtggtttcctgggtaccaacctggttctcaaatgttggttttggtatgtgagactatttctagtggtcatacgttttttgtgatgggctccattcaagagggttggcctagaaaatgacgaaggtagtggggagcacagtgattttatttagctgtgaagggtgatttattataatgctttctaaacttttgctaggacattagaaacttcaaaagaccctgcgggtgtttctcaaatactgatgattcttcctattctgttttaaagccagccctcagtcgcaggtctaccagtatgcccagcgcctcttacctcccacctctccatctccttcccagttacccatttcccagccactccaactcctgggaccacccttgcttttgctagtctcctccccaatcttaatttgaacctaggaggtctgtacttctaatctgaactctcttctccactggatactaatcaccattgtggttgcctcggctgcctggctccctcttcagcttaccttccttcatcatcaccataatcatgcgaacatatccattcttgcagtaacctgattccattttctatttggaatctaccagccctcaggcttgtatctgctttttgaaatcccaaattatgctgttttcctttccccatcccccctacctgaatggatgatgtggagttatacaatattgtactagagtaagacaaccttcatgtgatgctgagaggaaaaataactatgactgatatttctaagctatcatagtgtcccttccacaccccctaccattttatgcagtgtatttagagctcagagataagccccttaaacatccttcctcagtgagaaggctatgtttagattccaaaatagtatgaagatgggactgtgatcttcagttggaatacagtaaattaggttgggttacacttgaggtaagtaacaggggttagcatgtggatgtattctcatcagaatatacatagataactagaacaggaatgtttggccatgtagaactgaatcaattaatcaaatttagatcacttaccaccctacattttagctatctgagtgtgaatctcaagatttctgagaagtcataggtaggatagttatcttacatgtcaataaaaatgtaattatcatgagttgattgtatgctattaacaattacattgtaaaaatatgatcacttgttgtttagaataaaacatattgtgtacatccaaatacaagaatataaaattcatacttttatcagaaaacaagattgtagcacatcatagttattagacactgtggctctcatgatcctaactgtagttcttgccctcaagaagcttctgtttgagacatcttagaagctggaacgctcccttatttgtttaaattgcatgtttacccaaggtattaattttaccaattttagacatgcttttttcccttttcatttacttccacctcagagttattgatgtattttcaattcatctttttctttgaatatgcacttttcagaactagataggctggtctcccctgattgataacgaattgtgttaaatgggctgtccactaggaaactacagtgccaagatgataccgcttacatatgccctaatgaatttgagaattttttgttttaaaccttgcatgccaagtttcatcccaaagagcaatttctgattaaaaacagttgagttataaactgcttagaaatgtggtttataatggaagtgccaacagactgttaattatagcagttcttccataatactttgagacatggaattcacattaacctgaatgagcttttcctggttataacatgtttctccctacagcattcattttgaaaatgggaacattatattactctgtgcttcgatgttgacggtgcagcagaaaagacgagaagggagggtaattccagaaactccttgctctttcctgatgggaggtatcactatttcccacacttctttagtttgatctatggcaagtttgcctcacttgataaaaattttaaagttaaattttaaaagctattttcagatttccatgttactcatgaaaaaatcatcactgatatatatttataatatcaaaggtcatgaaaccagggtcactattaatgcttttttctgtttgtttgttttttgcttgggagatttaaatggttctgctttagccaagtatttatcgtttttcattcctgaattatgtgcttttatgaaactgtctggaaaggactcctaattaaaggaggccatggttggttgataagaagctttgccagtggccaagaaaatagaatgtattttgggtgccatgtggtcttacacgttatttgtctgatccacagtagtgatgatactagcttttggctaaaatgccttttgattgaagtctttgatgccactttggggttggggttaccgagctagaaacattggtgtgtgtatgggtatgtgcatgtgtatgggtgtgtgggggtggatttgtgtgtgcatgtgtatttgcatgtgtgtgtgtgtttgtgtttctcatggttctggaatatttctggccataaatgcatgaagatttatcctaaatggcagacttcctcaatgtgtataacagcagcaacaaaggaaaaacatcatgactactgggaatgcctggttaccactcccttttaagatactcagcaatatttcacaggagaagatgctgttgagaatcttagggctttaaacagacatgttatatcctaataagactaaagaaccaggtctttttaaggaaaaccataggcctttctcagggaaagactccattatgttgaatatttgagataaaaaccaagtgccgttaagtctatgttgacttactccctaggcaaaataaacctaaccataagaggatgtgattccctcccactctgtttcccattctcttgagaagcctgactttgttctgtgtctggtaaaagttctgacactaaaacctttaatccatctgtgttccagtcttccatatatccagtagagaaaatatatttgtatcaaagaagacttatgagaattaagtaggtagattatttcaaatcttgtggtgaaagatgttcaaaaattcaaagaattcagcaaaatactgcattctcagcccatttcttccatttctgctgccctagtggaataaaagtgttttggaaagttgtagactagtggttctttcaggaagagagtcaaagagataacctttccggagagtcaaaggtgaattgggaaaatggggtctctgtaggtacagtgtgtaatctccctccctcagatattgataggccccccggggggcctctttttccctctccacattaagagtcagtgcacctaaggagagatgctattatgagggctgttgtctgttttgcactgtaagaagataaaagtggagaataactgtgaaagagggaaatgccctcttgttcctgacttcagagaagcaagtttacctctctataccttcctctgatatatgggtcagagatgtgaaatataatgtgcaagattaattaacgaatgggccaactgggcctaaagcactgcctgatttccttaagtctgttaactcaattaaatggttaatttaaaaaatgatgggtaaagtgttatacgcattagtgttttcataccattgaaaaacaccgatgcttcctttctataccaatacacctcagcctaaaatgccagtaacaattgtattaagagaaatgttaataataaagaggcaggataacctttcaacaaaaagtgtattttatcatttggcagatgcagtcatgaacattaatcatagaaacctgcagatagtagaagcttaatatcaaagctaatgatttattttatgttaatgacttcctgccagggcataaaagactgttcataatggactctcagagctatgttcagttactaaggctaatgggataatctttcctctcccaaaattaagctttttgaaataaattatgctgttatttttcaaggtaactctcaaaaatttactgcaaaactaatcttttaagaactacttaaagaaatgaaaagaaagaaaaatcccaaagcaggttttctagttcatgaacacttttacttaattagggagagaaagtttgcatgtatgctaatatccctgaacttgtaatgctaaataattttaaaggcagccttctgtgacacaatctgccttttgagattcagctcctgtaagtacgtcccacaaaatagaccatgttttcgtcggcgattaccagccaataatgagctgaatggtagtaaaacatttgaatttttcactgcgaagttttaaaaatcatgtttacaattagttataaccaacattatatttcaataagagataatttgcctagtaaagttcacataatgtgctaatcatgtctagtggttaataaaggcctcctacctcactcccctgatggctataaaaggctattatattcatggcagcagttcaggtacagctgctgtgtgttaataatgcatcattgtcccactaatcaacatagcaaaggtcagcacccctaagcacctaaaccacctattctctttccaaaatatttattaacaccttaaaaacatatctgttcattttccttagcctcgagtcagttaattccactccaagctacttgtgtgataaaggttttgtaacctaagctaggtcgtagaagagattaatatatattcatagtaatcttctcccataaacatgtttccatttccacagtcattgactgaattagtgtcgggttgttatagccgtgagctcctttataattaagtaggtgtgtaccaaaatgagaatattttcagattttacatgttatttaaagagatgtttagaagaaaaacaacttttcaataaccagagacccatttaaagcaaacagagctaatcaggaaatgggaagggatatttaaaatctaagaaattaatcagtgttagtttgtagacctgatatggtggtgagatattattttcttaattgttcttttggcataagaaagcaataatagtaaaagcttcttaagccatattttctgcacacaaagaacatattcacgtgggatttccattttgctggaaaattgtgcaaatcaataagccagcacttatctgcattaaaattaggtagacaacaatttataggcatagtgttggtgtagttctcttcataccctcagtttgtattgaaggtaatccttgcttttgtgtcctcagagagaagccaaaatgttaagtgaacaagatctcattttctcatcttgtattattgccttctattttctgttactcttttgataaccttgtgtgtgtatgtgtgtgtgtgtgtgtgtgtgtgtgtgtgtttcctttatgatttaggaatcttcagtgttttaagagaagagaaaaaaatgaaactcaactatgtttccatcatcaagagaaatgcaaaaggcgaatgagtgggaggagcttctatttgtgcagcacataatgtacaatggtacatttgtcatgctttaaatatataatgcctacaataaaatatgtacaggcgcagttgtgaactatgaagtccgtggctccagtgccattgtttgtagtctctacggttgtcatacattgttctttgcacatcatacccttacagcagaatttgacacaatttctagctttcagccctgcaccattttcattgcacaatatacgtgaatttgacagggtgtgttgaggacaactctggcaagcaattgatattttgaagtggcaagcgtttcagcagctgcctgcttgtgaaaaaggaatgataagatatactgtattgttagtttcagggaaagcattaaggtttaagctctgtaaaagtgtacacattattcgtcagtggtgaagcaagtcttttatgttttttagagcttagctctctggctgatgtgaactagaatgacattggtcagtaaatgaataggagtactttgaatttgaactgctgccaattttgcaccaacaaaagaactgacaaaagattatgtgagatgcaaagcacacgcaatgttttgggggcggggaaagggaaggagagagcgagagaaacccacatcagagaatattctttagcacatacttgcaaggataccaaatagttaaacacatctatttttcatggctcatcagctacaacctaagctgttttatctaatatgctttaaaaacctgttgtatacacataggctttcagaatacgttcatatggaatttagaatgtttttctaaatatcgcactgtgccctaaaggcctgttggcagaatatcagaatatcagagtcacccactgctggagtccccaactctctctctatctggtagtgggaaattgtagtttaatcagttatggcactttcagtgtgtaacattcattagcaaggcaatttgtcatgactgttaatggtcaggatgcatctgctctctcagttacagagcatgataagtaagaagacaaatatttcaacatctgatagtattaacttgtttcaaatttgtaatccaaggttagttgcttaaaacagacacagtaccagattaacaagcatcctgtattcaattttactgggtcctgtttttatggatttatggctttaaagcacactaatatgctattatgaagggcacagtctttgattagatgttcaacagaaactaagttatgagcagagtaccttctgggttcatctggaaagaatttatgtgcataatattttctacagagcttcataaattgaaaggtttgatgcatgcaatatttctaacatgctacatattcttttcatgattaaaaaagtcacttacccactggtttatagattggttggtcacttttcaagtgagtttagagccttgatctattttaaaagtttaaaaattctactgaaaaacttcagaatgaattagaaatgtcacgttccccccccccccagcaaactgctttataagatcattgttcattgttctcaatggggaaaaaaagtttaaaagattcacccagttgaaaaggttaggattttttacatatcttgtattttctagttatgacatcacatagcttgccatacaaaatctttttgacacattttcatttttaatgaaaggccctaaaattcagggcataatgatttcttagaaactgaacccaatcttggtgaaaaattcgttcttgctagtaacaaaagctgttactgtttaagttcctgttgagcggttagttggtacgcttcgctgaatgttgtcaaaaaggctttcctcatgattgacaacccggcaggaatgtgaatggagattttaattgcgtatcatgtgtgcatatcagagtgagtgaattcatgactctgcttagctccatatctctgcaggtcagccgtgccaaaaaatgctcttttatgtgcaatttttccaaaaagagaaaggtgtatgtgtactgaagtcatttgttattcatttcttaagtgaaacacttgtgttccctgagccttggagtttgaaagtagaacaaaaatctattttgagatttctttcttttactctctgtacttataatatacttggatgatgtaaattcttttcagttacaagttgggaaaagtctgccagaacatatttttcttatggcacttgctatacgaagtgtgtttatctttctttctttttttttcccccctaaagagtacttagaaaagaaagaaaaaatgtaagccagtggaaaaatttactgaggtcaattgcctttctataacttgcaatcttgagaaaagatctggcctggggtgggggagggaaggaaggatatatttctgagaggtggaaggttcatacagttgtttctgaattttggagaaaatagcaagaatataatgcttattgtaaaatgacattattaaacatatgaatgttcatttcttagaaaaatggctctttggttgaagattcatttctgctatcactgcttggtcaagatacagtggtggtgataagccatttatcttactgaaatgcctaaaacccaatatggtacatgtgagattttaaagtggagtgaaacttactttgtaaggtaactttggctacaataccccagactaatcaagaacttaataatgtaaaaacaggaaaaaaataaaaacaattatgccatacataagctttcattttatgtaacaggaaactttgggatttgggctgtaaatttagtgcataattactttttaatgtcattttgaataggtgagaaaaagattagcaccagggtcattttaaatataactagagtaataagtagggtaatgttgaaaggatggtgactttatggacttaggatatcccatagggacttataactttgttctaggctctaatatattatctcaactcattttagaacataacaaattgcaggctgacgatccagccttcatatagtatgcagtaccgatgatcactatatgaaggcactgctgtacctttaaaatgctaaagaagaaaaatctattttattttaaaaattcagctctatgtgcggggtgacatttttctaatgttatggaagactattttgtgctttatactgagagcttaggcaaggaaaaaatctatttacaaaatgaaaaaaaagtgctcagctgaatgcatttcacttttaaagatgatattctggtaatgaactttatcaagcagagaacatttcagtaaaagtattaaagtagttcctatttcggttgcctcacttaaggctgtgtcactgtttccattataacttcttattttcagatagctctaatgtggtccctatacaaatatttgcatagggatgaaatgagaatatttgagcctaagaagtcaacttcttaaaaaaaatttggaatgcgcttgttaaaaagctttggggttgttaataagggacacttaattcattttcagaaattgaaaagcattttttgaacacagagtgcagaactttaagtgttaagggggtcagggagggacacagagatgaataagtcgtgaaccctccctccatatggctaataagagaggaatacagataactatcatggaaccacagtataattgatgtgatatgaagtctgtggtcaaagtgctggcagtataaaaggaaaagttgaagttggaggaatccctgttgcttcctggaggagatggcatttcaattggcctcaaaaatccagcagtgaagaaggggaaagttactcctaattttttgaattattttttagacttctcaccttttataaaatgatctatgataactcaaaataaaagccacacatacaatagggctatttgaattaacatagaacgttatctcccggaagtggagatgcaagcatacttcttgacctacatattaagctataattcaacatttaaattggcctcttgctcttcatctgagcaaaactggaaatacatgagtgacagagttctgattatcagagagagtatcaacactaattagtcatgtgtaataagttttcctctagtgaaaagttgcaaaaactcgagtgaaaggctgcaaaagagagaaaacgaggcaacgcatggaggggcgacatccttggctctccgagggggagtctactgggagttgcctggggtttcggtagtgggagatggggcatggcaaaccgggaggggcctgcaggaataagcaatagggagagccaggtacagtttaggattaaggggcgtgaaaagattagaactgtgtttgaggaagatactgctgccaatgtagagataatgtgctggggaaagttggggtggaattcaaattgctgttgtcagtgggctaatgttcatttctagtaacaatgtgccagagaggacttccctgggcggactcacatgttgaaatgaatgaccagcaattgatctatcttttgatggcttttcaatgaaagataaccttttagaggttttatactttagccaaaagttggagttatgttaaaatctaacttcttaaagcacatatgaagttgtagtctacatgcagattaattttttaattgataagcccagacattagcatgaatattaatgctttatgtgtagtcttagaagaacacctgctgagttaacttccaatctgttctaattgtggagtaatatttactcaagttattagtaattgctttcctgaaatagcttgcttagtggtaaatacacatattattagtaaatttggagagtatattaaagtgtccaaacatattcagaaatctctgttggcgtttttgaaggtatctcataatcttccagtatccacatagcaaagctttccaacttttccactggagtgccctaatgaatgggagggaatttatatctcagggggctagacgaagatccctggaactgcctctgcaatctacataggtcttagaaggctaaggtttcatctttaagcaatatgtggatcttatattctacaacacactcatgtctattttaatgtgaatatgatactttgaagcacttacaattaagtcaactctgttctaggaaaatagtctttgctgttctatagttctactgctttgggatatagttctttgctcctaggagacgcatgacacaacataatactcttttgtccttattattaaaaaatagagttgaggccttgaaaaacttccttttattaggtcatctttaccacagagaatggaatgatttgtttcccctgattctttccctgactttcactaattctctacttttgataagaaagcttgacaaagtattttatcttagtctaaactggatgacttcagttagggttcaatagttgctggtgccccaggccgacctacgttatgctttgtagggagaaaatggaaaagagggaggaagtcaaatatcctatgtgtaggtggaagagaaaaatccctctgttatttgcagaaactgatgatgtttagtgatggcaggagatagtcaagtgtggtattatattgttaggcattaatagaaaacctaacatgaagcgaatttggaaaattcaagaaaaggatcagcaagaaattgaacaactatgatgatagtttgggggtgaagtgggggcaggtatagggctgagagaggcctgtaacataataaatggcatgaggcatggattcctttctcccatacttccttctttcctcccttcttctcttccttccaccacaggcagacataatttgtaagatgattgatactattttcaagattcttctgaattactttcttagatgctgatatggtttggctctgtgtccccacccaaatctcatcttgtagctcccataattcccttgtcttgtgggagagacctggtgggagatgattgaatcatgggggtgggtctttgctgtgctgttcttgtgatagtgaacgggtctcacgagttctgatggttttaaaaacgggagtttcgactgggcacaatggctcacacctgtaatcctggtatttttgggaggccgaggaaggtggatcacctgaggtcaggagcttgagatcagcctggccaacatggtgaaacttcatctctactaaaaacacaaaaatcagccaggtgtggtggcatgtgcctgtaatcccagctactcgggaggctgaggtgtgagaattgcttgaacccaggaggtagaggttgcagtgagtggagatagccccactgtactgcaggctgggggacaaagcaagactccatctgaaaacaaacaaacaaacacaaaacgggagtttttctgtacaagctctcttttgttacctgccgccatccacataagatgtgacttgctcctccttgctttctgccatgattatgagacctccccagccacatggaactgtaagtccaataaacctctttcttttgcaaatttgctcagtcttgggtgtgtctttatcagcagcatgaaaacaaactgatatggatgccctttcactaccactctcccacctgcatcctcacctgcccacagtgggcttctgtttctgggcagccaggctctcccatcttccccattattgttaggggacacccagtagctttggtttggcagggtggcatgcatagattttaggtgtgtgcatagaagacttctcaacaaatgtcaaactacacgatgtccatagaacaccataaaaataaaaggttttgtttgtttgttttttggatttttcccccttttcctcattttagccttaatctggttttggaagtttttgttaaatggacatgtgtaaataatggatatttgctcttattgacaagaatatgtttttccttctaaaaactcagtttaggcatataaaaataagcgttttagattttgcctttgtccaaatcaaggtaatttcctcatatttaacacattttgaagtttcatctgcaacagcagtctaggagaatgaatactatgtgtctgcagtttatgtacatttattctcaaggtctcattaaaataaaatgaaaaattaatgactaagagatgtagattccttatacctgatcccatatcccaattttataggggttttagaacatttgccatagggttggtacagagaaggcttccaggagcatgacatttgtgatattggttaatttattcattaaatattttccgaatggttattttgtgccaggaactgtgctaaaatggtgaggatagaaaaagaaaaaaaatctgtgtacttacagaggtaataatcttagatgtgatacacataaccctattaacagaagatgagtcagctgagaattaaatggacaactttaatatttgacctaaatactattactattgagctctgaatacccctgcattcacttgtgcatttaccctctctgcgcttttcctttcctttcctttagtctagatgagatgaccgagagtagaaccagcattccttgccctgtctcaagtcttgctgtgacagcaactgatagcatgtgggatgcagtaacttggtaacttaagccaatagtgattgtttatgaagtagctaaaggaatgaatttttaaaaattgaaattctaatcgtgcaaatatttaaatctttggaaatttgaactaggtatcattcaaaaataaaaaatgggagttcatgctcaactcttttttttaatgccttaatgggctgaaatcacttgtttaacattactcaatactatttttatgtatgaagtgttcataagctcaggatatttttagaatagtcaaataatccgtgttcattttgttccgattcatcataatgggtttcaaaaggtaaacatcgttgtgcattttaaaattgcttttctgacaaattctacttattctgtgagagtcattgcagaaattgcttacaaaataattccgtgaatctcatattttcttaccatctcatttcttcccctaatatggtatggaaccagactgcaattatactttcacaattactttattatatgggctgaaatatactcctgaagctcttattaccttttccatacaccatttacacagacctgctgatggctgtcagcggtgcttccttgggacaatcagccattcttagcaggttgtgtttaaattcagaacaccacaaatagaaagcacctctctctccttgctgatgaatttttaatgttccagcatttataataattcaaaggacttcattataacagcttgcagaattaggccatgtgttttagaatgttggatatttacttgtgatctttgtcaaagagaaaaaaatgaaaacaacacattattaatagtgtgtttgtgtctgtagcaacctgagaattatgatgttacccagtgtagagctccttttccctgaaagaggttgattaagattttctacttcaaataattcactcagaagctcttcttttctccgtaattgcattttatgggaaaaaaaaaaagatgcaattctactccatgtctttaaatggaaactggaatgccttatattcaaatattgagtacatttacatttaatgacaaaatcaggaacctttcttttacattacaaagtgaaatattcttttaaaatagccagttcttagggtctttgagagtcgtccaaaaagagatttggttgactttgagagccatatggtacagtcagtctctttaatgtattttttctttatcatttcatttcactcccaaactgtaattacattacaacaacttacatatttggccatctcttataaactaatgacatttgaaatataaataataggacatagttaaaatataatcaccttatgtgtttcctgctgtcaaatgccaacatggagtgattgcttctcctttgaaatattagagagatttgagccaagtgctaatacccaatgggtactgtactcctacaagtctataatgtcaaatgttcagaaatttccagataattgattgcatacctcaggtttttttcacagtgcttaaatgtatcagtatacttttttaaacaacgtaattattcatttatttggtattaagccatttagtgtctgtctttcaggtaattccttttacactgctgatgattagtgatagcaatgaaatcaattcatgaaatggtcctgtttgtagcttggtatggtagaaagaagatggagatggaatatcaggccctggatgttaattacagaactaaccaaatgatgtggggcaagttacttaattctcatctttctcttctctaaaaagaggggcttgatcacctctaagattttttccagcccaagaagtcagagaaatccattggcttgttaaatagtaaactccacaatatcaagaggttctgagattaaaagcaagcggagtgtcatctctattacagacaccaagtttaaaaatctaatgctgttgtcttttaaggcaccatggcattcatcataacaactaaaaagtacagcaaggtaggtttccaaagagtgaaatttaatcgagagtagacattgaacatgattgcagctagttccatcataacatgttggcagaaaacttcactctttttaattcacatcggaaccatttttggctaaagggcaactggagcatattaaagtagcaaaggataaagcatttctccaatgtttccctgtactcatagggcaagtcatggatcataaattagaaaaagaatttgggaatcagaagtcaaggaggatgctacaggaggacaggtctcagagagctgggaagaatccagggatttagcaaggcctgaaggagcaagccaaacagctgtatccaggcatcttgattaaaacagtttcctgtcctgttcacagatttatcatcattattaggattctttcacagctgtaacaaatcctagcctttctgattcaggcaacttgaaaggccctattttaagtggagagtgtgcaggctttcaaaaatggacctgccttctgtcagccggctccatctttcacacatataataccagcaggattcaaggaagcagagttcctgacttccagaaggttttggtttggaaaaaaaaaaaaaagaagtttattcttgaaaaccaaaaaatgcagagagaatagcatgaaagacaaaatatattcttagtgctagattgtcagtcgttcttaacctttttggttcacacatagaagtgaatattctagaatttctgacactgtacttaaaaggaattcataggtcaatgctttaaaaacaaagtttcagaaaactgaaaaaggaatcctccacagctctcttactgttctggcgttcactctctgtgctgttgaacctggctgctggcgctccggcaggtacctgtgaggccacctttttggctgttcctgtaggtgccctttttctttgacttcagctcattgtcactcttggatttttttttttaacatgagttgcaacaagatcatatttgtgctggttactccaaatgatggatttccctccgtgattcccccagccaatagcgccgtaagtaatttatctcagttaaagcaaagataaatgttatgctttgatcaaaatttaggggcccaccatgaaaaattgaaaaacaaaaatatgctttgacacactagttgacaaccacttgttaaagtagtaccagagataatctttatgcttacaggatgcatgaaaacaaaatattaaaactgtatgttcataaaacataatgtttacatatcataaaactctaaaattatctttaattcctcaagaaaccatggagactttctataccatcctgtacaactatcagtcaaggccatagcagaaatcacttgagtgttaactgttgagttatttgagttatacagatggatttttccactaactctggtgtagaatgtgccacagatgagaaaggatcctaggtacgaaggaaatagaggcatcatgggaaactttacgtgagttttatttcttttctgtaccacagttttcccatctgcaaaatgaaattaacggcagtattttattggtagaatttataatgaggattaaatgataaaaattgtgtaaagcaccacctagacttcctggatgagaagtgttcagaaacattagttgctgttgttgctgctgaaaacctcactccggtggcgtagaccctgccggaggagctcacactgtctataaactccaacacttctgaaactcattaacttgtgttccttggggtttctcagacaggtatggaagttggtggcattgtttgtaagctcacaccagcgcagacacaaacttgttaaggttatcatcttggaactgtggtcagaaccttcccggggatggtgtcacttcagggatatctgacctgaaggtgctagcagacttcctgatcacgtgttcccccacatcgggctgtgagtacctccagtcaccaatgagtcccaaaacaaaagccagagcattgtttatagttggctccagtaaaatatgcatctcacctgggattgccctctatcctgtttccagcaatgcacttagatgaattcatcacattaataaactgacaccctaggccccaagagatgccagatgaagaagtctctacccaagatgcctgtagatttgtgtgtgtaggtcacaccatttggttacagaatcggaaagaacaggagatttttttcacagaaagagatgatgggaggacgccagcaacactcatcacctggttcttagctatgcttcccccacacttgctcctggaggtgttcacaaatctggaggaatcataggcgagtctctcctcctatgaaactctgtgcctctagtgatctttttcattttctctaaaattaccagaaatagtattatgatcattatctgttaagcaggagtcaaattacctttgttgtggatttctgggttgagttttagtcttttaactaaattatagaccataatttttgtatgtgtcaccaaattttaagaattgtttctaaaattctacagggcaatctggattttattgaatacagtttcattaacatgtatcccataaaaggggagaggaattcatttccaatttggaggtatgcactgtctgtattggttaccattgttagcactggtttgaggttagtaaaagataaattgccacagtgcaaagaagttaagatgggttactgattctctgcataataaggattcagcaaaagctcctcaaatggccactaatactattaggagtgttaatgggtgttggaaaattaaactaattaaagtcatttttgaagcaatgttagtctgtttcatcaggtgataataaaagtgtaaaagagacattatcatttccatttatacttttagtagtaatttgataagaagcaattatcctttaattggtattacctcttgtagttttcagggcatttgtaaatatatttgaaatgaataacaacactgttggggagaggtggggagttggacatttggatttccatttcacggctaaggaaactgaggttcagaaagtttaagtaaattatttaaaagtgtgtgatcagtaaatgacagaatggggatgtgttaaatgaatgactgattcaaatacctctctacacatctattctacaacacatcagttctgctgaattccggaaaccactggagtgctagcatgcctacctaaacacttaaatcattggctaggtgaaaactgccacagaaatgcaaacctgtttcaccttatttttaaagaaatgtgcaggaatctgcatctttttaaaattatttttaatattgtctgggcgcagtggctcacgcctgtaatcccagcactttgggaggctgaggcaggtggatcacttgatgtcaggagttcaagaccagcctggccaacatggtgaaagcccatctctacaaaaaaattagccgggcatggtggtgcacgcctgtaatcccagctacttgggaggctgagacaggagaattgcttgaacccaggaggcagaggctgcagtgagccgagatcatgccattgcactccagcctgggcgacagagcgagacttcatctcaaaaaaaagattatttttaatattcatctttcaggatattcttgagaaaatgaatgcacataaggtcaatgttgacaagaaagcttcctgagatgaatgttagaagtcctagtcgtaaattgttttaatgtgttggaatataggcagaatgtatctctgaaattcctatggaaaaaaaaaacaactcttttagagcgaatattacctttatgtatatagttgcaaggtcaagttagatcctaaaacaagtgacctcaattacataattcaacaaaattaacaaaatcatgaatgatacgaatatgatcacagtccttgtcccttatgcttagaacataatagggtttataagacatctgtaaatgatgatataagacagtgaagtgctgtaaaagaaatgcaaatgacagtgaactttgaataacagcatccaatactattcttcgtttttatatcattatttttggatccagtgtagcaatggctttctgtgccactaccaaatgtagtgacatcagtaagaccaaaaggctatttgagtgtcctctctttagaaaccaggataaaaggtgactaaaatatgtgtttctcttagggttgcatatggaaatgtaaacctccttgggggcttagataactttaaggaacactactcattcttcagaaatgtcaaacccattaacagtgcggtctgcgggtttgcttccaaactctgggctgcttcagaggtccttctgcactgtgtctcaggacaattactgctttacattttaaaaatatttgaattacgaagtctttcaaacccaattattatcattacttataattattatataataattaaatataataatgaaaaccccaagtattattctaaatctttcaaaaacagtaattatgtaatacctatatgcgtgtgccactacacctggctagtttttgtatttttagtggagacagggtttcactacgttggccaggctggtctcaaactcctgacctcaggtaatctgcctggcttggcctcccagagtgctgggactacagatgtgagccactgtgccagtcccactatatgctaatttaatattgtagttatgtaatactcatactaatttttacatttattatgttttcactcatacagaaataaaataaaaagtcaaaacattcctactttctcctctagttccacttctagtaataacatccaccaatagtttagtgtgtatctttccatttttttactatttttatttaagcataaatatttatcttattaaagatactgatacttaatatataatgaatattacaaaatctgtaaaacatgtaatttttaaccaaattagaatcatggtctgtcatattctttttattttgtttattataattttcagtaaataataattgaaagtccttagtttgctggcttacattaatacagccatcactcttgatatttcgatgttgtaggcaaatacttgtcttgtttagtgtgacaagctggcaggtaaatgcaaatgatgtgacattttctgcaggaaattgttattgtcatttaccaacatgccagtaaaagttgatcaagtctgtaattgaatcctcctggatcattttttaaaggttggattattaggggaaaacattaggatttatagctcaacaatcaagttatcaaataactctactatttaactgaggccatatatgtagaagcaagaatgtattttcaagcaaacagcttctaggtgcaggagaacccacacagaaaaacttatactttgcaggagaaagaaaggacttcaggtacattttctacacaggtattcccccattataaacttgtaacaatagctgtaaatatttaattattttaccaggcttaagggaaatatttgttgaagaaacaacattcataagacttggttcaaaagcttttctagtacttagcagttaggccatgtcagataaaacacataacaaagtacattaataatcattcagtggatgttaactgagcacctaccaccacctgtgcttggctctactgggaattaaaataagaacaagacacagtttgcttgaggacttcacagttctgtagatgcattcactgttatttgtcagtggtacttatgaaagtggatgctgttatggagagatgaaacttgggcataacaaagaactcacaaccagtaagtgatgaagctggaactggaagcaggatctcacctcagagcctactataggaagaacagaaaggattaaaaaggcgtgagctgcagaagttctaccatgaccccatcctgtgtccctgaagaaagtgctcatacatcttgtgacgttttcttgctgagttcagatatagcctcatattccacttcccgacaatactcacttacttgttggtgttgggatcccccttgccacctgtttgccagtcctgtccaatgctctttccactatgcctcactgcttctaaagaaaacaatagtttatgtcagagtggtgaatatttactgggcacttactctgttctaggcacggggaggtaaaggtggttaggatatagacactgtctagaaagagagacgcacaaataggtcattataatatatcatggaagatgctaagatggaacaacacacagcacaaaaagaggctgtaacctggcctggatctcaaagaaaacttcctggaagagaggatgatggaaagagaagaaacagtaagaattaaccaggacaaaggtgggaagtgtttcccagctgaagagaccagcacaggatgagagtgaagggtggggctagactccttcctcttgagttacgttaaagagcttggcatttgtttgctgatgcttgtgagaagccatttaaagattttattaaagaagtgagatatcagatgtagattttagagagattactctggcttccgtacagtgaatgcatttatgaggacaggatggaaaccaggaataccaattaggaatctatcagactgataattttccaactttttttataccagcaagagctttttattttttattatatatatataatatatataatgtatatataatatataatatatatatgtatatataatatataatatatataatgtatatataatatatatatatatataaaatatatatatatgagatggagtcttgctctttcgcccaggctggagtgcagtggcgcgatctcgactcactgcaacctctacctcctgggttcaagtgattctcctgcctctgcctcccgagtagctgggattacaggtgcccaccaccattcccagctaatttttttgtatttttagtagagacaggacttcaccatgttggtcaggctggtctggaactcctgacctcaggcaatccacatgccccagcctcccaaagtgctgggattacaggcgtgagccaccacgcccggccacaagagctttttattaaaaacaaatcttacactgaaatttaataaatacgggagatggaaaaagaggattcctaaagcttcttagaagaagtttgaaaaccattgatctagatgaaggtgactggagaatggagtggcagcactgacctagcatggtgaaatcagtggaaagatttgggatgtaggtagaaaggaaaatcagatgtagatgcttggttggatgccagtcactgagaaagaaagtcatttataacatgatacaaatacttattgataccaccataccaaacatggatgaagccctgcactgagggctctgtgtattatttaattcttataataacctaatgagagatatgctgttatgaaacccattttacagatgaggtaacagttttgtgcttaggaagttaaaaacaaaagtgagctaagactaacaactagatctgtctgtctatattgtccaagaagagcatattggtaataaaggaaaagaatcatgagataacccaagttttaaggggtgaatagaggaagagacccctgaaaagaaggaacaatcagaaccaggatagagtggtgtgtcatggaagccaggagaatagagcgttccagggagtgtctcagagagagttctggggagtgtcatctcaacagtgatgttataagagaaagactaaaacatagccatagaatttgtcactatggacattattggcaacttggtgaaggtagtttgaatagagtgctgaggctgggagtcaggcagtggtggacggaggaatgagaaggaattgaggctttgaggctggcagtatggagggctctttcactgcatttacctgagaaggtaagggaagagagagagcaatagttgagggagacagagcccaaggggttatttttggataggagaggcttcggtatatttatatgtgagaggacaacgccgctggagaaggagcacatgggaaaacctgctggagtcacagctggtggagatggcatagggacctactgaggctggggtgggactgcctttgatagaataaaggacacttgtgctttgcaactggcaggaagcaagtaaggacacatgcagaaggtggttgatttgtttgatgggccttgaggaagctcctcaagtccatgtccctggttacttagcacactaggaggtggaatcctatgcccagagtgatgagatggggctagctagtggccttgaagagatgagtgaagatctggaacagttgctgtgagatgaggggaaaggagctaaccaaaagcaagaataaggatttgtgagcagcactgaggacccagctgagagcagggaccctgaatacttggattccttctctgaggagctcatgaccttaagaaagttacatcaaactcttcccagcatcctgggctcctttttctgtgggggatgattttgctataataatatcaggtgccaataaacaggtggcattctctggtttgctttttccttctaaatttaattagaaatacataaaggatacctgacacacaccgtgtccgcctcttgacattagatgcttggtcatatcctgcattggaaacatatgatgagttctaccaaagggctcttagatttaagcaaaatttaaagagtcacagggcaactagtatgcagataatttaattcagttacctacagcagcattttccacactgtgtgccaaaaatatgtatgtcttgtgaaatttttgataggtgttccttgagaaaagttttcctaggtcaaataaaacatcactgcattcactactctcctcttagaaactcgttacatattagcttataaaaggctctgagaagcccttcaatattgtcacttctttaactttgtgtaatccagtagaacacagttaggaaacaaatggttttgtatcttgccatagtgcactgaaagcacctgaccacatcagtggccaacgttctgaatctgatggggccttcagtctgatagaccatcactggagaatgctggccataaagccttaagttcctagcatggatggaggtgttagcatcccagacttctggttttggctgggcatggtggctcacacctgtaatcccagcattttgtgaggccaagacaggaggtcacttgaacttgggaatttgagaccagcctggacaacataataaggatcatctctacaaattaaaaaattagccgggcatggagatgcatgcctgtgatcccagcgactggggaggctgaggcggaggatcccttgagcccaggagattgaggctgcagtcagtggtgattgacgactgccgtccagcctaggtgacagagcaagaccttgtctcagaaaaacaaaacttctggctgaatggtttggattaagtcagccttgcgttttttccctgaggctcttccatgctaccaaggagtgaatggaattccctagtcacttaatctgagaagttacttccaacaggcaccactgtgaaataatacagtggctgtatgagggacttgcaggaactcttaactcagtgtaccttccagattactgaagagctgaaagaggtcactatgatggtctcacaacccactgtgctggagacatgacccctgaagtgagaaaatatacaacaggaagtgacttgaagaaaattcagttacctacagcaggatttcccacactatgtgctgaaaatatgtatgttttataaagcttcatacacctgtaaacacgtaagctacatcctaaaagtgttttgtacatcataagcatgtgtgctatgcccgaaacaaatatgctaggtctattatcagcatgaagctctgttagcgtgcctttcacaaagtgatttcagagggttaaggttcattaagatcttgatttctaatttgtcatggagaactattataaattcttttctggcctgtacttattttatcttaaacttggatgctgacatagtttacagcctatttaggtttgttaagtattacatttcactaatcattaataatatgaagatcagtattatttttagtgaatggaagcccattagtgtgatctataacttgtggctaataggtacctgctaagagatgtgtagtcatgtcattgtgcaaggatacccaaatgtcatcattttgttttgatttgcaagcagtgatgcattgtctgtgaatgctccagcttttcttacaccacagctacctcatttgccaaatatgggaatgatcctttgttcgtgttaattgaaaatgacatccttattcatcatatgcaatttttttagtcattaaaattctgtccaaagcctatccaactaaggggaacggctgactaatacccggggcttgttaatctattgttatcagctttctgttttatcctcctgacatgaacagaaacagggactatgatgtccaaactttgccttgaattctgtacccaaaatgtaatgctggagcagttatactcatgatctagaaaaatttttggcctaagttatccagaaaatgtctggtgtctttcatttcacttggaggttcaaaaacttacgtctgattatattcccattggaaatataaattcctatgatgaatttcccttcacattgttacctatcccttcgtaagcatacaaagcataatagtgcaattgattgagatagtgagctgaaatgaacttttgaaagaaaaagaaaaacctttaaaaataagcctgagtctaaattacactgctaatcatcacctgaattaagatatagccataggctgtatctgcttaacgtcttattccttctttgtgaccttctgagaagtagtaaaataaatggcattaaaataatttatattcgctgccaaaaatgtgtttttttaatataataaaggtttccatccctttgattaaatttttgtttatatttgacactttcttgaggtacataaattcgcatgacagtgaaagtccacacactcacaggacccagggccaggttgagttgaatttggacacatgacataaataaaagtggttttatgtttcaccttcatctggtaggtgagcactccaccttttcttgtgaaacataatcggttgtgacatggcaaaattagatcctggctatttattatcttctgaaatcaaaccccataactgggaaggcatgtggtaggtctgctggggcagcttgcatgcagagaggaaaggggggtgggtttccagttttataagctcaaggtgattttctccaacatctcgaacattttaattaattaccctgaaagattgagtaaattattatttgaatactttatggcattacatgttaacatttcaaggacaaagtgctgtactttgcttttcaacaatgcttcatctgtcagaatatatctttgaaatttatgtagtttgctacagagtaaagggggggacagacctggagtcctatgaattattaggagacaccagagtcaaatgtgatctattccacaataaaaggaatatttattggtatctgatttcaagttaggtattaaaaaattaacagtgaaattgattagctatatttttctccaaacatgtgaaacaaaattggctttctttgatgaagtttgtctgatttttttttaaccttcggcaaagctgaaaggctaagcaaatgcctttaaatcagaaggcaaaattcatgaaaacggttttgggcatgccagcttctccctgggtgccatgcttcacaaagtatgttgtaagatatgtgctcgactgttgatgcttttagagaaaaggtctttcagtttagatatagaaatctttaaaaatatatatttcattttcaaagcattcttcagcctgcagaaagcctggcttgctgagtttgacaaagtctgtttaaatgtagaagtgcataatatgtcataggctgtttagttgatctttgtaaccaataacaagcttctctctgcagatataatctttctttctccataagggcactgaaccttttactaacttcatcctaccatcagtagattagattaaatccccatttactgcatcatattaatattttcaatggtgcactaatccaagaaataaatgtgtcagtttctatggctacactgtaatgggcatagccatcagagagtgccttaaggccacataaaagacttaatgtacagattgaatagaagcacattatttattacgaagctatcaagccgagaaatttagcaatctcattttttagatttgctcatttgacctgggccaatttgcctgactgataatattgaatatttagtatcacaatgtttttgcagttttaaggataaagtgtttcagactaatttgattcagagcagtttattgaattgaatgattttacgtccctggaatctttattaacttcttttttaatcttagtgacttaaaatttaagtgggactaaggaatagtctactttatatactgatgatgggagtctatttagcaaaaacaatgacagagagaaatggaagcaaacttattaggccggattctgtcttctggacatggactgctgggaagagggtaaaaatgggtatggagttggggagtggaataatgtgctcctcatgtctcttcacaccccaagagtcaaataaggtttaatattctgtgggctttagtccgggtatggtggctcacacctgtaatcccagccctttgggaggccgaggtaggtggatcacttgaggtctggagtatgagaccagcctcaacaatatggtgaaactccatctctactaaaaacacaaaattagctggacatggtggcgcacacccgtagtcccagctacttgggaggctgaggcaggagaatcacttgaaccccacaggcggaggttgcagtgagctgagattgtgccattgcaccccagcctggacaacaagaatgaaactctgtctcaaaaaaaaaaaaaaaaaaaaaaagaaaagaaaagaaaaagaaaaagaaaaaaagtactctatgggttttgttggaatggtttgattcaccctgaaatttgtaatgggagaaccagaggaacaaaagtttgtaaagaaaaatttctctcattctctttctcgtaagtctctcctacctcctttcctttggacaataataataaaaatgctaggatcatttgattaaataagagtcactcagtcaacacaaagcctgctgtcttcctccagtatatttgcatttgaaccaaaaataaaattgaaaatttcaattttaggctgggcacagtggctcacgcctgtaatgccagaacaatggaaggccaaggcaggaggattgtttaagcccaggagtttgagaccagcctgggcaacagagggagactctgtctgtacaaaaatcaataaattagccaagtgtggtggcgcatgcctgtggtcccagctacttgagaggctgaggcaggaggatcacttgagcctgggaggttgggtctgtagtgagctgtgctcgtgccactgcactccagcctggacaacagagtaagaccctgtcttaaaaagaaaaaataaaaaaggaaaaagaaaattatgatttcagattggtggtttggcatcatataattttaaaaaaagtttgattacattacttttcttaatagttaatgtagatgaactaatttagaagttgaattcagccttcagttgctggtagctaaaaattgtggcattggaatgtgactgattatttttcattcactgatctgcacatgaaagtgaaagggattgctttcattaaagtttggtagtaaagttcctctcagatcaaaggctgttttggtaagtgctatagtgtaatatctagaggatactgaaaattttcaggcagacctgcaggggcccatttctatctactttttatatttctttgtttggtttattctcttattatttggcatgatttaacatttaagcagatgtaggatctggacttactactacagaatatccattgatatatccatttcatttatacttggcattacacttggaaaattgtattttagtttgggatttgggtagagaatgtttaaaatttgtgggtattttactgtattctagaaacctgttgaaagacaaaatgattttttccagtattcctttacacttcctaagagagctactaataactgtgtaaactgcaccattgccaaaagctgacatttctagaatttcacatgtcagtaaaacagtgtaaaacactataaggagcagtgggaagacaggagagaattagcagagcattttagtggctttaaaggagtcctcccaatctattgaagtcttaaactttatgttctggaaaattctatttctagtaagtaaaaataaccctcatgacaaaatttcatcagtgttaatgctaatgagaagtaaaagatatcgagaatgcatagaaagttattacctacgaattattagtagtttaaaataacatgatatttgcatggataggtgtatttttattttaccagagagtgttatctgtctctcacttaaaaactgactaatatagacttttgtggctattttccagtacaatattaatacaatcattcccttatttttctaaaaagtaaatagaggatctttgtttttaaagagtcatatatcgttatctttttctttatctctgtagcatttggtttatagtttgataataaagatgtaatattttaagtcctctttcataattcaagtaaaaaatacctgaaagctttattttaaaataagtatatactttttataaacccagtgaatggaataagtattttagtaagaacattctgcggtgcggtcatacagaaaggtacttaaacctatgggtaaagaaatgtttcctctcataacatttctttataacctgagcattaaaaggattatatgtattgtgatacctaaaacattgagtatagcattgtgataaaaattaacactcatagagcaacaagtcaacaagtgtcttttgccctaacagtatttttaacttaaagttaaaaatgtgagggtttttctactctgtcactgaggcttgttcctgaatttaggaagaataaatgcagatattcttccagcaaaaattgtgaaaggaaatttctacagcattttagcctcttggttcctaaaagagtgagttatcgtttctctctcccgtggtcattaataatgacagatgtacatggtgcagagttcacctacattattgtcagtagcagggctggcaagagaatatttattacaggaggaggagggacagagagacatgatgttgaaacagaagacaagagcagggttcaattgtttttttctgttgaaataaaatataatcattctccaagctttctcaatagcatttatttcaaagcactcttattataaatatatttcatctccataaatgctccttgtggtgttgattttaaaattgaaatgatgaggcactcatttttattttatttttccaataaacctaataaccaaatatatttgaataactcttaaaatattatttgattgttgataggaggaccctttgattgttaaggtcttttcccatcatgatatacagaactaaaggtatttaaaattgatgcagctagcatttgaatcgtgatttgaaattttgcttaaataaatattataataaaaagtaggttccaagatgaaaaatttacaaagtgcatttatgcagcctcttctggactctctccttccactttctcttttttcctctgcccttcctccctttctaattttagcctattaagacaactcttcttgggattcctttcctgggttagtctgttgattgtcccttatggtacaaaggagagcctgtatttggagttgtgttttctgtgcctactcacactccctcacgacagaaatccagacacagcctcttcagtgggaatacctgactgactgtgaattctttaaaacaaacaaacaaaaaacaacgatgaaggggttggggtagggagaaatgaaattggataaatatacggtgcttctctaatttcagattaaggaaaggatgagggacatagcttcctgtgtgatttatacagaaatcacacagattcccaagggtagaggtacgcaaatgaggatatattaaaagaaaacttaaaagccattttatcacttagctgacaaaaatcatacaacttctcaatggtattcttcagaatgattgtagttgtaacaaagatacagtctagggtatggtacatgggggtccctcataaatattaggttccttttcccttaaggcaaagtccatatcttgtttattttcctaccccctcatcaaccagcattatgcccacacctagaaggcatttcgtaaatatgtttttgatgtacatacgtagagatgtaaaggacatatgggcattgattaattaaaattcatatccataaatatatgttaagatcacttctagctgcacagtcatactgtttgcaagcaaactactagtttggcctaagtgaatttcgcagtgcaatttgatgcgaggaaactacccatctcatggcctcaaggccaaggcctcatggaaaacttggctttcaatgtccagactgacccattgaagaatgatgctttcaactccccaattctccgtggaagattttttttaaaagcaaactttaaggcattagtggtcctctaattagaaaaataaatgaaatataagccttttccaaattaaaactaaaccagacaaataaagagtattaggaaataaaattgaactacaatgcaaagatcactacttatggatctacccaaatggcattaacaagagcagggcaagatcaacacaactaaaatgatatctctgtttcaaaaagctgttctcagatagaatgaaataaatcactgctttagttgacaaatattcaactaaattttttattatttttcccctttataagtacttaacgatccattttaagttgtgggaaaatgaagaaatatatattcacaattttggtaatggtatagtcttacagtagctagggaagtctgccgtgcagtattcgattttttttcaatcaagtcccattgtcagttatctatggcttttaaaacaggatggagttacctgttattcctttgcctcaattttatccaccgcctcaccatctctttgaacttgatgccaaaggaggctagtgcttcatcctgcctgacaagttccagttattagagctttcccaagtaacatgatcaataccttcagaggtgttttattctacttttcttagacatcatgtaaagacactttttcaagtgctacttttcagagatgctgaatgatgctctgagcatgcaatcacaatgtgaaacttaaagctaccattgacttcctcttcttttgcactgtaacaaacttaaaaaaccttaagcaaataagggtgtattgctcagggagttgcaagaatcttgtgtagaagccatacctacatttttgccatctctcaactcatttatgctgcaatcccgaattaacttgaaaactccctttatacacagaatcaaattcctctcattttaacaccttccctggcccggcacagcagctgactcctgtaatcccagcactttgggaggctgaggcaggcagatcacttgaggtcaggagtttgagaccaccctggccaacatggagaaaccctgtttctactaaaaatacaaaaattagctgggcgtggtggtactcacttgtagtcccagctactcaggaggctgaggcaggagaatcacttgaacccaggaggcagacactgcagtaagcctagatagcaccactgcactccagcctgggcgacagagtgagactctgtcttcaaaacaaaacaaaacaacaacaaaaacaaaaccttccctatacactgtcagatacaacatctaaaatttataacttccaccaacacacaggtgaacaccgaccagtaggtagaggcttgtattaggctgttcttgcattgttgtaaagaaatacctgagactgggtaatttataagaaaagaggtttaattggcccagttctgcaggctgtacaggaagcctggtagggacctcaggaagcttacaatcatggtggagggcaaaatggtagcaggcacatcacatgttgaaaacaggaacaagagggtcggggggaaggtgccacagacttaaatgaccggatcttgtgagaactcactgtcatgacaacagcaccaagccatgagggaatctgcccccatgatccaaacacctcccgccaggtcccacctccagcattggagattacaattcaacataagatttgggtgaggacaaatattcaaactacatcattctgctctaggactttcccaaatctcatgtccttcttgcattgcaaaatacaatcatgccttcctaaccgtccccaaaagtcttaactcattccagcattaactctaaagtctaaagtccaaaatcccatcgagacaaggggagtacctttacctatgagcctgtaaaatatagaacaaggtagttacttccaagacacaatggggcacagacattgggtaaatattcccattccaaaagggagaaattgacaaaagaaaggggctgtggctgggtgcagtggctcacgcctgtaatcctagcactttaggaggctaaggcaggtggatcacgaggtcaggagtttgagaccagcctgaccaacatggtgaaaccctgtgtctactaaaaatacaaaaatcagccaggcatggtggtgcatccctataatcccagctactcaggaggctgaggcaggaaaatcacttgaacccaggaggcggaggttgcagtgagccaagatcacaccactgcactccagcctgggcgacagagggagactccatctcaaaaaaaaaaaaaaagaaaagaaaacagaaaggggctacaggccccatgcacgtgatgttaattaagcctttggtgggttccaaggccttgggcagctccactcctgtggctttgcagggctaagcccctgaggctgctctcacaggttgttgagtgcctgtggcttttccaggctcagagtgtgagctaccaatggatctaccatccttgggtctggaggatgctggctttcttctcacagctgggactgtgtgtggggcttctaaccccacatttccccttctcactgacctagtagagattgtctgttggggcttcacccctacagcagtgttcctgcctgagcatcctggcttttccattcatcctcggaaatctaggtggagggtaccaagcctcattcactcttgcactctgtgcacccacaggcttaacaccacatgaaaggtgccaagacttacagtttgcatcctctgaagcagtggcctgagctgtacctgaggtttcctgagctgaggctggagtctggagtggcctgcatgtgaagagcagtgtcccaaggcgttaaaggccagcagaaacctaggccatgcccatgaaatcattcttccatcctaggcttctgggcctgtgatgggaggggctgctgggaaggtcctgaaatgcctctgaggcctttttcccattgtcttggatgttagcacttagatcccttttgttttgccaattttgctatatttgcataactaaaattttttaattcctctcccaaaaaggtttttctttctctgctccatggccagcctgcaaattttgcaaacttttatgctctgctttccttttaaatataagttccaactttaagtcattcctttgcacccacatctgagcttaggttgttagaagcagccaagttacttcctcttaaacactttgctgcttagaaatttcttccaccagataccctaaatcatcactcttaagtgcaaacttccatagatccctaggggatgaacaaaatacagccaagctctttgctagctaacgcataccacatgggacctttgctgtagttcccaattatgttcctcatttccatctgagacctcagtagcctagacttcattgtctctatctccgtcagcattttggtcacaaacatttaatcaatctttaagaagttatacacttttcttcatcttcctgtcttcttctgagccctccaaactgttccaacctctgtccattaccgagttccaaaattgcttccacattctcaggtatctttatagcaaagccccactcctaggtaccaattttctgtgttaggctgttcttgcattgctataaagaaatacctgagactgagtaatttataaagaaaagaggtttaattggttcacgaatatataggaagcatggtgctggcatctgcttagcttcttgtaaggacctcaggaagcttacaatcatggtggaagccaaagagggagcaggcacctcacacagtgaaagcaggagcaagagaatgtgggggttggggcaagtgccacgcccttttaaatgacaagatcttgtgataactcactgtcacaaagacagcaccaagccatgagggatctgcacctatgacccaaaccctcctaccaggccccacctccagcactggggattacaattcatcatgagatttaggtagggacagatacccaaactgcctcgatgctgtcccaggctcctggaggaagagtctccctagcagatacttgcacaggactgcagagacagtgactgcccaggtcacttggttcccatctctgctgtgttataaagtttcataaactggcctgtgagactctacttgtcaccaagcttgggttgtagcataagtagaattaagctttatgacttttggtgacattactaataattttcttaatgtagctgtttgtatggataatatttttcctccatttccttttttcttcatttttcccctccaaagttgattcatcttctccctgtgaacagcgcacgtattcccaactgcaaccaaggcctgcacgagaagcaagttgccacttactacatttcacatttgtcttaccatgattaaggggcaaaaaggattgttccatatatagagttgccaggctttcaattgcctctattctttatagtccaataaataaattttccttttttaatagcacattttctacatcatagcccttagcaaacaagcatgaatcaataagtatcgaacttcattcagtatcaaccatgtaaataaaatgtcagtgttcaggctcttcgtctggaaaagttttagtttttcatcaaggctatctggaaccttcagactcccaccaggaggggattggagcagcagcagatctcagtgccaggagaacacaacagaagggggctgcatgtgtagatgcctatattattcagggatctctttaagagggatctcagagacccagggatcacagcaacgagacacacattcctgggtaccaagcatcatgcctcacccattttagaagtgaatgacctcactcctacagagactttatgataaaaactaacctaagaagacactctaaacttaacatgagccctcaagaacaggtgatcgattttcctgcatacttagagaagaaaggggaagctggagtcacagcataggcattgggtatctgaaacagggttaggaagtagtgtgttcattggcagaataaagagcatgcactcctatggttatggactttaacttacaggggaaacatttgtgactgaggaaaggtggttatctgtgcctgtggtagaacttcctcaaagatgttcatcccagagcagagctgccttatggggtgtgggtcagagctctgccctagctctaacacaaggagtgcaggagctgggttaccccagcttgttcactccgctgccttcaatattttcagtaaaatgagaaaatgctactggcttttttggtggttgtgaggtttcaattataatatgcaataagatatataaaattgctttgtaaagtgctatacaaatgatactctagtattgatactgattgattatgtcttggtagttgatagacttggtttttcctgaatttaagagagatcatatgggatacaactagagaacagtgtaaggcaaaatataattaaatatgagactgttaggttgggtactaaaaaggtttgccctatgatccctgatgaagagagcatgtttttgaatagaaatattcttttcactgaaaacatacatgagattatttatttataacaacaactactgcaaaaaaattagcataaaattaggagcataaaattagcaacataaaaaatcagctgtgtaaaaaataaccattatattagtcacattgtatatttttatctctctgaggaatagaggaagatgccaaaagtataggtgccgagtctgaaatatcagttatttctttggcattattatgaattcttttaaaaaaaattaagtagttatacttgatttgactccagattcaccagtgtgaaaattctctttcagcatataggcaaagccagacttgagaagcatccaccattcagacaaaggcactctcacatctcctcatttggtttttccaatagtgagaagctccttgtatctctgggtagtttaccttcctttgcgtctgaaggactgctgttttcacttcctcaccaggcttttctaatcagtgtcttgcagcgtgactttcacttcaaccctatcttaccgtctcaggggtatccactgaattcctccagctaaatcatttgtatcctcactggattctcttggatgtgtactgcgcagtggaggtccctccccttgaaagattcttctaacctggtttacagcgccttcttctctctgacttcctgagctctcccttccctccctcatgtaggcccttcctgacccccttttttttttttttgagatggagtttcactcttgttgcccaggctggagtgcaatggcgcgatctgggctcaccgcaacctccgcctcccgggttcaagcgattcccctgcctcagccttctgagtagctgagattacaggcatgcaccaccacgcctggctaattttgcatttttagtagagacggggtttcttcatgttcctgaccttttaatgctgagcaggccctttgactccaccttccttgctttctctctccctttgccctcatccctctagtaggcactatctcatcaaggttttagctatgactgtgctgctgactacaaaaccagtatcttcagttttatatttacagatgtaggggaggaaaaatacctttttattttgctcttctaggttctcaagtggggcccctataagaaaagacagattggcaagagaaaagcttacaaatatgttcaagctgagttttatatggcatgggagcctccataaagaaatgaagacctcaagccacctcatgttagaacaaaaggtcatgagctgcacggaggaagctttgcaaagcctgctcactcgatctcttggcgtccctctgtcttcagataaggacattcctttcctctgggtatacagtgggcacctctcatgtgagggtctcatgacctgctttgggggaaggtcagagagtcccttcagcatctgctgtttcttagattcctccagcttagactattcactatgtcaaggcaccatatttttggagtgacatgttctgaaccccatcacagatgttttcaggccgacatttccaaagccaaatttatccactgtctccctttcaccatttttgtcattaggatctttgttcttctgatccttgagggttaaaaatctaggagtctcctttgagggcaccgttttcttcatcatattaatacattttgtcaatttgtcttactggattacatctgcgttcccattttcaccattaccatctcatggttgtgtcactacgaaagactttgtctgcagtccctgccttcagttctgcttacaggaacagactagcaggtagtctgctcttccttagtgacaatttaattttcccattcctctagtggctgcctattttctcttgcatggcctccacataatgccagccacctctttccaaaggcctggagtctcatgctgtctgagtgttggacattctcttgtctttgtcttttccacgctgctgtcgctcctttaatgctcaagctatactcaaatttttggcttcctaagaggcacagagtcaagggcctcattttccttctgaacttatcttgagattccaattcaccttgatttttttctctaactttaatttctgtctacaacatccagaagcagtccactatatcttagtccttaatattgtgctttttttaacgcaatattgcattgctacctcatcatttttgtgaataaataatgtctcaataataagattcatccgtcgggggccagatatttttcagcttgatccatccgcatatcttacgaggtacctcgtagatagatgttcattcagtacttattgcttatagatgttcattcaatcagtattgaatgaacctgtattgaatggtaagaaagatgcttcactcttcatctgcttctttttctctgctctacaaatattcaacattttgctgagaaatgcaaatgtatttctcttatgtaggaattacatttactagatagctatcaatatgtttcttaagcacccattatgtaagtacttgagcagcactattagcagggaacacaagttccttgcctctcttcaattgaagcttaatagatatttgttcagagaacagatagacagcatgtttgccgacagatttattgtcggagaagttaagagttgagaggttaagtgacttgcccaaggttacttattttgtggtcgtggtacttattgccatggtttgaagtggaagattgaaattattatctggacaatgcaagctttaagaaaagaaaaatatttaaataccaaggacaatgaggaaatgggataatgctttatgaactttgaaaagtaatgctttgtttttcgtaatatccgcaagtcacactggacccatgctatttaagtgaagggcctcacagaaagtcacaatttaggactatattttgggaccctctggagggcagaggggtgaattgagtctattctgatatgtcatttctagatggaacacttaatattatttaagtcaggtcttccaaatctgttggagggaaggctcttgatttctattaaatagatttatgaagaccatgaacagccttctctagcacaaggatttgtatttaattttctgggataccatccaatgataatgtcttaagcactgaaattctgtgatttaaaacaaaacaaaacaaaaaaacaagattaaaaaaaaagtctcctactatatgtgctggcctgaaagtaaattggactctaaatacaagaagcatgatcctcagacactcactaactgcaaaagctctttggtttcaagcaacgcatttcgtgtggctttgcttgataaagttttggatatttgttattgctgttgtttttattcattttttgaagttttcctggtggtttttatgtcatagcaagggatgtttaacaaaatgcataagttacaatggttatggaatctgaacaaatttcattaatcctggtccctgagatgtttctaactccttctaagatgataaacagaagcgcagatagaggtttacatgttcccaagtatcagttataagtattgtgtgttagtagttgaagcctttgttaaggaattcgactcagtttgtcactgtttaggtataagagacccattaaagagtatgcctgtgttgggggtggagattgggctttacctttccatttgaacttaaatttttcaatcattcaggagacagcaaaaatgtgagagaattattcacttgtaaaattatttttaagtagctgccctgtcacatatttgatgtaaattagcttcattacatttagcaagtgttaaaagtacaagtatttaaattcaagaacaattttaaataataccaagcaaagtataagacattctggaaattttaatgaaaatgtgaaaagaaaatgaaattacaaccgtatcttatatgctgtcaataataggtttttgttttacttaaaagtattattaaacttatgatagttgaaatagctgtgacataaaatggaagaattagaaataatataagcgataagtgacaggaattctttgtcatgtttccaaatgtaagataccacagctggaaaagatagtatcatggtctacaaaggtctcagtagtttcacatttctgtgaaatgcaactacgtggctatgttcaggggaagatactaaataaccaatttcttaattcatttctatgtaatttgtcaattattagcataatttgtgtatttcccttaaaatattaatttttaatatcctgtgcatcaggcagtttcctcagctcttattctttatcaggaacccttcccatgtcttttggttatgatgatatcattgaatctactggagtccagcagtggcaaaacaccaggaaattcagcactgtttctacctaccaggcaatatatttggggactttattgcggaaagatttttttagtcaccgtggcagaatgccttgatggtcaaggaaagatacaatctaaactggtatttttacactgatcagaaatgcaagtcttatttcctttttggttggcatgttgatctatgttgtttttatagtcacaaacctaacaaaagcatatacttgaactacaacgatgtcaacacaaacatttacctgaacacctgtaatgtgtaatcttgctggtccctaggaggttggtggaaaaggaaggagaatataagaaaatcagaagaagcccaggcctttaaaaaacttaaaagatgatctcttcgatattttaactttatatttttaatgttcattttttgacaaattgataaaattatgagaatattgtgtagcattctgctcaaagggaaaacatgaaaacttaagaaaatagaagaattaaaatgattggaatttcctttaaatatctaatttatccagattagtcttctttggccatgaatcatagcatgacagagccaattatttgagctactcgatgagtagatatagatccatattcagctgatatctatgccataagttttcatagtcacattcagtcaaaatctacttacctggataaagttcataggtaaattgtttaggcttcctttcattttggcttcctggataccatcctaatactatagggcattatggtgaccaaaaatggtgtgtggaagtttggctatctcttaattctaaaattaatgagttttaatctttctgaaattgtttctctagaaattctttattccttttgcttctaaatgtgcaactccatttaattaagacataactaaaacaagctgccgttggaacttgataattgaacaattaattaagaaaggaacatctttgttttggaggactagtgtccagtgaggaaaagattccctgagtggagagcattccatatgaagtttgataactcattcactctcaaagacgtaagcaggtggttggtgctctgtggtgtgtattaagggtggagagtgtgtcaccctaagtatgtgtcttggagttttggcatcctgaggccttctgctccaaagccctctgccccactcttccttactccctccctccttgcaagtggaatctcagtgaatcagacactaaacctgcgttaactttaatagatacccgccccatgtctgcgagcttttcacgattattgtagaagcaggaacagaagcaacaaaatatttacaccaaattgcaatttataatgtagctggtagtcattcccttgtgtaggtgcactctctgtctgaaaaatcagaaacaccatgttttctcactttgaaggatattgctagctttttctgtgattcatttctctatcgtacaggggtttatttttaaataattgcttttgttcgggatgcaattatgtgacagcttcagccacctctcattcccctctgaggtaattgtacattcttacctcattttcaagctttctatcccattcacctcatcaatttccaaagatgacgttgaaacatatttcagatgaaatagaggtcactaaatgaacaaatactttcttctagccacaacatctaaaaatctctctgtacccactattcttttcttgttgctcttggatcttagtagaggacgcatctctctctctctccttctaaccaagactgagacctcaacctgtgctcttacctgctttccaccatcttttcttctgtatcttcagtcttaggtctccctgtgtgtgtgtgtgtgtgtgtgtgtgtgtgtgtgtgtgtgtgttttccttgacataatttatggaatgtgcacatactgtcttatggaatctgaacaaagttcattaatgctgatccttgagatgtttctaactccttctaagatgataaatagaagcatagatagaggtttgcatgttcccaggtatcagttatatggattgtgtgttagttgttaaagccttagttgagaaattcaactctagtttgtcactgtgtaggtataagagacccattaaaaagtatgcctgtgttgaggcagatatttggctttacctttccatttaaacttaaactttttaattattcagaagagagcaaaaatgtgagagaattattcacttgtaagtttattttgaagtagctgcgctgtcacatatttgttataaattagctttattacttttagcccatattaaaaatacaagtatttgaattcaacaacaattgttgcatgtctcttccatcttgaaaatacaaatgcttaaaaccatgttgcccttgaggtttctcttctgtcttcatcgctttcccaccgggcgctatacaggtcagggtaccgtgttacacattgtcttcacctgttccgactcctcagtgcccttcacacttcttaggcccttctcgctctgaaaggtcaacactgaactctgtgtggccacatccactgaacactttcctttttgaagcctctcctctcagtatctgactcactgtacaacatatcccagctttttcttatacctttctggctgtttctccccaagttcttcttcttctctggacctcttagatcaataagccaatgcattttaatacactgaaaatcatggcttgaaattttggcgctatctctgatggaagtgtgctgagcctgccaaaggtgtggttaagagccatcatcataagtgccgacattccctggggctggtctcctttctgtaaacattgtttcctagggtgatcgatcccaaataaatggcttcagctactaactataaactgatgtctctaaaattatatcttcaatggagatttctttcatttcaaaacgtctatattcaactgccacttaggcatctataattcaatatcctgcatcttaaatcaagatcaaacataacacctctcctcccaagcctgtttgttttcctactgtaatctctaatgtggaggattgtaccaaattacctggcgaccccagccagcatccacggagggatcctcattgctccctcgttatcaacttctgtagccaatggactgccaaccacctctctactcctgaacttaatttctctcttatttgctacccctctatccttcaacacttcccctcgcataggtcagccctcctcatttcttactggatcacttgaatacccatccgtcttgctgtcaactctcttgcaaggcttgcagcactgctgtcccaactcctggccatgtcgcaggagcccccttgcatgcactatgcccttgaaccttcatgagccttgctgtttcaatccatcgtgaattcacacagcctacttgtgcctgactcagatgcccctccctgcttcatccgactgactcttgcaaactcttctcacatcactccttttaggaagcccttcctgcattgctagacccaacttcagctctatatgcttcctctgggcccgtggccaccctcttccttatcttaactttaggatgataggtaatgttgtaattcttagtgaagtggttacaaacctaggctccacaatcaacctgcctggagcgtggccagactcgaacattcgtcatgatggtagcaagttacctcatttgcctgtgcctcagtttcctaatcattaaaatgggtataatattaccaagcatacaaggttgttgtaaagattaaattaacaaaacctgtaaaacactcagaatgcctgatacacaagaagagtaagtctcaataaaagtttagttttctttttactttcccttttctcttcctctttttttacttttttccgccttattctgctccatctcttcttgttttcctttttctcttctttcttctcttcgttttcctcttttgtcacctctttttttcctcttcttcttcctctttcttgttttcttctttatcccccgtctcctttacagctatctcccccactagataaactctgtggacactgagactatattatatttaactctctgccttatatcttgtcataatgttatttcttattagacactggggaaaatattattttttttctgcttttaaacaattattattttcaccgttcagagttaatgagcatatttccttaaattaacaataaaatacaaggatcttcaggaaacctattgaatgctaaatatgcaagaattttagcatcttctaaattcatgataagcataataataatttcagatatttatagaacatgatgtgacaggcatggttatacacaaattcactccattattgtccccaatgataatgtctaatattcacaagttactttattaattcacatagattacttatttctacatatggtaattttatctgttagtaattactacaattataccttttcacatcagaaatggaatgacagatatggttttatatcttagaaggtaggagagaactgccatttgatcagagaaacgggtatgaaaaatctttagtgtgtcacatatgcaaattaataggtaaaatggagtcttcgttttttaacctcgtgacccagttgtaatcagggatggagtttttaaccatgaaataagcgcctccatttttttttttataatagtaggagcctgatccttggagcaatatcctatctctgccatttacgaagagcactttggaaggagagaatatgtttagaaataataatgtgctatgtttgttattattgtagttttatttatttattttatttatttatgtttttgagacagagtctcactctgtctcccagctggagtgcagtggtgtgatcgcagctcactgtagtctctgcctcctgggttcaagcgatttctcgtgcctcagccccccaagtagctgggattacaggcgtgcaccatcatgggtggctaatttttgtatttttagtagagatggggtttcaccatgttggccaggctggtatcaaactcctgacctcaaatgatcctccctcctcgacctcccaaagtgctgggattatgggggtgagccccctcggccggccagttattattttaattttaaatgagagcattgtttaagcacatctttaagattgttttatttttgtttttacaaataaagagggattctaggaaatttgtttttaacttacttaaaagttaaaaattggtagcatatcaaccccccggccccccttctggatttgcagtaggattaagatgcagcaagacggtctgcagaaaaggcgcttgcaacttggtatgtaactcagtatttcacaaaaccttcccctcctccaccccaatgtctattaatatctgcaggcacattagtgttctgtggaacacagtttgcataatattgatgtgtttaccagtctgggttccatcctatgaaatgtggtgcattatttttaacaggttttgttgcattttagtcataatgagcttttggtcataatgagtttgaccctcaagcttgtaagttgagaataactgacagtgaacaaggaaattaatttgcaaattagactcttggggagaactttcgttcacttctttcttaacagtagctggggcctccgagtttaaatggccttcatactacagttcagtttaatattacacagggcagacaaagtcatagattgtaactgaaagaattttggggacgttttgaatgcaaagaatttgtgggatctatttaatggtgctgcaagacataatttgagtgacagagggaaggcaggcaatctgtaattaaagaagaacaagggttcttttggttagtcattgtcacaaatatttaatattatgggatttgacttctatctgttattggaatttttttttttactgcaacttgttaagatcgtaagaacatttaatacgttattaatctgttttgaaaaagcaaccatgtggtttcactcatttgtaatttaatttgacctagtaatggagaaggaagctaatgaaagatcagtggtgttccttttgtacaagtgtagcaaacttcctacttgtcaagcctttaactgtgacttatttgttcattaaataatccagcagcacatgtatgaaactattgtaagtccttttctgaatggtggaaactttatttggcacaactatgccatttaatgctttttactgttcacaagaccagcattcagcaatatccaagaaggaagagggtggttctgttttccctgtggtttggtatactttcctccctcatttaaatgctcctcgttttttcctgtgtaccttccataactgaggttgatcattttaccaatttggacatcttttgtctatttggaggaattcagcattcagaattgggtttgttgttttgctctcaatcaaaccgtcatggtaaatcatggacgcatgttattcgcttattggttttgtcaatatgtgagacttaatctgattatttgatgattttttttttcttcagaacatgaactttggttctcatgtgagcattcagaagggagaaaccaagagtgaaagaatcttagtttggaacagaattttgttcctaccataatccacatagatggtacactattttctctttttttcttctgtcatctatgaagtaaagatgtttctgctctgtgacagagctgtgcagtgggaagcctctgagttccagaagagttcttctaaggagctaaatgattcagaacaaggcacttaacttttctgggtctcagcttcctcatttgtaaaaggaaggggtcagattagattatctttaatctcacataagccaataatcttaaattcgaatatgcaagtaataacatagacgatatgaaacttgtactaagttacttcctcttaaaaaacattaataacaaaacttgttatctgctttgtattaattttacatggcaaaggaggataataatgtcttctaaatcactgaaaaccactgaagtaacgtgcaattgtaatccaaattagtcacatttattctaaccattctcttactcctttgcccattttaagttactgtgattatatttggtagttctttgagggggagaaatggtttttttgttgttgttgttgtttaattatgaaaatgttatttcagtaaatgtaatttaattaaaatgagaatttctgccaactgttttaaataaatacagtattcttttactagtatgaaaggagttactatttgctgtctcatttcctcactaatatgctggcgtgtttagcttgaacctgagcttgtggaagtttattcttaaccaaagcagttcctttttcatgtaagtaggttaaatgtgaattgggaagcctcagggcgcttttttgttcacttttaaaaagccccctcaagtgggccccttttagaaacctggaatcatatgtttggaagattgatccaaattaacattagaatggttctttcatttttaaaaattatacagactatttaaaatatgctaaattgacatacattgaaataaaactgaataaggaagtaaaatttcttgttttattctacttttgtgataaaagaattggaaatcagagagaaaatgtagaatatgttaaggtacaattttgcccccaaaatatagaaggaaatgtatttgtacaaaaggtataaattaatgtcaatttatttacttgtgatttcatgttccctagaatagtgcaagcagagcacgagtttatatatgttttgacttccgagaagcttgtttatttttgaaaaaaactacattaatagatttctagaattatatgctaacgcattttattcatagaaatgctggcacttgatgaagtatggttaatgtgctttctcatttgcaagttatatagcagttttatccagagttaagacaatgcaaacattttaatttgttgaaaagtagtgagacattcaatatgggtaaaattgcttaaagtgattttttaaaaatatgctggaaaactagaggacgacagattatactttggctataattcaggactatacgatcacccaggtccctaaaggtctccaaagaatgacagagaagccatgattttcagacatgtgcattatatatgttaatagctttgcagggaaaaaggtctatatccttgtaatagaggaaacattcatttttagcatttcagaccatagggaacatggtaattacaataggcactaatatctggctcctttctactcttgctgtcacctccccccaccccaagcacttcaataatcccagtggaatgagtcaaaggactttaaacctatgtcatttccaagtcttttattctctctttagtacatttagcacaacattggtcctcgaggaaggtatagcatagttcgtgtacatatacacacacgaacacacacacacacgaacacacacacacacatacatgatttatatatcacagcaaaaagaattagaaatgcttttctttacttagatatgtctatagacgttttggttcatgtgatttacagtggtgatttttagaaacacaaagctggaatatgcttttatagttgagattaagtttaaagctatgttctcagtaaaagtctatcccgggccgggcgcagtggcttagggtgtaatcccagcactttaagaggccgaggcgggtggatcacgaggtctggagatcaagaccatcctggctaacatggtgaaaccccgttttactaaaaatataaaaaattagcccggcgtggtggcatgcacctgtagttccagctactcgggaggctgagtttggagaatcacttgaacccgggaggcggaggttgcagtgagctaagatcatgtcactgcattccagcttgggcaacagagactccatctcaaaaaaaaaaaaaaaaaaagtctatatccttagtcaagtaatcccatcgttagaactctctggccatcgttcagtcttttggaataaaaaaaaaattttgcaaattttatcattaggtgagaaacataaaaataagcagtcattagctcttaacctataatgtttgaaacatttacctgtctggattcagttaacatgcaaatctcctttgaattagcccatatgcacagtattggtagttgcaatgtttgattgagattcttacaaatcctcagtgcttagtttttaggtagttccattgagaaatgcataggatttcagtagctagagccctgtaactaatacctactcaaaatgtgcatttgatggccaaaaaaatgccttttctgaagaatttttgcaagcttatttttactgaaaacataggcaataaaaaaattatggaataaatgtataaacttttttcttcactatgaaagattcttacagttttacctccttgttaaaggtattaaattaaatcatttacagaagttaatccatattatcaggaaaaatgctagcttaaagcttgatgatagacctgattgttttccttttattttgtaattttaactttctttctctctttctctctgtcacacacagacacacacacacaccctctctcttttccaaataattgtcattgattgtataatttttgagaaaaccaaaaggcatacaggtggctttgacttcactagtaaggagtaaaggattgaggaattttagttgtttcaacctctgtcactgggaacaactatagaacgacacccgttgttaagtgggaaagtgaccctaagctgtctgcttagaacagttcatcattgtcatccgaaagagccattctattgaagcacacttatataaaccctataagtagaaactacctcctccctactctcatgcaaccttcaaactcaattcacatttaattatctagttaaattttccatatttataaaattaatatgcttttatgagtaatcttctctcagccaccaccatcctgcaccagcccttactggtatttgctctaaagcggattcatttggacatgttcttccgctgtgtacctggcaggattgtcttcattcttccagcttcttttaaggagttgcctccccagaaggccttcctcagcctctgcggagttaggacctcctccttttccactcctaccacctctccttaccccttctccaccctcaacttcccttagaggacgtctcacactgcttcgcaacctttccacctgacttttaggtttgggttttggtaaaaaactttggttctgttaaagaagaatctcctgggtgtgggggcagaattttctggggttagagacacactggagatcccaaaatgctatacaggaagcctcttcttggaatgtttaggacaagtaaatattcctcagaacaagcttttgagcttgtaaaatctcaatgaaaatacataaaaagataaaatctgaatctgaagaagagaagcgccaagaaagaagatggaggggcgtcactccccttgttctgctgttgccttcctccctctcctggcaggggctgggcatgggcgcacgtggattttgcttttctctagctctgccttcctcttccatggtgatctccaagaggctgtcattccagaccttctgagtttcttgctactagatatatataggaaagtgttaaatgatggaacgaccgacataaaggagtgggctttattcaaggggttgccatcctcttatcatcacctggccaccaactatgaaactggttaaggatctttacagccagatgggggttttgctagtagtgactatggggtgggggaaaagaggggatttttaccagataaacattttaaaacatttatttaaaaattgtggtagaggaaattaccgaagaggccatcacagagaaaaaaatactaggtaattactaaacctttactgaacgttatcttttagagatacaagctgttttgttcctccatttacaggagtgaactggtttgtggcattgctttccatacaatcttttcatcaaatgccttttatctcaacaatcagtaccaattgctttggtttctttggttttcgatgatccacattgattatttagaagctgaagcattgccattcataatactttgatccagtcatttaataacatgattttatgcacaagtatacacacgcacacactcaaacacagatttggtttacaattttgtaaacatgttctgttttcattttctgttttacattatttacaatctatcatttttaccgtacaatctcttggtaatctcctgtaatctttgctgacttattcatatctcagtaactctaaaagatgcagctttatggaagattttgagtagggagtgatacaagggaagaacattcagcaggaaaagatcgattgtatttttcaaataggttttcccccaatagtagcgttgttcttcaactagccttggttggttatgagtggcttaatgttccactctaaatataagatataaagggcaccaaacaacaagatacagtggcaagtatagtcagtctctgtcagccctggtttcctcatttgtaacatgggataatggtattatttaatttttgatgttactaagagaattgaatggcataacaggcaaaaatggcttcaaaaaggtgacaggtataaaacaaacattggctattagtactatttttatgttattattacatataaaatgtttgtttgtttgtttgtttgttttttgagatgaagtctcgctctgtcacccaggctggagtgcagtggtgtgatcttggctcaccgcaagctccgcctcctgggttcaagcaattctcctgcctcagcctcctgagtagctgggactacaggcacgtgccagcacgcccggctaatgttttgtatttttagtagagacggggtttcaccgtgttggccaggctggtctcaatctcctgacctcgtgatctgcccgccttggcctcccaaagtgccaggattacgggcgtgagccactgcgcccagccataaaatattaatagccagcacactattgggattgggagccagaagggtataaggaagaaaggaagagttgcgataagtaagtctgttgaggtagatttgagtaatccacatgaaaagacataaagacacggggctatcaaatgttgtcttgatggaattaaacactctgttatcaattattacaaaaatagtgggaatgccagctgagacaaggtaaaatgataaggtaatagcatcctaataaaacgggaaatcgttacacaattttagaattttgtcaaagaataaatgctttatttgtatttgtctctgattatgaaaaaaaagaactatggttgatcaaggtaaaagataaaaagataagcatacattaagcctgtgtctacttactataaaaatctagatgattttctttctaaaagatttttttttttttttacaacataacataaaaggtggaaacaagactttggtcacttcccaacactaatgtgaacattttctagatgttcactactcctttctggccacgataacaagagttcttttgaaacaatgccacaaagcagcactaaatatgtgctctcccacactctgtacataagggaaatcaagtagggaataattttactaactgtttgccaaggtcaacttttctgtttttcaaagagtaatgtgttttccttgacaaataatgtaatccattctgcattgaaatatgggcctcctgatatgggattctttcttgaataataatataaattcatgttatctaatttgacagtagaccactgtatggacatttaagaaacaaaatgagtgttgatgttgttcagaggagatatatttattaatgactctttattcttccttttccattctgtatctttagtaacttggtgatatttctcagttaaaaaaaaatttaaagagtaaaatatttcttctttttaccttccaattaaattattttcttccggtacttggaatggggattctgtaggagctcatctgatctttagaagaacatccaaggtagccccaccttctccaggctcttagaaaggaattaaattttattttaattttggtgatgtgaaggaaggggaatgagaaaggatcatgttttttgaaattctttttatattctagaagacaattacttagagcaaattggctcttacttcactagttaggcaccctcattatctacttaaaatacctctatcttctctcatttacaaacaaatagaaaagctgccggtatacctcaattcaaatcctctctggccagattactcttactgctcttgaagaagactttactgtttgcctcctacattctagaaaggccaaccagcagtctcacttggctgagaagttggccatcagggtgtgcttgatgtgcaagattaaagaccagagttggctgtcttcctggatgccctgggctgtgttaactttcttcattgagagaaactctgaccttttaatagatattttgttgttgttaattgtaaacagagaaaggctccttggtctaggaggctcttgctggatagtggctggtaggaaaatagttgcaggtggggaaaggcaccatggagcctcctgagctccttctggaacctggggaatcagaccctctgacttggagcgcacaactcatcatagtcagcatgctggctgctaacgtatttaaggatgaacagtcacagggctcgcacttaggagtccctatagcttgtacatctttagctggggcagacccacatgatcctgagaatgtggcttgccttcttccggaacttagtgtctccaaagagaaaaagacagaaatgaaattatcaaaggtgtctccttccagtgggcaagcatgtggattcagctcaccatttccaccagttacagctgctcccctcatggccccacttgctccttctggaccacttgaaggaaccagctcatgctatttttcattcccacctttatgtcatcttagaaacatagtcctgaaatatatacgtagttctttcctcccaaagcagtgctgtctcccaagctcagctcacccagaaagccaccactgatcaatccagggaagtgagctgctccaccttccaaatgctagtgctgccttgagcagctcctgaaaattctgctcctttgtagcaagcttacatggggagaactcatctgaaatgagatgatattcttagttgcttaatcatttttttctttaagctttcaaataataagtaaaccattgtctaaacaaaaatccttttgaaataggatagggatattggttttatattttaaaaatattattttttccgtctagagcctggattgacctgtagtccacattctagagcaccctttgggtcaagcataaaaaacctgggaggtggaggttgcagtgagccgagactgtgccactgcactccagcctgggtgacagagtgagactctgtatccaaaaaactccaaaaaacaaaaaacaacttccagaagttttgatgattgaagtttcctgaagatatttacaaaaacagctgattattaaaggaatacatattgcttgtagaaaatatggaaaatgaagcaataaaaatgtgtaattcgaccactcagcatgcattttttcccagcattcatatatataattataaatatatggtattcatatacacactgttttgtttgtgtacactgaaaggcggggggcggagagaatatactttttattcacccacagcagttacaagcatgaaatctggagtgacacaatgtcattttaggcaagttctttaatatctctaatccttaggtgtttggggtgaggattaaatcagatactaggaactaatacttattgtttccagtgtcttgaacattgttctacacattttatacacaataactctttttaattctcacaacaaacctatgaggtgtgtattatgacactttgcctctgcttgtatgcaaataatacttgtaaagggctcagtgtagtgtcagaggtgtaataaatactatttgtatgtgatttttttttctacaagatatggccagtttgtaacagaaaattttatagcatatttttcattttatgtttcaatattttccctgaatcatatttttatttaaatataaatttactagttaatgtcttcattaatatgtagtgctcaaggcagcactagcatttggaaggtggagcagctcatctccctggattgttcagtggtggctttctgggtgagctgagcttgggagacagcactgctttgggaggaaagaactacgttattaaagggtatcaaagggtatttttcatactctttttttctggggataaaaatttagattcttacattagtaaaggctagggccagctttttgtatattatctgttcaagtaagtgtgcagtttttctagacatgtcatgaccttatctttccaagcagctagttaaaacggagagatctgacttgctgccaagaaagggccattgcttttgtctttttctagttgctcttcatgtgggcttatgtgggactctagggaagcatgcacagttggttttttcaatcagatacttcctaaacaggtggcatgtgacttttcagataacagaacggagtagaaatttctgcattgatgtgcatttttttatataacgaatgacacagactactgaatattttttcttgggtttccataagctcagattcaatcctttaatcctttaagtcctagggacactgtaaagaaagcacctggcaattttagtttcaaacattttactaaggggtcatcttaccattttcactgtagtggtatcagtataattcttttttttcttttcttttccttctttcctttttttttttttttttttttcggagagggccttgctctatcacccaggctggagtgcagtggcacgatcatagctcactgcaaccccttcctcctgggctcaagtgatccaccagccttagcctccctagtagcggggactacagatgttcactactataccagtctagtttttaaatttttatttttggtaaagatgaggttttgctatgttgcccaggctggtcttgaactcctaggctcaagcaattctcccaccttggcctcccaaagtgctgggattataggcatgagtcaccacacctggcttcggtatgattcttggggtccttggtttagaaagacttccaagaagactttaaaattattcattttttactaccttttatgggatgtttagcaaaatgttttgatctctttggcaagagaaatgtttatgagcagtctcataatgttactttgcagttactttaaataaagttattttaggacttataaggggtaaaaatttttatgatttattgtcaatgttctatatcctgagatgttctccctgtagtcttgtttaagttgtaggatgggacaaataggacttggcaagtagatgtccctgataaagtgagcaagtactaggaatgcagacccagttgctgatttgggaaagattcagagctttagagagagttttgtattatacttagaaagacctttcccactttaaaattaaagtgttttctaccttgaagaaaatgtttttcttcaaaacatttgacccatctaatgatttagttttgactaaggtgtgaggcagggatcaaacacttttccccagtggctcccagtgacacctttattatgtgttaaatttcccatatgtagtgggatctgcttctagcctttttctttggtttagtccatttaagatcaaatatatggtcagccatggtggctgcactggaatcctcactagccactgcctcctggctgcagcctttcttgtttcctggaactctgtagtaggcaaaatgctaacaggccaaacagaagggacagcattcatgtgggcccttgttctttattcacaagctcaaacatgagaaaatgttgcctttgaggggagcaggtagagaaaagccctccttgggtctgcttcattgagtccctgtgtgctaatgttgatccatgggtagggttcctattgctttacaacagtgcttgtcccctggggcctgtttgcagctgatcggagcacagctccccctttgatatcacagcaagcttagttttgaatcaactctaggagtatacaaagtaataaagcaagctggttgtcacatcagttcagtggcacatagagtagtcccagaaaagtccttggaaaactgtaagctactacaatgaagctagttagatttttttctttttctctttctttctttgactctttttttttcctttccctccctccctccctccgtcccttccttcctccctccctcctctctttttcctttctttctttttctttctttctttctctttctttcttttttcctttctctttttctttctttttttttgctttctctttctctctctttttttctttctttcttcctttctctttctctctttcttccttctctctctgtctttttctctttctttttcttcctttatcactatgagcttgtggtggctgttggtacttggtggagaacatttctgtaatttatgagagtatacatttagaggaatgtatttggtttgtggcgaggaaacttcctttttcaaagttgtaacgagtcggcctttaatataattctcagaactattttttttaattgttgttcctggaaatgttactaaacatatttctaaaacaatatatttgtctcagtcaaacttttaaaaccaaactccaaacctttcttgcctgtaaattactaaatcctgacaatttaaaactacatgatacaaatcatagaagccatttccagcgaactcacaactctaaggatagattggcaagataaaaggcaacagttcctgatctcggacatttgggaatactggatgaagcttggaaatttgtcaggtagttgaaaatgttttcttgccttctttctgccaaaggaaggagagagtacgcaaagatcagaatgatccctatatgctaatgacctctgtgctcatgcctattcatgaactgtttataatagagttaattacagtgtaaattatttattgatattataacgtaagcatttaataattaaaataaattggcattatgcatatgtagctttaaaatgctgtggggttttattagatctttttggccattcattctcacacatttagccatgcacactgaataggagattacttgcaagttagtttaagtggttaaactaaccactctttcaccactctctgatatttttttccaatatagttaaaattaattctagactccagatgcaaagttaaaaaagtttaataagaggatgcaagattttctttttgaaaatgtatgatatatatttttttgacttgagaaaaatatgtttgctttacataaagtaggcaaaattattgcttggtcttgaattactagaattataagaaaagtgacattaaaacattagacaattctcctttttttcccttttaaatggaaatagattcgacatttgagtatctcaaggccaatgatagggcctaaatccttaaatagcatacatgtgttcacaataccacttacacattgatccaaattccctagattccataaaggaagcagtgactcttgagcaataactcttactataaagctgtttgaaatacatgacacttaaagaaaaatggtataaaaatgtcagtacagaacagaacatgttataaagactacgtttctggataaaagacaactgaattattggtcttatgaagggaatgaaacaacagtcaagattatgttttatgttttttctagttgaggcagaccaatatattttcgagacaaacctgctgagatcctagaggcagtgtggtgtgagcgcaaggttgccgtagaacacgggcagacacaaccatgtgttccgttgtttttttcagtagggatagcaggactttgttgttttatgggagataatattttctcattgtaacatattaaaagatagaaagggtcagaagatttctgcaatttggggagtcaaaatagtgagtaaaatggtgttattttgataccgaatggcttagtcagtgagagtacatatttgtgcttaagcaaaacatttttttaaaaaaagttttatcactgacctaaacaatgtttggtttgattgtatatatgatttcttttcatccaagaaatgtcaagggcatcctcagaaaataataattatcattagttttattgccatatggaattcaaataaatattgatttatctaagtcttgaaccatttagaaccacattttccattattcaagctttttcattattttacaattcatttttcgttatttggttctatatatgtgatacgaaagtagggcacattaaaattttttattttacagcttctacgtgtcaggtttttttctaagaactttgcaagtattaacagctttaatcctcatagcactttgagaggtatattattaatatgctaaggaatgtcttgccaatcctactaatattatcagaagaaatgaacagagatgttaagcaatttgcccagtgtcacccagctggtgaatggcagaaatggagttcggtcccagtgaactcttatgttgcctcatgtaaaaacataacagcatatatggaaattcagttcaactaagaccattgctgggggagagcaccttgtagctttctggtaaatggagaaattgagatttttgttttaagaatagtcaactaaaatccacacttgaattaattctgaaagttaagaaagttataaaagtcagcagagaaggtaaatgcttatttatcctttaacataaataagcataaataatatgatttatttccacatgacacgtgacatttgatttcattaaagtgatctattccagagtctagaatctcactgcatgctttgcaaatgcactaagtattgattgaaaaatgactttagtaaattggaagtcaatatgtgaaaaaacacttttggcatgattgtaagtttaattgtaggaaaacatttaaacatataaaataatgttataatgatactttaatgtgttcccattacatatttaaaatatagcatccttgtttctgtataaaagtaggtaagagaaaagtgttatggatgattcctcatatattcggatctcatccaaaacagaattttctttgtaagctttgtcttatgtaggatcatatcctttagctttatttctcatcatatataaattcttaacagggatatgattccaaaagaaaagacaaagtagagagtcaaaacttcgggcaaacacatatcctgataaggaaaattgatttaggatcattcagatgtgctcattatattgactcactaaatagagctgataaacttctccatttaattttttaatagagacaaacctgaaatcagggcagtattgggagtctaaataccaattcaactttttccatcatctgcatcattttattacttcagtgagaagtgtaaacactcagtccccatccaacaggtatttttaaagcatctgctggatgcccagattgtttacgaaagttttaaaattttagagtagattttctttatttgtttgctaagacttaggttgcatagagacatggatatttacaaggacatttgtcttagtctttgtgtgaccagtttctagtgtggtgtctttcatataatagactcccataaatgttagatgatgaataattgatcttcaatgcaaagaatgatgtaatgactttatcagaattactgtaaagatttctggcgcaattttaaactaaaatgaaaattttgtttgtttttaaagttatctgttctacttgtatcctggagataccgcaacgtccatgactatttgagatatctgacataatctcgaaggttttagggattgttctagacttattcattgtccttgatattttcttaaacccatatactgcttttacctacacagtaagtaaagaaaaccacatccttatcagatagtgggaaatctgtttcttctctaagggaccaaatctgcctcattttcttcagtttaatatcctagtaagtatgaagggttattttctagactataattgccatctatatgttgatgtcctatgttcggggtatgccatcagcagcccttcattttgtgttctggaagtcatctaaaatcaacctagttcagctcagctgatatttttatgccatagagcatgtgagaatatgtacatttgtctcagtcttcatatgaccagtttctagcatggcacctctcataaaatagactctcataaatgttagatgatgaataattgatcttcaaagcaaagaatgatttaatgactttatcaggattactgcagagatttctatattggtgaaatactgcagaatgcaatgagagctttttcacttttgttcttacagatatttcacataaaaaacaaaaacaattcagttctgtcaaaatgagattacaaaggatgaaaaaatacttagcacacacaccaaatgttaggtgatgcaaatgtgagatccagaaggtcatcttgagcttctcttgaccctgagaacatatttaggtgtttgtattagtacaaggaattaggatgaagtgaaagtatggacttttcctccttatgttgatgctttaaaatttaccgtagagttcaataaaactagtattaacattatattagaaaaaaatttcaataaaatattacataattttgattctacttaattcattaatctgatggctctttaagtactagatcaaagaaataaaacgtgttgagtattgagttaatggcatatgtggagtttcattctggcttatcgtttctaatatttgagtagtcatgtgtggttcatgcagcactttcacaaatgctattctaacaacaatcctggaagggagaataaaactttgcttggagtttcagctccaagtctagctgctttgtcaacttggagctgttgcttcattgtatctgctttccttgtgcactggtgttaattctgactggataataaactttgacaatagaacaaaagttgcaataaattgtcacaatgcgtgaaattccaagctctcctatatttagcacaaggcttaggagtgcagtgatagaaaatgcacaagggaataggttactgcaaagcaacctcacttgaaaagaatctggggatcgataccaggcttataaaattgttcatgtcaggcaacccctggatatgttttattgcttttattagtgtgactatataatacaagaacatatacttctgtgcttttaattttcaaagcctgcttagtatagaaacccccgccactccactcttctctcttctttgactacattccaaaagagaggcgaactttctaaatactcatatttcaaacagattcactttcttttgggaaactataaagcactctgtgatccatagaagtggtttaactcaggagttcataaaggtatcagtagccagcagaaatgctcttctacctgagtgtttgaaaaccattgtttaaaatcctattgaaatctttttacaagggatttaaaataatttatagattagaaaaaatggagagctgggcaggttcaccatactgctgttttcagctggctgaataattgcttagctattggtctactttggttgtcttattcaatgaagaatgttcgaaaaaaaatccagtttctaatatttaatactttgatgtattgtagatatgatcattaacacattggttttaatctatattaaaaaatacaacaagatattgaagttctagatcttttcagcccagtatgttgattaaaaaatgtattttatctagtttgttaaaaagaacagaagataaaactttagggtctttgtgatccaacgaagaggagagtttattgatcagccacttaattatcattgatttttggggtgaccacatagttgccaagtgaagtctgagtagcatttgttagcaattgaatgattaattaactgattttttggtccctaagttgaaagagcaaactgacttatattatggatttaaatatagttcagatgttttaagcgtgcatgttttcttatatcaccagctgtttgtttttttcattttcattaccgggccaaataataatggatagataaaatgatttgcttatactgtcattgaaaatgagtcagtggaatagattgcaaactagctgaaaagagctcatgactaattttaaatgtctttgagtaaatttgaacattttttcgaaaatacatttttattttcaataaccatatttcatatattaatatctcttatgcttatacatacttatataaacataaatagtgttttacatgatataaatacaaattgcttttaatggatgatgtaacttaaaatataatatttctggcatgcttgatgtgatggataccccatttacccgatgtgaatattatgcattgcatgccagtatcaaaatatctcatgtaactcataaatatacaaatctcctgtgcacccacaaaaataagaaattaattaaaaatgtatctgggaagaattaaaattagccataggtttctcccaccctttattttttggctcaattcattcccgataatataaaaaatgagaacatttccaagaaaacttcctctgttgccttctttttgggggaaggtctattaacttgaagccagaagaccagaaattttgctctgttatttatatgttttatgctttttgggtgagttttctaactgtctgatgtttcaatgtcttcacagataaaaaagggggaattatctattatgttctaatgtggagctttcatggaactgttcatggatgtgcagactcagggaggtacctgaagattcagacagagagtgattgctgaacacaatctaatagtttggttaacccagcagcttcctggttattgctacagataatggtcaagaacagaatttgtcagttacctttagaactgaaagctgccaggatataaagatattttctttgctgattttgagaatttcttattctgaggcgctgagtagctctgcatggggcctttgggatcatggccattttgatcttgagaacaagacagaatattactttttactttcaggaaaaccgtatttgtttttttgtaaagtgattattccacttcagatatgtcctgaaggtacattactataataataatcaaggactgctaacaatcatacactattgaatatgtttctattctgagtatcattccaaattgaggctggatgtttttacatccatgtgaaatgcaagaacttatattgcaataattttttcctgttagacataaatattctttattcataatgcaaagacagaaattttaattttctgataatgttgtttgtaattgaattctgtgatgttttgaaattagcttatatggtgtttttaagccccttctgtctttgaaattctccaagccagcatactgtcatattcctgtagtcccagctactagggaggctgagggtgaaggatggcttgaggccagtaatttgaggctctagtgtgctatgatggcgcctgtgaatagctactgaactccagccgggacaacatagtggaaccccgtctctaggaaaaaaaaaaaatctctgatgagtctctaagggctctatttgcagaacaattcagccgggcgcggtggctcacgcctgtcccagcactttgggaggccgaggcgggcggatcacgaggtcaggagatcgagaccatcctggctaacaaggtgaaaccccgtctctactaaaaaataaaaaaataaaaaaaaaattagctgggcgtggtggcgggcgcctgtagtcccagctacttgggaggctgaggcaggagaatggcatgaacccaggaggtggagcttgcagtgagccgagatcgtgccactgcactccagcctgggcgacagagcgagactccgtctcaaaaaaaaaaaaaaaaaaaaaaaaaaaaaaacaattcttggtggaattgttcaataaaaactaacctgttgcatgtaattagtttgcacagtgagtgcaggtaggtactgctgctagctgtgagcagaaacacaggaaagctggagcgcttgcttcttccctttctccatggacacattctccactagcctggcctatgccatagtgcagagcattattaccagtgaatagacatggaatatatgctttgcatatgcagtttttaaaacatgtcactgcgtggtggatgatgattcagtttacttagactgcatgtccagagtgtcctttttcttttccttttttcttttctttttttttttttttttttttttttgagacatagtctcactctgtctcccaggctggagtgcagtggcacaatcttggcttactgcaacctctgcctcccaggttcaagcgaattctcatgcctcagcctcccaagtagctgagactacaggtgcgtgccaccacgcccagctaatttttgtatttttagtagaggtggagtttcaccatgttggccaggctggtcttgaactctggacttcaaatgatccacccactttggcctctcaaagtgctgggattataggcatgagccaccacccccggcctagagtgttattttctaacaggaaaatggtgtttgttctttcagtgccacaattgttccctatttgtaaattatgaaccctttgcaatcctgattttcattaacacctaggttattatttagttctctgaaattggagcttgccaataagatcctcaggactgaaagtgttaatgcagcttgggcactgggagaatttggttgtgttgaaataaataatgaataacagggatttttaaatccccattaaatatttaatttatagaaagcttctgcagtgccattattaattcttagttgagtgttttaaacttttttattgtatgtatattgaatataaaatggcctggcacatggtaggctctccataaatatggaatttatgttattatagttttggtggttattgtccaatgaatgattgaatgaaaacatgcaacatggagggtaaaaatcatcagctagcagcaggtctctgtaactgttatagtttcctaaaagtcattacacacagagcccttaaacccaggggacggcagtcacctctgagcgcaaacacaggcactatttgtgattgcaggagaagggcaatatcaccaacttagcccagaacacattgagtgactttgttggtgccacagctggagccttgtttcacttctaacattctggtaaagtcactctgaagtcaagggcaaaagaagctcttcaaatattttggcctcattccatgataatcacaggtactctgccagcagttttgtttttgagtcctataaaagtcagcttctactaaattattacttaatcctttcctaagttagaagagaccactagttttttcaggcaggagaggagtagaatgaagcacaggaccccagaattttgcttatctggtttggatgttttgagcatgcattgggtttgcctcccaatgggttgggactcattttaacttgagagatgtttgaggggccgaaaatgctccagaatttgtcgtgaccttgctgtattctacagaccaaactactatgcatctagactgtaccattattcaaataacaaccacgggaaggaaatagaatcctggctattaaacatcaaacatgatttctttgcgtctcagcagcagaattatttttgcaccagttacaagacttgcctatgaattatttaaaaaataaaatcttgagctctgaggcatttttgaaaaatcttttattaccaccatcacataaacatagaaaagaacagatgtgtgctatcaaaggtgaaactctctttcatatttgaaaagaaatacagtgcagttgcttctaaatatagctcgtttaaataataagaaaaatgtgatgtgtctgcaggtaatgaaggacgtaaaaattaagaaaggagaatcatgggaaagtagaaaagaacaggtaaatagttgaaaaaaagaatgaaattgtctaggaagaaaaagtctaattttcacccaagaaaggctggaaaataataacaattacattattttattacattagaacaattctgtacaaggtgagtgtgcactatttttgcttagagaaatgatatgtgtaggttaaatggaatgatagcctcagtgccctaaggcattccacgactaatacttcaattcaaaatgaatttttgaaagcagtaaaacatgtgtgtagccgattattcatatgattaatctgttggtttttccttttatgctttcttgtgtttgataaggagttgtttataatatttttcccttgaaggggacatttaagtgagtgatgccattcatccttaaaatacattgttcaacttttgtccagtctttacgcaggtgtgaagaggaaatgggttacattttgaaagagccttggtggagaatcttaaaaccctctattttaacacaataaaaaaagagatttagatttttttaaaatcatgtatgttaggtgaaggaagcatctatttctggggaaataagctaatttactttaaatcataaaaatttcttttacagaaaactctctgaaatgctttgaatataaaatgttataaatattctgttgtctcctccaggattttggaggcatcatcgtagcctgtggaaatgtggatggggattcaactctctgtagtcagcaagggacaggtgggaaatcttgtttttgaagaagagtgcacttgtagtagcaagctaccacagtcaactttcacctctgccaaatgtgtgattggcttaagctacttatattttcaaatctgttaattattcacagttttggcagagctgttgcttcacacagtgttggtggctgtcgtccaccttttttttttttttttgatgagtgccatgaaagggaaaatggaattttttttccttctgaagcctttaaggataccaccatagcttttctgaacaagaaacaatttcacagttttattatggaatgggtgctaacctcccagcataattctgtggtttttaagtgttacaccagagctggctcagagaaatagctatatacagagaatttggtgggttccaaaagagaaaaaggaacagaaaaaaggaagagtacattttgtggttgcaagacttatggtttaggggacctcttggggttcagtgccattcaaaggcaggaagtatccattcataagtcttggtccctctctactgtatttggtatcataatttaaatgaattcagggctgaatgccagcatcaatcagttccacatgtttgatcaaatctctattcctgcctacgtagtcctttcaaaaggcacgctgtactggaagcatgatagcactactcggggctacccatccatctcgcatttctggctagtgaaggaagtcatgaagttgcctccatgctctataatgaatacaatttcaggaatttctagctccaaagaagtgatactccttttaacactacacagttgacccgagagtattgccattgtttgaaacactatggaacaccttttctataaccgtctatagagaaaggatctatgagacatgatatgcatgaacattagtttagctatatagtttattatatagagtcagtctgttactcaatagattacctattttattaagttctgattttttcctataatttattttgaaaatattcaaacatattaattatataataataaataaaaatacttaaaaataaataataaacattcaaacataatttaaaataaagctagattctaccataacattttgctgtactttaacacatatctagttgactttttgatagtttctccaatttcatttactggaaaaataaagtttacacacagacacacacagatgcacacacacacacacacacacacagaaaagaaagtaggtaatttcaaaacaagagttttgagataaatatggatccagttgaatactttaagatagagtagaaaggtgattaccggaggctgggggctggaagtagaggatggggagttttggttaaagggtacaaagtttcagctagacagaggaataagttttttgagatctattctacaacatggtgactatattaataataatgtactgtgtatttctcaattgttgagaatacatttaagatgttctcatcacgaaaaatgctatgtgaggtgactaatatgttgatcaacttgatcagtcattccacattgtatatgataacatcacattgtaccccataaatacatacaattataaattactaatttacaatataaaagaacactctcaagataactttagtgccttaaaaaggactagttaatacccatgttaaagttctggtatacaatatttacttaaaaattagctatattactttagagtcacacttcatttatggcttcagctatatgatgactttacaaataagattagatgtagacatctagaaacatggaactaaattacaagctatgttataagaactaggtgtatggacttgacaatcagcaaagatgaatttgtggagaacctgttgtgtgatactttagatcctcccatgcttttgcataataataaaaatgcaaatagttcctataaagaagtaaattattctcagttgttcctcccttgttaagattatggattaatatacaaaggtggtatctgacaaaaacggagcatatttatctttaaaatgctaaagttccctctggctgtaaaagtctttgattcagtaagctctgaaatggcgttctgacttcagtattaagtagtcatatttgaaggatattaatgtagatgtgaatgagaggaaatgctgtttggttgaagaacttctgattcttgacaggcaatactcagggctccttgacatgcagtgcaaacacccatgaatatcagattcccgtaatcttggatttttttggctcgtaaccctttactatgtagcgatcagaatgctttaatacttggacactatttgtattttattagaaacccctttggttgtagtacaagtgttcccaattaaagggagtacgctatatggagaaaagaaaactagggagaattttcttttcagttgcatttgatctggcaatattttaaggaattctatgggcacattaatgcaaggaaaacttacataacgtacataacataactcaggaattataaatcaacagattaagagaaaattttagaattttaaatgtagaagagatctcagagagactctttcactcctcctcattttacatacaacatgatggtggtagacagtgttgatttcatcgacttgcctaaattaactcttgtaataacgggcagatccaagacaagaattcaagacctttaacttcgatgcctattgttttcctaccatatgtcagatattctgacactagcgtttttaactgtgatttatagctaaaggcactggggcacaaagatgaagaacttgctggagtttatacagctagtgagtggtcaagctaggatttgattcaggttggctggtgctagcctccatgcttctaaacacaaagtagaattgctatgagtgaatgaatgaatgaatgaatgaatgtgctgtgaggacagaaaggagctgtagctcaccggagtttgcaaagacatagaggttgagattaaataatgagtacacattttgaaggggaaaaatggtaaacagcatcataggaacaggtcacggactcctgcctgatgagtttggggacactgatgcccctgagtgaggctcaggatgggggagtgaaagaaggtgccagagcaacacagtttggttcagatggtaacagtggggtgtgccacattaagaaatttgaaatcaacccatcaattaaatagagaaagggaggaaaacaatgtacatttaatacctattaaatgaaaatacttatgaaatggaaataaagcacccgatgccagctcctttaatgttttacacatgtacacacacacacacacacacacacacacacacacacacggagtcccttttatgaagtgcctcctgctgatggtcaaaggtctccctgccagtgagtgatgggagcacaggattgtgacaggtcccaactgatgctaaagcttattttgacctcacctggttcctgagggccaatggaggctttgaagcaagggtgtgtcctgctcacagttttttgttttgttttcagccaaggagccaggagccaggaagaaaggaccagtgaggggagtgggagggtcagagaggcggggccatcccaagcccagaggcagcaccagctcctaaggcagtgagtagcttggggctctaaaggcagttctgatttgattcttcctgaactacccttggactttctagtcaaagtgtgctttggtcgtgctgtgcagatgtggccctggtgactcagcagtgctgtataattgggtctattgcacttcagtagttggctagggcatgaggttgatccctctgtgagcaggttttggtcttgttgacagttatacactcaaatggtttgtttatttaactaatgattagtgcctttagcacagaatattagcactcaaattagtgtttgttgagcttgacaaaatgcccatgattggcagggtgggaggttactgctgtacctaatttgaggggctcaatagttgctgctgatggtctaagatagcaaattccatctctgaattttctgagatggaaggaaattgatgcttcttttttttttttttttttttttgagacggagtctcgctctgtcgcccaggctggagtgcagtggcgggatctcggctcactgcaagctccgcctcccgggttcccgccattctcctgcctcagcctcccaagtagctgggactacaggcgcccgccactacgcccggctaattttttgtatttttagtagagacggggtttcaccgttttacccgggatggtctcgatctcctgacctcgtgatccgcccgcctcggcctcccaaagtgctgggattacaggcgtgagccgccgcgcccggccgatgcttcttagaatacagtttttattaaattatttttcacatttgaaattctccgtgaatttctgttaagcaaggaacattggaattattatatttttaatgagtataacattttgtgagtaaatcaaactcaaatgttaattatgaagtgttaattcaataaataatgtgttgtttcttcaagctcgtacttaaaaaaaattatttaaattagctctcctctgtccaaaaccagaaagtaaatacataaagcttttctatttttgctggatatttttctgaaggtaaaaacaagcctctttcaataatttacagaaatgtttaggattctttaatgtttagcctgaaggggaaattagtgagatgccagagtgaagtagttagggtaatgataagagagtaatgagaaaaaaatggacaatggaaggacattatcctgtcggaaggataatgagagggaataagagatgaacagaggagggagcattcatgaaaatcagctgggaaatgcattgagcatagggaaataatgaagatgtaaacaaaaatcctagaatttttactccttcagctgtctgcttgttcactaccaagggaagtgtggagcactgctgaacagtgagcaatccaaagcaaccgtggtaaagaataggaaggaaaggaagtgtaacaatagttatttccacttcatacacagtttttagattcattagaagattggaaaatatttgataattgttgctttcagtcataaaggtatgtgaacaatacacttgcaattcatatcaaatccatttgatgaaggttggttgagtttgacattctttgcttaatcgggctggctcagacttttttagataagtccactaatgaatgattgatgtgaattgacataatgtaggattaccacagtgtggttcgtaagtgacttcagtgtatttgggaatattgttttaattctaaagcggggtagggaggtcagaggtcatttagcccaactgtcatttggtagatgaagaaaacaaaatcctggagaatctaagtgcctttgcctgaggccaaagctggtgtggagctgtctaagaattactggcattccccgagtccagtgagatttcatcacatcacactgctcccgcatcgcggggcaggctgcaggagagcaggacgctgtccctttttgctgccattttatcagtcaacttgctgacttcaaaacggagctaacccaagggaaaataagtacacattattttttaaaaagtcaaaagtgcccaagatggcagaagccagtgctgtgggggtagtgcaccagcccaagagccaagcgtcctgtctccagggttcctgttaattagcgagcctggggagatagcaaatctcatcgaatccaggtttctaccaacttgaaaattctaatataatttcatgggtgccaaggagaacctgaacttttaaggacatttgtggtttatgccttatcaaaatgaggaaaagtaagtagtataatctctctgaaacagctactgttgttattgaaaaatgatactattggctgaaaatctcagatggaatgtgagaaaaatgttgatgtgtcagctctacataagaaaggagatatcacaagcaaagaacaaatttctgattataataaaaccaaaccaaacctaactgtgttgctgctgctatttaattgtcatctgccttactagtcttgtataggcatttatttgattcatgaaagtttagaaaactcccacctcaactttgtgttcgggtagccataaattatgaaaggaacttagtttctttctttatagaaaaatgatatgttaactgttatgacagatcgaaatgtaatattttaaaggcttcagttaaaataaattgcctgagtttaccattttaactatggcatatgattaaagtagatacacataaaattcatgttggatacctaattcaggatttaattagtgtcactgtcaggaaattcttccacagggaagtctggcatttcaaaagtcatagagacactagatgttctctaaaactgtcttggagccctctgattttattattgtcctgtgtaatgttactatttcatgatactttttcaacattaacacaaaatagatgaacacacacatttgatgttttttcaggatcttaagaaaggaagggtggcttgtttggataatagctgaagaagaaaaagtacaaatttttttttttttttttttttgagatggagtctcgctctgttgcccaggctggagtgcaatggcatggtctcggctcactgcaacctccgcctcccaggtgcaagcaattctcctgcttcagccccccaagtagctaggattacaggtgcctgccaccacggccggctaatttttgtatttttaggagagatgaggtttcaccatgttggccaggctggtttcagactcctgaccgtgtgatctgcccactttggcttcccaaagggctgggattacagaaaattctgaattaacaaagagaatgaagaaatatgtagacccaaagaggagaaaaagcagttttattttgtttttattgttttaagtacagaattgcgagtactataacatagccctaacagttcacaggaggaacatgagagtaagtagactgacaatctgactctactttgaattttaccaggaccttaagaaagagagaagcagggaagtgggcagttgagacaaaattcaaaaatatatttaaaaagttagacattcaggaaacatccaaaaggaaatataccaacatttgataatgtgtgaaaaaacaagcaaggatgtaatcaaacagagagggccaagataaagaaggaaaagtgaaaaaaaaaaaaaggagcttggaaacattggagcttctgatagttgggttttaacctttcaatacaaacgccatctggattcacaaggtaggatatttctgacagatgagaaaatgactgaataatatcccaaaaaagcccatgtagtcaaactatgagcagctcttgacacgcattccaggtcatataaggaattgccagatattaatccagaaagaccattgttttgaaggcctcttcatgaaggggagaaatgcatgaaggctaaggaaggattagacacacacggggtctatgtttttgtaaaagacagaaagatgactttctatcttattatctgcaaaaataaagcaatctgtttgtcacagaccttattaagacaaataacatcatagtcacacacatacacacataccccaaatgtatgaagaatcagtgagatcagtgttaagaccagtaatgaataaaacaatttcatctataaacactgatactatagaaaaagatggatgaattacctaatacatctgaatgtaacttagtttgattgattgatggtattttcatggataatttcaggaggagcctcaccattacacatagattaactgttgggtagagggtttggacataggtgtgtttaggatgtctacaattttaactctctggtgagactaacaaggtcctgaaattgttaaaaattcaaaagaattttcaataaaatgcaggataagacacagtagagataacacagtctcccctcattgagtgagacaagaggccgttgcagggatgagaggccagagtctctgggcctctctcactgttctttgaaatgtcatctgcagtccatctctggcaaacgatatagtttccaaaggggatcagctattcttcatgcctttagatactgcatttccttcccaagagtaaagaacgtcccacacccgtccttttcacctcattgctcttattcatacttaaatattcaactcaaagagcacctcctcctggaagcttttctaatatcccctacccactacctaagtctgacctgcttttcttttcctgagcttcgagaatactctgaatacaactgctaggggaacaactatatgtgctgatgagaggcaaatgctggagttagtgcctgggccagcaggacagtttgacctcttgaagctgtgtggtcaaggggagttacatgacttctctgggccatttcctcctctgtaaagtgaggataatagtaaccacctcatagtgctgtcacaatagcttaaatgagttcacatatgtgaacaattagaacagtgccctctggctggcacatggtaaccactgtaagtgtgagctgtcattgtccttctttgcaccatcattgtttcatcatcattattgttattatgattatttctctatgatcactgatctaaaaagaaaaattattttcaggacatttttggctttgcagcctgagtgtctagcaccctcagcacacaatatttttcactaaatgttttgttgagtaaataaataactgataaaaaaaattgagtggttatttataggctctgagagattagatgttagcaatgaaatgcatggcttctgtttgtttgcttaagcaaatattaaaaattggtgtcgggcgtcgatgcacttgtagtccccagttactttggaggctgacacagaggatcgtttgagcccaggagttggaggctgcagtgagctgtgattgcctctgtgactagccactgtgttctagcctggacaacacagtaagatcctgtctctgaaaaataaggaatggaaggtagacataatttgggaattactgttttgctgtagtcaccataacttgcattaaattattggctctaattttcatctacacacatttatgttgcttagcaataaaatctgttgttttattggattaagtttatggatttatgtttttatggatagtaatttagtattttttccagctgaaatctagttagacaaatttagtaccagagtaggctaatgagcatggtaacattctgtgaaagtggcactcaagataaactggggtggttgcggtgcagttagaaagacaggtgtgctgccccattccctgtggctttccttccgcccacacctgggaggatcagagcacctccagagcgtctcctcccagggccctgctcttcccctctttccaccttcccttccacttcctgaccttgagactttgagctggttcttaacttctgtgtgtctcaatttgctcacttataaaatggggatgatactcattcctaccccgtagggttgctgtgtggacaaaatgagcttctttgcaaggcctttgaatggcacctggcacataatgagagccgtgtaggtatttgttctaattattattgccttttctttctctaacttgccattttcttcccttactctcaaacatccaaatgcaaaaggggatgatggtgagctggtgaggtgaaggtgagatgctgcttagaaattcaccttgggttttcttgagtgagggtgcagagaactcttcagctgtcttccagggctttcctgctcaacactggacttggacgaaagcatcagacagacaggaccaagccattctgttttcattttaaaggagataggaagttgtgtcaagtgtcacctttcactggtaatccattttaagcattggatattgctcttcgtgggggtggaggtgggggacagggtggggatagggaaggatatctggataaggctatattctccagttgagctgggagtagatgcctaacctcaccccctcgctcttgcgtcagcgctggcatttgggtagcagtttgtgtagtaattatcatagagattactttaaaataggactggcatagatttcaatcttatctggtaacggttaacttattaatgatcgtttgggactgttggcagctgttctatctttaaactgtgagacagatacaatctctcaaactgcacgggataagcaattggatgggagaccaggaagagctcctcgatattgcaggaagggttttcaagaagtcagcctccgtcagtctgatgggaactcgttggggaggatacctggaaggtccctttatggatggtgcatgtgcaaggcaaaatcttggccacttgcagatttttgtttgggtacattttctttcagtgtgcttccctgaagattccaaggactttcagtctgaaagggcaggagcagctaagaaattactgtcagtgtctatgttgaggccgccctatctgctaaggtcacaggagcagccccacatgttcttgctaccagaaaacacattctctagaatagatcactcaagaggttaggctgtgaacacagtctttaaatacattccagtgtgggctctgtcggaaatagttcccttcccctgacgtgatggagagattggatatataatatggtttgccccaattcgactaagaccacttttcttggtgatagactgtcctaactcataccttagcaaacatttacatttatgtctggaataaattctagctgatccctcctttcttgtaatagtggcgactgggcatcgacctttttattattgtggaaaaattcacataatatgaaatttaccatttaaaccatttttcagtgtgcaggtgcagtggcattaagtactttcacactgttgtgcaaccatccaccaccactcatctcctcaaagttttcatcatccccaactgaaattctgcatcctctggtatctccccattcttccctctgccagcaacttgtaaccactgtagacagttcatttttagcatgtgtttttcactgagtgcctactgtgtgctaggggcaccagcctggcaatagaatggtgagtgagccttctaggatctcataggaggagtgtcaaagaatttggggaccatgttttaaatcctgtccaactcacaatgggagagtcatgctctggaattaagaggagtatgggcatagccaagttttggccacgaggagaggcttcttaagagagatatccaaattgaatcttaacttctcttagccttggtttctttttttctttcttgttttcttttcttttctttttttttttttgagttggagtttcactctgtggcccaggatggagtgcaatggcacaatcttggctcactgcaacaatctctgcctcccaggtccaagcaattctcctgcctaagcctccaagtagctgggattacaggtgcctgccatcacgtccagctaattttttgtagttttagtagagacagggcttcaccatgtttgccaggatggtctcttaagaaacctcaagagatctacccacctcaagagatctggcctcaagagatctacctgcctcagcctcccaaagtgctgggattacaggcgtgagccactgtgcccagcagtttcttattatataaaattgagataacattgaccttagagggtatccatgagctttaagtgaaatggtgtaattgaagcacctaacacattgcctggactcacaaagcaatcctaaatgtcagagtttcattattattaaagaaagggcaggcattagccagaggtataggtgaagaaggaggaatgcaattggaggtgatggcatgggcagaagttccaaggcaccagactgcggggtgtcctctgaagactgcaaagaaggagctgtcacaaaactgaaaacaatgtttgttggtggagtcattaataatagtgaatatgaaagaaattattcaatgtgtcattaatataatagtaaatattaaaattttaagtaacattggacattatttctgttatttgattttactgtgtcacagctccactataaacttaaagtggccgtaagagaactctagactttttccttaaactgttctttccccagtatttccatcctagttacttagggctacatccttaaggtcatcttgaatctcacatcacttctccttcactcccatattgggtccatctcttcctctccatttctgatattcctgctctagccaaaccatgagtgcagctcgtatggattgctttagaggctttctaactagtctccttgattttccacttactcccctaccatccctttttcacccagaagatagagagagaaaacattaagcattaagtcagatgatgccactgattcacatacaaatctttagtttcttttcattgaactgagggggaaaatccaatttctctttatgtactcaagaccatgcattttccagaccttttccatctctccaatctcattttgtatttttctctggtttatttattagtttatttttaatgtccttcacataggccaaacttattcccacctcagggtcacagcccaacctgctcgctcagtctggaacaatcttccttgaagctagcttgttgtcattcaattctcagcttaaatgtcacctcctcagagaggccttccttgattgcccagtctaaaacatcttcactattcaatctcaatccttacatcttgctttgctttcttcatagatctgtgtgcttggaagttttcccatttgttggttgaccttgtttgcctctccccactagaatttaagctccttgagagcagggatatacatgccccatctttttgttccctaatttatacccaatgattagaacagcgcctggaacatagcgtgtgctcagttaagtattggccaaatacttaagcacatgaatcttatataaaatcaataaatggttgatgtatgcccagttggtgtgaaacataggcacctgcaatgggcactgggatgagaaacttgtacatcttgtcctagaagttttcaagctcaatgaagtaaccaacacataaacaatttcaatgtgccattagttgagactaatgaaatatcagaactttaagtgtgagttattattttctataatgccttaatctaatccccttcctccaatctaattcatctcttccttgttcttttcacacctatggtctttcttgctcacctgtcatacccaactggaatgtgtcataccaactgggctccaaagtggaaaattgcttatacttctttgtacccccaataattttttctctgcatatggcaaatacatcttagttgataattgtattgattgactaacaattaatatgaatgtgatacttcatatcaaatgtttagatgtgtttttgccatgaaattctgatgtatgatgtttctgacacaatgactcagtatgtggatagaaaagctttatagaaaaaatgagaggaaattctgattcccattgaaaacacacacaggtaatgcctacttttccaaaagttaacagaggaaatccttgtggccatagtgtaaacattgtaaataagcagtctgttatcaatcatgttttattaccgttggaacatgttgaatgctttgataatgacctcgggagccagtagcctcagtaacctagatgttaccaaggaactctagaacagctcaaagcctaaaacattgaccttcaacctgcctggaagcagatggaacactttgtgaacaactggccatgtgtaaatgttaacctgtttacttagtgacgttagaagcagcaaacgagcgcgtatgcttatgtttttccatttcgtagagcttcagtggcttttgttaagaaaagttcttcaaatattaaataaaaggctgggaaatattagattcattagcaatgtacaacttactaccattactttagcagcaactgtgcagtgcgcttaagagaagtaacattaacaaacattacttatttctgtggttgtcaacatttaattaaacagggcccctacatcttaagatgtcactgttttgtatatgtgcaataaaaggtttaaattaaaatactgtacaattagtttgcatagaaaaatgacttttgcagacctctacaatagacagtttagagaaataagcattttgtgtttaaattgtgctccttagtattttaaacagatggcaatggctttcctcttgattataactttgaggcatgctttactaaatggaatcagcggggttcattaaggtcccatttgatgtatcagtattataaaaataccatgttaattatcctcaaacgttgcaagttacctccattttcctgcaatcagaagatgagagaaaccctgtgaagcaaattagtcctaattgaaagaggactgattaatatttaaataaggcattgtgtgagggattctgccatgagaaaaataggctgaacatctgaattaattgcatagcaggttaaattaaatttcatataatgggttggaagatgagttggcacagtgctttagcagtgagcacaatggctgaaataccagtcttttctttcactcttggctggattccatcgaggtccttgtagccattacctctttgttgtctctttcaatgcaaacaaaggtactaacagaaaattgctaccacattttaaaaaatgttaatcctttttgggagacagcacctgtctacattttctccatttctcttccaccttgtctgtaaaattgggaaacattagtatctttttccttgccaggtttaatgaggattgatgtcataaaatgctaatggctggaatatagttagaattgtgctattagtgggttatcactgtctgacattttcactgcacaggagcatgcatgtggagcctgtttaaagtgattgggttacttaagggtccctgttagggatatttaatccaacataaattacttatgcactttgttagtgttcaaaggaagagtgtcacgttgtacatgctggcagttttccagtcaagagctgttaattactgtacagcgactgaatacattttgtggcagtggaagtcatggggatggggggtgggtggggactatatctatattccatctaactaaaaatgaataaatgagagtgtataggaaaagaaatagactgaagtcatttttgcccttaggaattatagtgccatttgttttcattttgaaaataaaaacaaatgacagtacgatttcctccgagggaaagtactttagttgtaaagtatttctgtcccaaaacgagcaattatctatttgtatgctgatgaaaaccaaataaatttcctgaagcctcaattcagaattttacaactttgtgaacctcaaggtttgctaagttattgactaatcaagccaaaaactatagcaatgataaaaacaattgaaaaaatattttacagctaccataatgtttctaaaattacctgtttacaaacttaggtagatcagcaattgtctttttaatgtaactttgaaggatcgagcagactttgttcatattaaaactatgaaatctgctattgtttgaaaacctaagtgggaaaaagaaaagttctttcaaaaagtctatttttctgctttgagtaacattgcagccaagtcaaggagctgacgtaatctatgttcctgagtgtgcaccccaggtgttatttagaaaagtgttcataggcaatatctatatatgtatgtatgtatgtatgtatgtatgcatgtatctatctatctaaatatctatctagatatatgtttatatctgtctatatattagatcttcccaatactctccatttgccaaaatagcctgaagcatatattatgaatttctttgcaaacaattcatttttgatgtctaagaaactataaaatatatggcttctaagcctttgtaaaataaccccttttctgaattatggctccaaatgaggaacgtttcatttttgtagctcgtattatagccattggttttaaattaagacttggaaatatgtgcctagcatatttataaacttcctttcgaaggaaaaaaaaaagttcgttcttattgaggaatgataagttaggcacaactgggtcaaacacatgctgctattttaataacagaattaaaatgttttgattagcaatattaaaaagaattacttattaaggggagctcactgctattttatacaaattcgtggtaacagatacaaattcatgcagttagttctaatgcttagtatatcatctattaatgaattcatgcttcgaaagatttcaaagatgtttcttctttgaacacagagttgtaagacttgatgttagggagttgattcctaataattcacatgggatatcagtgaaatacaaaacctggctaaatttaaccagctaacaaccatgtgaatgaagagcagtaggtcacagttttgcaagaaaggacctattaccatgttcaaatatatagaagtctatattcatctcttgatgaggatcatatgtgtaccggcaactcctctaaggctaatgggagttcatcagaaatatcatttgtgcacttctgggcaatggaccaatctcatgagtagattgtgagtgatgagactatttcaatgaagtccgtaaaaaatcagattgggcaaaggtaataattccttcataattggcttaatgatgagaggaaacatgaaaagatataaatctgtacaacaaatcaagaatgttttagaaaggtacttagactcaaaccagttggtgctgtcaaacagaaagactggttttaaaaagaaaacattttcatgttttaaatcatctttcattgaaaaatttaaaaaaaaaaaccttgttcctatgacataaggacccatttcatgtgactaacacagaaacaaagacaataaattgcaaaaatgtctgcaaatctcgaagatcacactttttttaaatctgaagtgtaattggaggatactttcgtggtctgtaattctagcatctcttaggtagacagatatttctgcctgctggagatgttatatgcttttataaaatttggaaccttctttgtaagcaagtgttttactaaccagtagtgttccagggcctagaactagataatctggacataactttagcattaaaccagaaaccagaaacatttcctttgtagattgcacccagtctgtttctctagcaggtggtagctttcatggtgagaccacgaataaagggatgcaaaggtgcaaacagggaactagccaatggaattttggtaatcacgaaagccttcagcagtcaccttccacctcttcttcactcccccttctccattgcttccctcactccttctggactaatcacagggacactggtttggttttttttttttttttcctttctctctctttctctttaaagaattctataaatgtattaaattgtctcatgctcttatgaaaattttgcattcaaatatttggtgctcctggggcaagacaggcagaaaattgtcatttgttaaatactgcaacttcagtaggtggagcatatttcttttggatgacttgaaactttaagaagttaaatgatagaatcactctgtgcagtacatggtacctgaatgtcactcaaatggcaagtgctgttaatagcatttctcagtgtccaagggttacaggcttatgggactgacaataatagtggattctagatcctgtaagctttcttatccaaattcagattgctaaaggaaaatagctcatttatcagattgaaagaaatccttggagagtctatagcacaatgctgtgaagtacatgcacgtgtagtccagaaaagtgatcaatctcatccctgtgccctgcctccttttttagttgttttaaaaaaatgagatgtttgtactcatggcccaccaagttccattcttctattgcttttcttacacattcctctcaggccttcctattggtccatgactttgctagttactaaaacctgtcctctaagatgccagcagcactctgaagtaggtcatcacagtgacatgggaccatggaccgtcctagaaagaggacagatccaaagtgtacacggttattgtgcagtttcaatattgactccactggggctcatttagtgtgttcaatgaatgactgaaagaaaaaaaaaacataaaattaagtgaaacaaatctagaacccgtcaatgcccttgaatgagcgcagatagagcatataaacttggtctcatttttttgccactcttgaaacttgcacctcgataaagctgtagtcctgtgtgtttacactcacgtggtgcattgcttacaaccagttcaattctattcagtcaccctttttgagtactgactccaagactggaactccgttagttctggaggtagaatcagagtgaggcaaggtcctggtccttgatgagtcccctacatggggaaggcagtcctatgaacactggatgctgcttcagtatgagaagtgcagtgacaatgatgaggatgaaattggaggggaatgcaggtaagcgaaccatctgcctggggaaacaggagctggagagccattgagaaggtgacctctgagttgggccttgaagaagaaagtcaccaggccgattgagagactagggggagaaggcagagaggtgggaagatcactggatgttcgccagcggtgtgatcagtaggtgtgtttaaaatgtggcatttatcaggttagaatggctatagagaaggctagaagtgtaggttgggatccctttatgcttgaaggtcctatgtgcctggctaagaacgtaaactttgctgcttactttatgtgtagtcctaccttcccgattggataatggtgagcctccgtggagggtggactggcctcagtctcatattggatgtacagtaggtatttaacaagtctctagtgaattaaataaacagctggtgaatttattgattgaatgaacttaccatttctttctttttgcataaaacacccccacacagacatattataatgaagtcccactcgagaaatagcatagaatcagggaatttcatcctgagagggacctttaggatcctctggcccagattatcaatcttgcagatgcgtactgagtggctcgcccaaggctgcagtactaggggctgtcagggctgaagcctgggccttctgagtccaagttaactgtactttacactctaccgtttacctactaagattttctgaaatgccgctttgtggtagaaatatggagattgaactttcttaaagcataaagggatttctgtggctactatatatcattttctgttaatagttgatatttaaaaacacttcactatgatctttaataatcctattaattaaaaactttgccaaatttgactggctttggaattgacatttactttaataattttacttttaaaagaaaatgaatcttggctatgttgtcactgtaaattgtatgggataatcacacggccgcttttccagagctcagacacttttttttttctttttcgggggtaaagacaagcacacagaagttagtttttaaaaagtagcagccagaagagatataattcagattatctgaaactcacatcctatacacagcctagctgggttagtgataagatttcctagaccactgcatttagcagcagcaaattataaagagggctgctggctaccatgtcaggccgctagctgaacacaaaaacgtgacagcctgacaggtatgtaggatctggacgaactgtttttaaaatacctactcttaagaatttaagaagcataaaggcctggggccattttctttgacacttagtagctactgagaatatcttcttttatggaaaattatagtaattaatgttccaacccaaaattctgatttatcaagaaaaaggaagctataagctttttagtaaagcgttgattacacaattcactttagaaatatttttatctaaaattgttcaaatgctgtgaaatatttatttctaaactataagcgaaaatagctatccagacagtttatctcttaatatcaacaagcacatactgaatacttctcatatgtcaggcactaggtgattacacagattcagaggtctgaggcttgccatcaagaagtttataatccagtgcgagagagagaaagacacagattcagagaaggacttccccaggatgttctattaatatacagctatttctttttcttttctttatattgccttttcttttcattacctttattgagcttaagtatgctcttgattgtagtgaaaactataaactcttttcttccatgtgcccaacttggaattctcttctctgattttcccataacttaactgaagtgagaactttggggagttcaagcactgtttcacttatttcctttttcaagctcaagctttgtgaccaacagatgactataatcattttagggtatgacatttttttagaaggacaggaacccgtttatctggcacaacactctgtgttggagtcagtattactattcccattttgtaggtgagaaaagaaagattcagagaagtgaaatgcatttacttgatttcacacagcaaataagttgggttggcatttagcaatagtctctattccaagaaggtaaatcttagtgaccttccatgtcattagaacagtcaaaacttctcaactatggaaaaataatagggtcctttatttgtaatgtagtggaaagagccatagactgagtctcctatgatgagttgtgttactaagtggtggtgggatttcgagcagatgacttaacttctcagagttgccttctccaactgtaaaattcagagactgaccagataaaatatgtattgtaaaatctgttatgtgattctcaaatattgaaaattagagtcatagagtaccttcaggtattttcacagctcatgagagtgtgaaaggtgcatgcaacactcttgtaaagattagggattatcatagtaacaggcacaggttggacattaactgtgtactaaactggattcataaattattctcaaaatgatatgaagtgcactgaacacacataagctaagctataggctcaaaagtcttcttataaaccttcagtttctcagcgagattggtcctcaaagcaggtttgctgcacatcattggtctgaacttcaaaaattgcagagtggaagtcatacaccactgagattttcataatttaaatgtgactgtttatgaaaggagttagagctcataatagtaactggtttctagccatttgagaatggtgtgtgtgcttttcatagaagcttttcacctttcacctcccactggagtagtgaaggtctcaattccaaactgtaagctgggttttgctgtcatccttcaagacagcatttgtctaggcaaagtgagccaacggtcaagaccaccacaggcactgttcagatatactggcctttcattcctagctcctgattgctcacctgtctatttctagttgtgaatcatccattatcacttttaaatcccatattcaagatctgcttccacctagacatcttagatgagcctttcttcactatgagtttaccagttgctacgttttaagaagcagaaataatttaagcaaaagcaaatcaatcatcctgtaatctgaaaagtaagatcacacaatttacaatttatgcatgtatcgaggcagtgtgaggtaaaggaaaaagcaagaattacggagctgaatgtgcatgggtttaaatcccgttggctgttagctgtgtggaattagggaaggtacatgacctctttcatttcttcatttgtaaatggggtctagaaagccggtgttatagagttgtgtggtttaaatgacagtgtacataaagctctcacatagaacatgtcggagtctttggttgggttttctacactgatcctccccctccattagtgagataattgtgggtgactgaaatgaaaatgaatgagtttaaagactgggaacatgccaatgaaattcacaaaactcaccaaacttaagtttaactccatttcactatatgattagagtttctaaatcatagttaaaatattcagtctaatttagaaaatctaaattgatatcatgatggttcataaacaccttctgcatttaatcaggggtgcaacttaaatttcctaattaaaaatggtgacactttagagggaggtaagtgacaaatggtttctgtaataatcccttcataggaaatgtgagctattttgtaacaaaaaataacattacatgtagacttcaaaaatttctcacatacagactgactaaatgatgatttgggtgatttttctcctttctcttctgttatagatccacaaggaaatattgtagcttttatcacctaataaaatttaatagaaagtttcaggaaaagttaataaaaagatggtatgaatccaggtgtgacggttggaatttcaatcatgattttgattctctgcatatatttgaaggaaaatcaaaatggtatataccagtttatggtaatttttaagaggtgcctacaacaggagtcaccttgttttagagaactatttcactattcgagaaaaccaatctatttttgtattttggatatgttccaaattgtaggtcctgtagagactttcctttctggaggattacctgctcagttaagaaacagtgtcagatttatatctatctctatctctatctatatatatctgacattgtatatatgtgcatatatatatatatatatttttttttttttttttttgcttgtagaaaaacctgttgcctggcaaaatttaacaagtgaccttttttcctgacaacagatggcagtattttcagggacaatagccatgtatttattagctaccagagaatctcatactacatttctttctccaacctccccctcctgcttccccacttccctaatcaggagctagtgtgcacaggagagcttggttagcactttgacttcatgcaatttttttttaatagaaaaaaaaaggctggaatgaattatccctttgttaaaaagttttaagttttagatacattttctgctgttacattggtttagagaaattaaattttacaactctttttttttttttttttttgagacagggtctggctctgtcacacaggctggagtgcagtggcatgatcacagctgactgtagcttcaaactcccaaatgattccctggcctcagcctcctgagtagctgggactacaggcatgtaccaccatgcctggctgattcttttttattttttgtagagacacagtatcactatgttgctcaggctggaactctattcctttaataaaaggaaaagcttcttttgtacataggaatgattactattgcctaaactatattctatagatacaactttaagtaaacttgataactatcaaaatgcatttttatttacaatgggaagtttactatacttataaagggtatggtaatgtaaaagtatggtacataatgtaatggtatgtgcacgtataaatggtaaataatgtagtggtatgcacatggtatgtaaaggcaacgtaaaagcatgatcatgcaatgtaaaagtatgataatacttttacatgacacttaaaaagaaattgtaagatgtctgatgatatgcctgttcatacaggcacatggcattttaggactttgacaggagctatatcttaaatactgtatcgcattcctgtagcacttgattgtgcattatagttgtgggcatggagaaacattgattctgagctgggctggaaagtagagtgagttttggacatgcagagaggataaagaaaagcattctcagcaaagagtagcagtagaagtcctcacagcgggtgggacatcatggaaatgacaaatattaatagttgagcttatcctaagtgaaatgattggaagatggggttgtaccaaattgtgaagatccttgaatgactctgtgggcctgcagttttcacattaaaaacaagaactctgtcctttcctgtaaatacttgagtggaagcccagtatggtttatgaaacaaatactttctatagtggttttgaagcctattcctgaaaacatttccacaaaatttgtagtactgtactatcttccgagctaaggttgaaaactagcattgtagaaacaactcataggcaaggcataaattcattcatttatttgttcattcattttacaagctgagtacctactatgtgccatgcagttgtaagtatatagtatttcatatttaatcttgaagagtgaactatgtatgattcatttgagagatgcagctgagttccatcaggagaaaaatattttgcaaagcaaatcaacttctaagtgttacatggccgaattgtagaatatatgaaatacactgctcaccgagtgaaatgataatctgtaatgattccaaagtagaaacacacacatattatgcatactctcattccattttatatggtcaaatataaatatcatatatatggctacacacacagaaaatattcatctgttgttctaaatgatttgtatctatatgaaatgacaagagtaaacccattaaattatatttttgttttacttacaaatatattcttaatattttgtcaattgagacacaaattaaatttcatttttggctaggcaatcatttttgtgttctcttcaactttcgacactagtttgtgtctgctgtgtaaaaagtagaatggctgtcctatttctgtctgtttccattacactattctttctgtgccacattctctttctctctgtgcctagtgggacattaaaggttctgtaattattttgataagatcaggattgtggatttttttggttccacttagttatttgctaataatctggctttaatgctgaaggctaaccaatttcttatttaacaatgcatgtttaaaacatgataccctgaagaatactatgtttactagtctgtagtctatcaattatctaaattatgtaattatccctcaattttaggaaacatgctatataatgtttaaattttgtacactaaagaaagcaaatgaatgttgagtattaacgaaagtaaatgatgtatcctggtgagaaaattaatcaggatctacctatgaaaaaaattttataaaatagggattatcaaacaatacaaaatcttatactcagaaactaaaatgggataacaatagtgattacccaggctacaaggcttaacaatgaaaacagaactcttagacatctaaggaactgtcctggcaagttaaatcattgagaatcaaccatgagctaggctaaccataataatccatatctttaaaaattacaattattctgttctcagtcctgggtagtcatagtgggattgttgaggctattccctaaaatttaggggtttttttaatcagcaagaaaggcattaactatgaatatattgctaaaatcaagaagaaaagttcaaactttcaggtccacagttgttgaactcaccctggggagtccacagtaagcctcaagccagtgttggttctgggttctgcaggaggagtgaagaaactccggaacaccccagagagtaaaatggtgggaaagcacgtggggtatatggatttagaatccttccgtgtgactcggaacccctgggaaatcttgcaatagagacattcattgacttgtttaaccttgcatgtcccaacttacttaatctattggagcgtgacatactatccatactgtggaaccgactttgggaaacgctattctggaatcttcctgatattgaaataaaacttgagagctcctctgtgttgctaagcccaactgccagggcaaaaggtaggggacaaaagggagaggaattctccagagccttcccagttccctgttcccactgacacacccatttcagatattttctttctcacctgggttcttgtccacaaaaatgtcaagtctgcccctgagaagatggtgtaaaactaccatactatgacaacaaatataaaataggactgtcgatttccttaaaaccttaccatttcaatggctgaaaatattttgttgaacagtggcacattatgaatctactcagtctttgcttggaatttatggtcctaaataaaagtaaaaattagattactcataaaaatataaaaaataaagcctttatgcaacagggagtaaaaaacagtgctttgtatctatcgtttgccattggggttgttggtataatggagaatgtacactctctctttctctttttgactagaacacatcaatgtaagcagttgagggagacggaaaccaactgtttttccattcaccttattattgagctgtggttatagaacttccttttttgttatcaaaagatctgaactaaagcttcagttatgcagggagaaagagttaacatttaaaagtgtagaaaaatagctctagacacctgttccgagtttgtaatataatactcagaataatattacctggtgaattgcagttaaaaactggtgtaagaagcatggcttattatactgtctatcacatattcaacgtaattgttcttgtttattccttttacttaagttttaaaaacatgtttcttctaagagatctagcacctaacaggtgtctaataatggaatatctctatgaaaattatctcaaatttatcctcagcaaaggacaaacaagtcattcaatactagtttaagacagaccttgaagcattataattaaccagcaaagcacacttgttaagctgtttccctccaggggatgataccgtgcctcaggtaccattttgaaggatattgtagagagctgaagaagttagtgaaaaatactctctgatgcacaatgccatttaaaaaaataaagaaaaagaaatcaaagcataatttacatagacagggtctctccaaatttcatttacatatagaatgtttaaacaatattatgaatttctaaacagtgctacagtatgataagtagcatatgtttattacagctaactaaaggtctacttgcggaatgttagtaataccagccttagaattgtttagataagctagacgatgtcctcgcagcctggtggaggcagcatgcctcccagaggtgaaacgtggactcttcaaggaggaaggatgccatctgtccccctggaagagttcatggctataaacagtgaaggagcaatgtagacatcttcagccagaagttattaaccttcatgctagaggaggtgatagataatattgggattgggaggctgacccagaagctctgctaggcgcacactctacaaagctataaaagtcataagtagaaatattttatcaaaaactcagtatcttaggacaggtaaagcaaatggaatggaatcatatggtaaaaaataatttattcatatctattaagcttattttgttacataagcttaaatggccttttcctctgcagctagtttggatccatttgaatataatacatgccttgtgacattgcttgcatttttgctttgtgattttgatcaaatgcagaaagagaaccaaggcattcctaatacagaaatagaatctttattggttgaggtcacatgataaataaatagcagttttacatggtaatatttatttgaatatactgctgcatctattatgagcataagtgcttatagaatcatttactgacattcatttttagttgagccatagttagcagtagtggtgtttctgtaattgacatttaacacttgaatatatttaatacaatgtatactaattgtgtttgcccagattaatgagtcacaattttaaacagggaaaattaaattgatactttaattaagtggatcactccagttttggggggaaagtgagttatgtaaataaaaatacttcataaaataaatggtttattttgtcctggttattaaaaaatacctgtttttattatttttaactggtagcaattgaataagtgatgcttgtttttgaattcttatgtataccccggcatccagtataattccttgcacacagtaggcatttaaatattgattataaaaaatgattttttttaagaagagaagaccaatttagtgactacattttactaaaaattgaagtcataaatatggatttctttaaactaatttgttatttaggtcatcaatattaaacagtctgaaaatcgcctgctagagattatcatttaagagcataaaactgaaagctgggggaaaaaagattagtggtacccaagtattttctgtattatctttaatgccaacatttaaagagtaacagcaatagaaacatctcaaatgactaaccattaaagcttagcctcaccatgacaaaatttgcatgttctggtacttctatgagcacattatcactgtatgtgttacattaaaagagctgattttttattgttttcctagctttcatttcacatttttgcaatcatctttatactgtttgtttttatttcagggttagtcagctatttatttcattagtatcaagcaaagcaaaccaatagataaagcactgtcttttttatctatgtcttttataatcatttcttttttaagtaataaatttacattttataatcgtaattacgaaattgcaaatgaaatcagttctagaaagattaattcagtcgtgctcacagctgtgaagattgtggaaataaatatcattttgcaataatgtattcttgacaaagggcataacaaaagaatgatttctattcagagatagtgggtatatttattttgcatgttgggggaggggaattcagctctagcttttcgaccctgacctagttttgtagctgcttattattcagctatatgtttgagaaatctctgtaatttaatttggcatcctcttctgcatgtctgcacctagcagtaggggctcatgatattagcagtgtcccgtgctgaatcgtatttattttaaaatatcctaatgcactcataactcagaaagaaagtgttaattgttaccagggaactgcctgattacagactggctgtcccgtccagggctctgccataattagtaaccactgttgacatttagatttaaattgaatttccttctaattaaacccagagggggttgatcctctcagatgtacaggttaataaaattagtcagaaactgttaaacagtaagctgaattctccaagagagctgtcccaatgtattgttaagaattctgtaattaatattaaaggcattcattaaatttgaattgtctttttctgctttgagttgcatatggttttgtagcggttatttctttaattaggcctgtttcctttgataaccatagtattactaatttctctcatgtttgtaaatttagcattataaataccattcctccattccattctgctatgcataattcacaccaccattattctaggagtgcccaatgaataataataaatgctaaaaataaatacagtagtggaatgacattttggtactccagatgactcttaactgctctctatttatcactgtccttgcaacaaagatatttaagctttaaagcaggtcgtcagcattttcctcagtatatttttccatccactcttcacaagttttgatataacagtagcttggatttggattgctttgtctgccgataggaagctttccagttctagctactttgtagattctgcatatcaagataggctttgattcctcctcccttccagggacttggggaaaataaaaaaagctcaacactcagtatgaaaacagatgacaggaaaaatttaaatgatcagtcatgagagataaagagaatttggtaattttacgaggaggcgtccaatgtgaacccattgatagcatctggatttaaaggaacttttgtgaagcacagctttagctgctgttatcagtgctttatttctgaactcatttattaatttcttacgtaccccacaggataatagcatattgtcaacttcaccatggtacaaaagtcttgttttcaatatactgataatagttttatatgttaattcttaataaatagcactctttaaagatgctggatgattacagtgtcttttaaactttattcatttctaaaacaatgactatttcctctccctgtcccccttaccccttatgaaaatgtctagtccacagaactagtcacttgggataatgggttttagaaataaatgcatacaggatttggcaaggtgctttatttaatgttatacttactcctcaaaagagggacatgattattctgtaaagtgcttcttaattttctaaccaaaataaacagaaggaaacaacatgacttgatttttcttgctgagtctacttaactgaattgaattaaataaaagtgtttctatcacaattgagttcagatggggaaatttggggcagaatatgcttagcctatgattaatgatgcctcatagaaacctatttgatggccaggtgcgctggctcacgcctgtaatcccagcactttgggaggccggagcgggcggatcacgaggccaggagttcaagacctgcctggccaacgtagtgcaaccctgtctctactaaaaatacaaaaataagctgggcatggtggctcgtggctgtagttccagctactcgggaggctgaggcaggagaattgtttgaacttgggaggcggaggttgtagtgagccgagatcgcgccactgcactccagcttgggcaacagaggcagacttcgtctcaagaaaaaaaaaaaaggcctatctgatagttggaacttaaagcctacagagttttaaattatcaaatgataactttaagataatctgaagcctcatactttatgtttttatagctagaatatgttacattattgatgacagcgtaggtgtagtaacatccagaataagatgttgctgaacagttgtatcagactctgaaatctaggatgaaagcaatgtccaggaaccggggatgtaatatgcagataaacaagagcagttttatgatagtgtggtctcacctagtggcctgctggaaatccaagaattgagaaaacattgctctgccaatagttctatgaaggaataggtaaaaatgagtgaatagttgtgaacacaagcactgacagcaatagaattgctggataattaaaaagactgtatatcatggcattaaccactagtttgatttatttgtcaccagtgtttcctgactcagtttattttagggcttttttttttttttttaacctatgggaacaaatgtgggtggggaaagagtacgctgtctgggaacaggaggtgtctgctggccagctgagaaactagggctgtcattttagtctgtgtctcagtttctttcttggtaaagttgaaagatggtgagtccccttcttacctcactgcaattgtcacttttgaagtcaaagagaaagtgaggtgtttgtaaaaaggtgattttctaaaaaatgtgctattttattaattaaagataaaattatgaggattaatgtgaacttatttcttagtttttataccattagttataattccagaagccttttctagagacaaaacaatatcctgattctggctttaagattgagtattaattattttcttttttcaagaaaaaaaattgtgatctcatgtgaggtatggggtttaggcctgaggcttctgccagctgtgcacaaagcatggggtcaggtcaggttctctgtggtccctctcgtggcaggctaagtctcaagtcacatttcccaaactctccactcccttgggcctctctggttgagttgctccccaacaccccctcgtggtattcccagtgcacctcaaacttattgctgaaatgtccatttattgagttcctccatcctttctacaaacatatcatctgactgtggttctaaactaataatcaaaggtcctccaattgccttatctccaaatattagattggtgattggcttaaatcaccattaaattcctaatccttaggtgggattccaggtcatttatgcatttttacttatagccacatcaaagagacaaaaggctggtcacatttttttgagaggatacaagggtgacagggagaaggaggatgcaatgcctccagggtggtcttgcctgacccggaaatgatttgaacataaaaaggtcaggtcaggccatgttgtaactgagcttctgtccccttgaacttgtgtgtcaagcctcgtcttgacctttaatgaattcctctctgtagcatttctgtccccatgatgtggcattggggttgcacttcaagtaatagtggtttgcaagaaaaagcaggcaggagagacattaagatgtgttggctattacagtgtaccaggcaataggataggcacttctgcatctaatctcacctcatcttccattaaactcagaagaaaggtggttattattattattatcatcactattactattactcccattttacaaactaggaaactaacaggaagagaggagagaggttaaataccttgatcaaagttacagacagtaagtggtagaggttacttaccctgcagccaaagttagcctaatttgaaaaaaagataggaagaacaaatatcaatattactaaagagattgctggacacttgaaaaagcatttgctgagttttgcaactgagactgccatgttcaggaggcttaggcctctctcaaaaaacaaacatagaaatggaaacaattctttcttctttccagagcttttcggttagagagtgagcctggcatgctggtttctgcagcctttcctgggtagggctgcatcttggagggcagggatcttccacacagaaaagctgctcattgtgcttaggagatagagtagaaataaataggattttcctccaagagaaagaggttttgatggattgaaatcacattggtggcagactaatccttggtctctttgttaccttggcttttgttaaacaatgtccagttactacctgtatctttatgttctttagataaattatgtgtaattgtcatttccgacatgttccatgagccaaatgaaaagggatctaaaaatacaatatatctgaaattaacctcatggtttttccatgagttctttctttatccaggcaaacttcttttcccagaggtgctgactttatttcatttcccaaagcaaggatgggaaacagccttgcttactattccgactgttatgactgtgattcagctatgcagataggcacacataccgggcaacctgagccatatcacagaagctaatggaggtgacatacataatgatgctttgtcaaaaaccctgctgctcttttaaattaactccaatttgtttttaataggagttgtgtctctaggagaaatatatttgtgttctcttattgcagaaaaagtggataatagcacttaactcattagaaagcattgtcaaactcattatcctagtgatcctcatgataacactatgtggtaggtattattatcccagttttgttgaaaagggatgtaaagactgagacccagaaggttaaatggcttttataatctcatacaatgatcaggtgatacatctagggtcacaatcctgtcaaaacccattgcactggagcggaatccagcatgattacggcaggcagagaggtaactaaataagacctttgccattttgcatttcaattttcgttggcctcgtcactcttaaaatcgtatgcaatattctaatatgatcttgtcagcactcacacataaatacttcagctctctgaatttttaaattctttcataatggtttttctaaaaatatagtaataatagtaatagtcataataattgctaatatgaactacttgttaggtaacttataaagcattttactcacactgtatcatttaatatttgcagtgatctaagattaagtatgctttgtatcctcattttattcatgaaaaaatcaggcttccagattttaagtatctggcccaatatttaacatctggttgtggaagaggtaggaacctatactcgtgaattctacactatttggtatcttagatataaactttgaagatcatcttaaagtcaagagtgataattttgatagaaactctatagtgccccagtctttcaaaccaaactaaaactccaaatttaaataagacattctattctccttccatgtttatttcaaaactggatttcaggttacttccagctggccagatttcttaatatatttttatttacatatctcttgttagtttcacatctccctttgctggtgcaatgctgcaaatgagattaaatggtagcacaaagtgcaaaactaggagttgctaactttttattggattgctttgaggtggtgggctgagcttgtggtagaaagaaaggaaacaaaaagagaagtacctcaaagggaaaaataaaacatagaatgtggaagagagaaacagggtggaaaggagaggatggccgggcgtggtggctcaagcctgtaatctcagcattttgggagtcgtggtgagcttatcacttgaggtcaggagttcgagaccagcctggccaacatggtaaaaccctgtctctactaaaagtacaaaaattagccaggtgtggaggcacacttctgtagtcccagctactcaggaggctgaggcaggagaaacgcttgaacccgggaggcggaggttgcagtgagccgagatggcaccactgcactccagcctgggtgatagagtgagactctgtcaaaaaaaagaaagaaagaaagagagaaagagagaaagaaaggagggaaggaaaggaaggaaggaaggaaagaaggaaagaaggaaagagaggagactgaagggccaaggagggcatacaatggaagatgagagctgtgctcccgggaggcttgtactcatcaagaaagaaaggagaaagagggggaagaaaagaaaaaaaaagaataaagaaaggagagatgaaggaataaaggaaaaaaagtagaaaggaaagaaggagaagggagagaagaaagtaggatggagaaagaaagggagggaggaagagagggaaggaaacaggaaaggaagaaaggaaggaaaaatggaaagagggaggaaaagaaggaatgaggggacagataaagcacttgatggatggagggaatttaaaccaaaagaaagaactacagtatcatatctattgaaatcttcctggtcccacagctccctgccttcaggctccctatcgaaaaaagtggtttatagctttaaatcaagggtaactgctgatttgtagtgtgccaaattctgctaagaaattagcttactggtggccatctctgaggttatctttatagcctgacaggaagatttgccagtgggttttctgatggaaaatgccacagacagccaccatgagaaatccagcagccattgaggaggccgcaacattgagacttctcggggaaaagtgtcaccgccattgaaccctgcaggacgtatgactggtcattacgtctcatgtgatttccagaccaatgactcatggggggagtcatgggggggaggtgagcttctgtgcggaaagacccactctcaggtgatggcttagcagtctctgtgtggcctgccacgtggacctccggtcctttccaggcttggagaaggcctggcagacaacagcaagtgagcagcccagcagaccctcccacagggctcggtttgagtgagcatagattgcttccccttcattgaaaggtaagtacatacgatggaactcccactgtttcttatttattctttatccattaataatcttgtcatacaagcagtgatttaaagctgtacaatttcttcaagatattttattctactactaaattagcctcaaaatgtggataattaagataacttgtaaatctggatatagcttagtcctgtcatccaagcaaacacacagatcatttgggcagtcttttaccaactgacctgagggaaatggcaatcattccaagaaaaactgttttcatttgatgaaagaaactgatgagtggaagaaaataattttaatctacaaaaatgaaaagaatgtgtagcatagttcattttgaatgtcaaaactatcatgacttcaaatttaaatgtaacagaggtgaaacaggtcaaagatatgtacatggaaaaatattcatgttaaatttgaaagtaactaaggtcttcttaagaaagaaatctattcctcaatcaggttatcagtgccatcattggttaccttctggctcttagacaaacttccccaaagttgactgtcccatgttgttggaagttgtaagaattaatattacctgtgtagtttaatatctctagagaatatttaaataacaccagcatatgatataatttcatggacagaatcattcataatatttacctaaaagtgccaaacactacttttatttatttacctatgtatttttttatttcccccccaacattactccagaaaggattggaaacagctccattgttgattcaacaatagatttccttcttactgaaattgtgatttggtagtaaacaagttactcagataccattattcaaaatgtcttcattgatttccatcctgagctgaatgttgtggatcccttcatattttttttctgaaaataggcctttgatttacagttagatatactgttcttaaactccagtaactagtgaaagttacacacattgccttcccctggacacttcaaagtccacaaactgctgcttagcagtgccatttctcattttttacctgccaattttagacatattcccagagttaaattaatttttccagaaagaagaatttcattaaactatgtcaaatgacataaagtatagtaaaaagaaagtttgcataactgaagaaaaaaaaaaagatgacagccccttattttccagcagagctgtggtgacaccgacagctctgagagctgtggagaagtaatagcttgttttgtgggcactgggaaaaggaaaaagtcctggaaatacactattgttaggcacagatgatatgccaaggaacttctagcttctcttaaactttgcagacaaggattttgttgcccaatttcaacaggattcaatccatcaacaagtgtgtacgaagtgtatgcctccattcagcattattctttatggaagttaagaaaagaaggaaatctttccattctagagttaggatgcttctgggaggaactggaacttgaacattagaagagacctacatcaaaatgggcttaacttttctccaggagtcattttttggtctggatgtctgtgcacaaaaagatcccatttattttctaaatgttggttaaatggttacaattagctctttaatgttagtacctcaagaagcaaaggccagtggtgtacctaaggccaaagttagatattatctttaaagaaggttgctggtattgctgtcagtattactaatatttagtaaaagttcctagaggattagatatatattaggtcctttgtgagaaacataaagattagaaaagactgcacttctgtccttgataaaattgtgatccagtagtccttgaccatggtggtagaattacaggattgaaacagatcagaaacataaacatgtacctaattacaactttctcttctcctacctctcctcctcctcctcttccttccccagtgcaaacatccatcacaatagcacagcagctacttttccaagcgagaaaataaacctatcaaggcatagcattactgtaaaagccagtggcagaacccagtgcgttagtgaaacagcatcccagtttttctgaaactgtttttcttttgttctttgttaagaaccttacagtgtatcttcctgtgtatgtgtgcaaagaccacaggcttaggagttatatgtaaaacatcttctcttactaaataaaagcacagacacaatgaatctaaaacataaatgttcagagaatatttgttttctgacaagtgaaagtgaagtacattgcatctcttatttgaacattagaagatctgacatctatataaaacctatccttaagcaagagcatgtggcagggagtgctgtacatgatcctgtgtgcacatctgggaaactgaggcatggacagcagccaagggccgtgcgtaaaatgatctgacaagtacagaccctggagcatgctgctctactaataaaaagatttgagaaagaaaatgcatcagaactgctaaactaatggctttaaatccagccaggacagcagttctctttcagcttcagccaaggggctggtgggtaccaggagactaggctttcagcttcactgcagtagagtggagaaaaataaaagacactgtgtttcagttccaagaaggttgtcaatgagcaaatctatcattctagaaaccaacttgattagcaggtctttccttattgtttaatgctcattaaaaaaaataaagttaaacttttggtgattaatggttgtacatgtagtgaattttgctagaaaactatgttgttaaattttatggtgataactcttactctttaaaattgttaatgtgctactattttaacaaatgtaacagtgtgataagtaaaatccctctttatgtatatagaatcccatttgtcagcagttactaatttagagaaagtgaatagacctcccttttagctctatttagtatttagtatattttaacaaatgatactttagttgtaatacttgtaatcattttcaaaaactacttacaataatgatattttcagggccgggcgcagtggctcactcctgtaatcccagcactttgggaggccgaggcaggtggatcacaaggtcaggagatgaagaccatcctggctaacacggtgaaaccccgtctctactaaaaatacaaaaaattagccaggcttggtggcgggcacctgtagtcccagctacttgggaggctgaggcaggagaatggcgtgaacccgggaggcagagcttgcagtgagccgagatcgtgccactgcactctagcctgggcgacagagcgagagtctgtctcaaaaaaaaaaaagaaaatgatattttcaagtttaaattacataaaataaatttctgaatatatttacatgctagcattatttgcaaaaatgaaataaaaatgtaatcacacatattccagatataggctactactaagttggattgattccagtgctgggatgtgcgaacaggcattgttaattactagggccacaaaaaagtattatgttttgttatagtaacaatgataaaaaatgacccaagattaataatagttactatttactatgttgtttagtgtagatgtctaagcactgtattaggtagttacgttgtctcatttagtctttacagctgcccctgtgtgattgatttttcatccatttttcagatatgttacctgaatctcagaggttaaataattggctggaatttttatagttaataagtggtggaagctggaatcctacacaaaggctatgttcttactagtcttaatttaaatcgaataaaaccttttttccatagaatatagatccctaattattataatgcatgcaatcactaatgtgtactttactaaatgtaaattttgtgtatggattagtgcatatgttagcccttagaatgatggctaaaagctaaccaaccacaaaaattgagatagtgtgttgtggctattactaaaagtcacttcagtaggggaaaagataaagctatagaaaattgctactgactggagtcaaactacactagttgcttacaattgattgtgtgttgttcaaccacaaagataaattagaacatggaatactgcaatagaaaagtggtttagatgtcacagagaccgtatgactatttttatctctcagctgtataaaccatagcttacagtggctgaaatgacattgaactgtttttctctttgatgatttacaggctgtatagtgcatttgtaagagcagatgtcacatttcatgtatttgaaagtgtcaactctgctgacttatgtctgaagattctgctcttgaatcaatagaatgtagtgatttccatttcttaaaagtgatttccccaacatcataaaaaacacatagtgaatattggtcattataatgctgcagttaaactcttactttttggtcttgtattttacatacttcatactgttgatcattattttgtgaaatctgactggaacaaatagggaagcttctagcgagctgaccatgtttgtgcttaaacaaattaaaaaatgtttgcatttcatcccagacatagctgtccaaagtctaagatggattgagcaaaggaaaatacatcaaggttttcataataaaaaatgattcccagaaagtccacatatactttattcatcccatatttcaaattgattttcattttaccatttagggtgcagttactggtagtcccatcttttaaaaagtcaaatttgcatttaaatagaaactgtttcaatcatttaacatccgaaaatccgaacattttattcattccttttccccccgtctttcactgttgaaaaaaagtcttgtgttgtacttttccacaatcctcgtgaatcctgaacttccataaaaactgtagcgccctcttccttatgtcactcgttaaaatcccatcgctaatagatctctgggaataggccaggatcaggtgagaatggaggatgcagcgtgtaataaactgtaacagctgacaagtcatagtaacacaatattttcttgaatcgcacctgaaaaaagaaaacatttcaatgaatataactcatacataagtaactaaatagaaaaaaggcattgaaaataataccgcgcaagttgttctgcttaaaaaatattgaaatactttttattacccagtaactaacagtataacaagtttcatgaaaaagggtcaatgtgtaaaaatagtttgaagtttggtctgacttttgtctatttaaaatgaatcaacaaagctttttacttttagaagaagatgaaaccaaaggtcagttttatcaaaatgaaattggctcagaggcctcaagttaaaaatataaaaacatattgaaacacaggtttcaatataacacaggcttcaatgtaaagaaatggaattcccttcaccagcatttataagcatctatataccccttgtgtttcacctgaggcaccatttccaacaatttaagaacatcaagaaatggctctagttgacttgaactgtagtgcattcattctgtaactaaactgctttaacgttaatgactaatttattccctatcagaaatattatttcatgatatttgtcttattgaccatttatgccttttacttataaaatataagaaaaatcattataactattttttacctagtgacatatacatgctaaatggttagaaggtcttttacaatgttgttcattttatatgcctgattttttttgtttgttttttttttgttgttgttgttgttttgagacggagtcttgctgtgttgcccaggctggagtgcagtggcgcgatctcgctcactgcaagctccgcctcccgggttcacgccattctcctgcctcagcctcccgaggagcagggactacaggcgcctgccaccacgctccgctaattttttgtatttttagtagagacggggtttcaccgtgttagccaggatggtctccatctcctgacctcgtgatccgccctcctcggcctcccaaagtgctgggattacaggcgtgagccactgtgcccggccctatgtctgcattttttttttaaagaaaagtatttcctgccagccgtggtggctcacacctgtaatcccagcactttgggaggccgaggtgggcagatcaccctaggtcaggagtttaaaaccagccttaccaacatggtgaaaccccgtctctactaaaactacaaaattagccagcatggtggcaggcgcctgtaatcccagctactggggaggctgacagcaggataattacttgaatttgggaggcggaggttgcagtgagtcgacattgtgccgttgcaccccagcctgggcaacaagagtgaaactccgtctcaaaaaaaaaaaaaaaaaaaaaagtacttctgtattttaaattgtgccattgtctccttgacaatagagagatacttttactgataaagggaaagatgtcacagcccagttatttataagacatttctcctatgactattttattacttattttttctggtctcttttgatttgtttttttctttgttttgcaacttacagtgcaactatcattttgtcatctgattgaccttatagttatttcttacttcttgaatatgataaaaatttcaacaagagcagaccaaagttacccaaaataatagtatttttaaaatctttttgcattttgttccacgaatgcattcttaactctagaggtccttatcttctttatcttcaagctcaggatggtttttgaaactcacagtttcaacttgtgagcatccctgtgtgcttacataactgagtaagacacaaaataccatgtactcaattatcctcagtcttctcagttcacatcccctcaaaactgatgactgattgctgtgagttgctagaatcacttttcccatcatgagatatttgcctgtttctgagtgaattttttagggtgtgagtgggaggtatgtgttagtaggaagtaagggagattgaaccacaaatacttaacgccatgtaagtcagcaaaattattgggagaaaattagaagaggacagatgacaattgtgaggtggctgttgtcacctctttgatgtatcagcatcataatctatatctgaaaaaccataaacttgattatccatctaaacccagctaacctgagaaaagttcttcctgccacattggcagggagtaaatggagacaaagagtaatcttagttcttgtaggtatttcgcagacttacttctgcttgagagactattacagagatttctactgtgcaaagactactataattaccaattgttctaagcttgctatcataattcttttatgagtccatattatttctagttggagacactagatagaatagtgggaagatagtaaatcagagatacaattgagataagaaagcacctttaaatttcataactgaattgcctggcttaaatttaattcttgaactgtttatttattttctttaatgtcctggatttttattatgagagtcatgatatgtgacagaagattcatttgcagtgggtttgatctctttaatgtgtatgcgtgtatatttttgatcactgatatagtattgctgtacaaatagcaaacattacagaagttttcaattctcaatttttctttatggctatactaaaagattcatggcagcactgacctggagcaagttacctactgagtaacaataatactaaatgatttgagtcaagttaattatacatactggtagtgaaattaaaagattttcaagccaaactgagcctgaataaacaagacaattatactattcagttgatttcaaagatgagtataatgaaaatttgggggtcagttataaatctgtcagctaggacaataactaattgcatttttctatagcatccagctcatttttttcccaatgaactttaaataatattcatctagcctctagcacctcttttatatatactgggtattcccatagtgtcttcactataattattatttttagagtgtataaccatagccacaattttcctttcttatcactttctcttcaatatcacttctcccttgctgccaatcaatttgattaagctttattttataaccccttcagctattatctgtaagaactgaatatacacatctattctttttatttcctccaaaggatttcctcctcttttaccctgtacatagtagatttctttagatcaaattctacccctaaaaagacatgatgtattttaaaagggtacctgattatattttttaaaataatgcatattactactagcattttgactaaatatccagtgtcctaatttatcttggtcctcccgtcttgatttctgtgcttgcagaattccagtgaaaaataattttatattatttaaagttttagatctgaatttaaaaaccaaaaccagcccctcttgtgtctactatgtaaattcctatgtggatcatacaaaataccttagctatctcttcttccactcatgatgtgatagaaactcattcaagttaataaacctaattttctctagaaattccccagagtctcattgtgaatctgacttgatagctccccatacctcttcctaaaaaatagagatcgccgtgccactccgtccagtggtttgctctgcctgtctttgtcacacatagagttctgctatagcaactcatgaaaggatctgtcttctgtaccagcatcctacctcaaagtgatcaaacctctatgcatttaattcatatttcatatttcatatcaaaatatgccctcagtagtcactgaccccagcagttccacacctcccacctcgtttcagggcctacagtatttctacaatagtcttgacaaccctttcaacccttgtatttagttttcagaaactttgttgacttcttagtttcttttttttttctcctttgacttactataccatgcagggatttaaagtcctttttcaggtcatagtgctttaatttattggtttttttttcctgaaattgtttactgaaattctaaagatcacagatttcagctttcatttgtttttgtatttctttcatcaggttcctttttaatgaactggccatttgtattgtctttaagtcaattatttctcaatcatatctataatctcaaaagcacaaatattttgtttcttcctttgcactagtctggctactaagaagaagtgcgaaaaactataaccaaaaaacaatttgcatttaatttctttccagttattgggactttcagttacttttggaaactcttttcactaaaacaaatgttttaattttaaagtaaacattttggttataaacatgatgccaaagaaagcatttggtagttctaggaagtaacagattgaactgaattaataaaatgaattagtaactggtgattttggagtgtgttctcttggaaaaattcagagagtttaggaaactcaatgttttgcactcatacctgtcctattgtttgagattaagttcaccctttggactttcatactcaaaataggaagactatctgaatcaattattcagttagcagaatctttgtaggcagtgaatatttatcttttgtttctaattgtttgtggaccagatataccttctaggctgctcctgattaagaaaacattttccaaatcttaccatacatatataaatttattatatatataaaatatattattatataaatttattacataaatttattacatataaatttattatatatacatttattacataaatttattatatataaatttatatatatatatatatatatatatatatatatatatatatatatacttttgagatggagtctggctctatcacctaggctggagtgcagtggcatgatcttggctcactgcaacctctgcctcctggttgcaagcgattttcctgtctcagcctccagagtagctagtatcacaggtgcatgccaccgaacctggctaattttcatatttttagtagaggtggggtttcaccatgttggccaggctggtctcaaactcctgagctcaagtgatccacccacctcagcctcccaaagtgctgggattacaggcgtgagccaccacacccggctaccatatttttttttgaattaaggctaatcttctttctcatattaaatatgcatatactcaccactgattatctgacattaacatgagaaaaatattacatctgatatgcaagtctgagcatttatgtaattattaatgggttaaaaaagcagtttccaggccgaggcgggcggatcacgaggtcaggagatcgagaccatcctggctaacatggtgaaaacccgtctctactaaaaatacaaaaaattagccaggcatggtggcgggcacctgtagtgccagctactcgggaggctgaggcaggagaatggcgtgaacccaggaggcggagcttgcagtgagccaagatcgcgccactgcactccagcctgggcgacagagggagactccgtctcaaaaaaaacaaaacaaaacaaaaacaaaaagcggtttccaaatgtataatcctactataaataatatataaatttaaatgtattctttatggagaggcaaaagtaagttattaagagaatattggtttcattatccattggctgtgactctgaacctttatttaagatatgccccatgcccagcaagattttgtcaaatagtgatctgcaaacacaatacatgaatgggacaaaggaataactaacttagtgacactgaccacccaggcgcacttggcaggctgatgaatatagttgttccacttgcacagggtgggaatctatggctctgaagccttgaggcctaggaaaaggtttcagaagccaaagactcgtcaaagtcatagggccacagaaccaaaatgtgcagttcctagacgcaagtgcacgtaaatagtttcaaagtttgttcaactcaactactggcctaagtcttcatccactggtctccagtcttgctttcctcttgcttatttctaaattgctcacatcttcacgataactttcacagtaagcccccacctgttctagttgtcatcaaatctatttgtgaatactcacctttcctcatagactgctacagctttctgatgtctacctgagagtatttggaggaaaaggcagtgtctcccttaggtgtgttttgtgttggagatagccttaccttggtattttttgtaagatctctttcagagtgtgctatcagagaggttagtgagtctggttctggttactagtttgaacatgtgagtgtcatatagtggtgcatttctaaaactacttaggtaggaaatcaaccacaacagctatgcgagtctgaaacaaacctctagaggaaggtctccaatagaggaggctgaaatggggactgtcttggcaaccattgcataactggctacacccctagctaattccagaaaacccagtgacatcatcgatggaaactcaaggatcatggtcttttcaaaggaaactggtgtgactattgcattgttgctgttttaattaaatgaagaatagttttctaatgggcataaatgtggctagaaattgccgataaaaagtatttgtctataaatatttttcatagcatatttttctctaagtagggctcactgatataatttagtacaaaaagtaccaaaactatcaaaacaacataaaggtacaggaaaaggtattgccttattaagggacacaaagaaaaagataaagttataggaaaggggcattggcctcatttattttttcattcattattaaattacttggttacttatttgcttgcctcattagaaccagcctttttccagaaaggacttaaaagaaaggcaattgattgtaatctaatctgtgtgcaggattggaaccttgatgattctgagataggggtttgatgcttctctgaaatgagactttaggaagagaagacccttaaaattggacttagaaattgtatctggacccagccatgtctgccctagtcacttcatgatctcagtctctgctttgcttcctagtgtggggaaaacattgtgaagtcttccttgtggagactaattaaacaatacatgtatagaaagtttgaactctgaaatatgtttcatacatgcaaagcattttcagggaagagtgtgtttcttcacattctccaggactaaaaagagagtggaaatatgcttgtcagaaagagtaaaactgctataaaaattacaatgttcaaactggacgaagaatagatttccatatttattgagtaaggggagagcaggcctggaaacggagggaataccaactagatgaaatgtggcatctgggacaagtaaattaaaatgattcccagccccaggaaaaacccactaaaaacaactgctttttactctatctcattactgagtgagtcacctcagttttgaaatggcacaaagtaatcgaaatgatattttacctgttggtaaggattcattcaagcaagtacatcagtcactgaggtacaaaatgctaaagtatatttttcatgatggaaaagacgaccagcatatgaagggatggatctgatttctctcccccaattcatatttttataacacaaaataaacacatttatttttccattttggaggtaatcacttttgtgtgtatttctcactttattgttcaaatcatgctttttcagttgtctgtgttatccagaggggtagagagatcttgataaacagtgcctgtgtgctccatgcattagctcaatttgatataaataataagtaacattcatggtgacatgaaaatgaaataagatgattgtcattttgcaatctctgttctgctttttagggcattgtagttcattgagtgtttgcagtttgctctcttaagaataaaatcaaaagaaatttgggattcctaagcagaaattcagaaaacggttttgtctttgggaaactgaaatagaagtttcatctttgggaagtaaaggagctacttgttggtatttagcttatgaaatacaaaacaaaaaaaccaaatcacattaggggctaaattgggatttgtaataaatgctatactccaagacctttatctccattatagcaattattcctcaagtgagatttaaataaagttagtggcagaagatattggtggtggtgatattggtgatgaaaagtaaaaattttaaataagctttgcttattacatatacagaaataaggacatgttcattgacactgatgagctcatagtctaatagggcagactgctgcgtgaacactttattgacacttagtgtgatatacacaatgatgtaagatggatgatacatggaaggaaggcatcacgatatggaagaggatagaccatgagaaggaagttgactgaagtgaacagaaagctaatagggtgccgtcagcatttcgagtcttcagagcagtaggccgcatcccaccctgtcaggttagctgttccgacatgaccttgaatgtgttgggttgcctgtgtgggaatgggagtcaggtgaagtggggagatgggccaacagctttctttgaaacaaccaagtttcaggccatctctgaaagagtaggaaaatattttagatgttctgtttgatttaatatatatttaaaattttatggcattactttatatgtatcctgttatctttataacacaattctgtcatagaacttctgccattgggtatcattaggaaattaccagtcattcaggacagaaatttagcattctggacagtagaactttctacctcatggacttggagtttccgacaggtctaaagagatttagtcctttctttaaaaaaaaaaaatacacacacatgcgcgcgcgcacacacacacacacacacacacacacacttggcattttgaaagctataaactaaatagggatatatgaccttactgattttttttccttaatggaaatacgtgtgtgttctagtcattctcattatgcaagtttgaatggattcatctatattttcctcttcacaacactcagtgatcatttctctgagtccgtctcctctctgtcattgctacaccactccatgcagacttttctagactaaagtcaatacattactgacaaacaatcatttcatatgagtcttcacggaacgactggcaaagaaagaaggctatttccagttgtccactcttgcactttctggctgttttagacctggctcaggtctctagaaactcttgatgaatactggcaagaatatgtcgtggatctaggtgaaaatagactgtgttctatttttggaaatttttcccacaggtagaccaattcacaacgtctttatgctgccatggcaactggccactcagccattcggggaatgcttttctctgtattctgaacaaggtatggcaagatgccttttccccttaggtccccttaggaagatgatggaattgccagaacctctacagtaaactgagaatgcaatccatataaaaggataaaactaatgactcaagagtaaaggtctgtcatcttaattttaaaggaatagtcaggttttccctccctccctgcccttgatctcattcagagactggaaagttgaaaggcatggtagaagtgaaatgttatttcatcctagagctccatcaggtcttacctctgggtgttattactgttttcattttctcttagaagaaaactctgatttcaacttttcttaaatgtgttcattatttttccatagaaatctctgcagttcctgtaccatgtagatgagaaggacttttcccagtctggcgcaatgattcctagactaggctttggaacggcctgtgcttacttgacaggttcatccttctgccattcctggtgaaactttatagcatcaactttattaatatccatcaatgtcagtgagcctcttgaaaagggtccagccataaatatcccttggccatacacccccatctttccaaataaaatctaaccttaaatctaatcttaattaaaacagtatatttgctatgaaagtgtagcttgaagacaatgactttagacctctcttatgtagagattctggagtcctcattgctaggaaacccttcactgttctgtccatccccagaacaggacggttactcttcccagttcaggttccaatctgtcagcttagttcctgttctctgtcttggtggcaagccaattctcaagccaccgatagaaagagatattgggccttccctgagcccagtgactgagccattactggacatgggtcccacgttctctcactccctctgttctctgacttttttctttacttgggtatccagggagagctcatcctaacctccagtgctgggatttcacaaaatgaaaataccttaaatatgcaacagtgttagcaaatgaacagcaacagagaaaaatcatttcttccccttttttatctccatcttcaaactttaatttgtaagtaaagaagagaattgatgtgaaaaatgtttaagtgacaagagttctgtacagttggcttcaaaaaaaagttaggcaatgcttaattctaaaaatgcaatttttccttagcagaaagattttgtaacttacataagcacgattgattaagatatggtgtattttttttcgtgagaggagactactgctgttctctatagaaggctaattagtgccaaagatttttaacgtaagttcagaagttgacagagtatagctgaccatgaatccatacagaagaaagaaggagttgggctgcccaaagcaaaaaataatgttgggcacctaaaacgtgcatgtggttttaaaagaaaagttcatttggaaatatctggataggaggaagcagacatcctgtgcctatataaggaaaaaaaaataaatctgtacattattatttccatttttgaaatcattgatgcatttctacgtgcagcaagcatttgtgtgccttgactgaccaagacataaggggggaagatcacgtggctgcctggtgcctgtcagttaaccactaagcagctcgcccattagaattcttgtagacttagacctctgtgttttaagttctttctcagttgcagcctctgcttattccccttcgtcttgctttcatttcatttcagaaaacaactatttttacataaactacaaagtcatagccagcagcatgtgcagcagagacagatagcctgaggttgcccagggacttttcattttatctttgcgcagacctagcactgcctgccaggtaaaactagtgtaacgagggctccggcgtctccaccacgcgtcagccctgccgaggccaagatgagcacgctgataacgcgggctgcctgacagccaggggagattctgtaaatcatgctgctcccattgattacagtcgggaagagcattaaccctccttcaccccaagatacgctgtctccacaagtgtttgtaacatcaacatgttacgggagcttttggaagatgaattcattgctagagagaagaccccttcgcaaaataaagaaatgccaacaagcctgagtattgtctagcacatttctttgaaaccatttttaaagtcacaagtttcatttttgtttcatatcaccaggggcagagagctgctttgaaatccattgatttcagtctgagtggtgttgaacatttttaaaaaggctattggagaagatacactttttaaaggagaagacaggctttttaactagcttttatggtccagaaaaagttctgaggacctaagcgatccggccgattgttctaggtaacagtttcctcctggaacttactatagtttccctttcaattaatctgctatacattttgggtctgtttaggcactgttgagttttcttaggtagtactgtcactttggaaaatcagacttctagtgctcgagggagaaagtgagtcactctttctagcttgaagaccaatccttaattttcttcttaatcctgtcctaaatgagcagatcccttcagcttcactaaataggataatttgaattgcacagttaggagctatttttatcgtcaccacaatgtgtgtttgtcagcacatttttctggttgtttacccaccatggggtgttgggaccatggggtagtggtgacaatgtcgactctgggaccttctgcctgagtttgagcctagctgtacacttcctttctgcctcaattttcttcatctgtaaaatatattattcttatgaggcttacgaggattaattaacataggcaaagcacttagaagagtgctcaattttgtaagtgctcaatacacgttagatttaaaacaaaatgaaacctctggacaaaggaactgtttttgaggagctaaaggtgataaaatacagcatttgctctgaaggaaatggacaagggacacatttagcctaactgtggcccacattgtgggagcagaagatggaaggatgccctcagcacctaggtaggtgagtgcctgccccaattctgttgtcacaggctgacctgctgaccagcacagagattcctgacaatgggttgcacatgcatgcaaacctgcagacctctgggatgcttgctgcggactccctcatcccaaccctctccccttctctcctgttccacattaattctgcactgtagaattttggtgttgatggtggttaccaatagcaacttcagtatccttcaagtatgatatgtagaggaaaccttgttgggaaaacagaggagtgctttctctcctctgtttaagtttcttttggttgcaagcaacagaaaccaactctggctagctctagccaaaaataataataaaaaataaataaataaataaataaaaataaataaatgaataacagaaacaaaaaaagaagctttactagaaggatattagagtatttcatgctatccagggattgaaaaaacaagtctcagcaggacaattgaaccttgaggccaccatatcatggttaaaagcatggattctagagtcaaatcccatctgaatttctatcccagctccttaccttgctatctgtgtgatcacaggccaattctttacctgctctgtgcctcagttttgccatctgaagaatggtgattgataatacccaccttatagtgtggttatgtgaattaaaagaggtagtatttgaaagagcttgggacagtgggatatagtaaatattgcatgaagcctggttaaattagaagtgtgggcaatcttgcaccctcccagaggagcacaaccattgctgggatacagcactgaggactttgtgtctctggagtgattccgattgacccaacctgtgtctgacctcaattatggatcaagatgatgttggttgtcatgaggtgtgaatagggcttctttgggccagtctgccaactggagccaggtgacaggagaaagtgtcctgagcgaaggctttggttttgagcctctcagtcatactgggctgtcactctttttagttcaaaaggaagagtggtcatagaacatttcatttgaaaatagcttatattaataactaacacattgtcaaatacagctaattggaggacacttaattttttctgcagaaataccaagtctcttaaaactctaatatttgaaaggcttaatgagatgcaagtgaaatagcatatggtcttttgctaacagtaaaggaaaaacaattactcaagcagacatgtagctcttagttaatgggaacaaagcaaggcaaaaatgtgtaaagctgttaaaaaatacaccaaatactgggcacatcaccggacagaggaatgcacccttctctcatggatactctgcatctcaacatccggttgatctcctggaagatacaggcttatggtaaaaaggacactttataacaccatgcactaaacatagctaaaagagtttatgttttctaaagtttttttttttttgagatagagtctcgctctgtcacccaggctggagtgcagtggcgtgatctcggctccctgccacctccacctcataggttcaagcgattctcctgcctcagcctcccaagtagctgggattacaggtgcatgccaccacacccggctgatttttgtgtttgtagtagaagacagagttttgccatgttcgccaggctggtttcgaactcctgacctcaggtgatccacctgcctcggccccccacagtgctgggattacaggcatgagccaccgcacccagcctaaagttttgtaatagtgagataatctctgccaggttcttggaggagaaaaattttattatttcattaatacttgtcaaaaatctagtgagcaagcaagggaataaatgacttccttgttgtcttgggagttttgccctctgcctctttctccaagtctcacagttgcagaagaggaccaactacctgaccattggtttggctctaggcatgtacaccataagtcaaataagtctgggaaatactgcatgaaataacacacctcacttcaactcagatttcctgtgcacattggcatattggaggttgagaagtcctgtagtaagctttattattattacattattatttccagttattttctcagactttccaaagcttgttggcctattgagcccattttatcagaataactcttaatatccaaaacccttatttttgtgagtcatagtttgagaattgcccatcttgattaacaaatgtgacttgttaataacactttttaatctgtcctagtttcatcatgacttagctcaggggttggcatcattttcctgtaaaggaccgactagtaaatgcttttggttttgcaggccagatagttgatgtggcaaatattcaactccgccattgtatcagggaacggctatagacatacagaaatgaaagaacatggctgttttgccccaaaactatgtttataaaagcagacagcagaccagatttggcctgtgaccattagtttatggaccctaacttagatgaatagacccattaataaaacctatttttatctgccgaaatctgtgcttttttggcagccttgttcattcttttgagtttttaagagttgtgtcctttcagtctttgcaatggtgaaattgtgaccttagttcatcatttacagttacaggtgactgttcatccaatgtttactttatagatagtattttttcatctgaagtttgcatttacctgctgttattaatcaaactgcaaaatggtaatggactcacttagaccctgggagtcagaagacctggattggattcctgtattactttcaactagttatgtcatttaggccagcttcttttctcagagccttaatttccatatctttcaaaggaaatgcttcagaagaagtccccaccaacccttgggagtggggaaccacccagagtgtgcatgagatgagaggtgaatctgccaacctcacttccagtgcctctgagtgcctctgtgagcctggtgcaggactgaccaggatcctgctggttaaagaaacttactaagtatcccacagttaggtgctaaacaccaggcactacttcatctggccccagcctggaggccttagctgtcaaggataattctgacttttcatgtcgttgaccttaaaactgattgagaactgagttccagtggtctactcctccccagattttcaaagactcttccggctccaatcagaattagtacttccatttattttatattctactttttcactcttcatcggtttataatgtaccttcaaagttggtacttgtgccatctatattacaaacgaagggctaacttaatgaatgcaaattctactccatgtcttgaccaaaaccaaaaaaaagatgcagaaaaggtttatttcctagcacgccatttctctgagggagtggcatctgttgtccctgcatttggccacctgcatttgcttcctttctcctcacagtgctggggggaaggccagtgtgtgacaattggcattctgttactccatgtccctgaaaggcaagtgcctccttggtttggtcttcaaatgcatctggaacactaagggaaaatcgtgtcgttatgcaaatttagggattttctagagtcaaataactacccccaatttctgccttaggcactaactggagagtctcattgctaaagaaaacgaatctcttctggactgcagcctgtccacaacttctccaaacgtgtgcaaatataccgatgctaagctctaggcctcttaaagaaggtaatgaaattcagactaggcgtttctaatttaggctttactctcctttccatgttaacacctaggcctcacttctccacagcaggatgagacaggacagaagcccaaaggctgcaggaagcttgcttctctcttttttcttattcagccctttttctgtcttaatgtgtcctttgtctctgtactcaagtcagccagtgagtgtatcatttatcggctaataagttgtctgacaagatagccactttgtacctaattgttcagtttatttatgtattattgatgagcccagacttgaactctgattcccttggaggctgcttgataaatctcttggctaatcctaaaacactgaattacctgctggagcacaatacgtgacattgcttttactttgtattcctaaaaggccctggatatacatttcaatgtctgggtttaacagtaagaaataaaataggatacataattcaaattgctctttgagcttaaattaaaaaagatataaaacacatccctccaatcacttcctgactctggaggtttattcgatccacgttgcttagagttactttgaactgcatgaactcagtaccaggctgtaatcttacttgcttttccgtggcttcagtttcaaccaatggaattgcataccattgcaaactgaatttgcggactgggagtctgtattctatttctaaatcctgtagtagttttcagtagctaccatgagacaccagcactcagctctaagtaccctgaaggttttcctcatcttttgcaatgcctcctgtgattagtggaaccatgagtacttccctaagtgccctctctgtcctgtctgtttctccatcagtaaatttaagtgacgaccttaagtactatgttttaaaagagtagtgaggatttttaaatgagtttatgaaagtgcactcagactagaacatgccatttagtattgtaaggattaatatttgaacaataatcagagcacataaattatagatcaacactgataattttttgctcattatgagatttattactattgatggacccttataaggcccttggtgctcttgcaagttgaagaaatggaggttttaaaaatgggaggtttcttgcaaatttccaatttgtccatacctggaaaagcccaaagtgtagggaatcatttcataagacattaggacaccattaaccaattcatggaaatacaagaagaaagagatttgtgttcagctgatcatttactactgaagcagatatttgtcagaaaatgtataccagtcctgcctttgtttaacattttgatattttgttaaatttttaaattttaaaaactgtggcaaaatacacataacataaaatttaccatcctaaccactttaagtgtgcaattcagtgtattacatatattcacactgttgtgtaaccaatctccagtacatgtttcatcttgcaaaactgaaagtcaaacaatgactccccattcccttttctacctcctagcccctgacaactgccattctactttctgtctgtataaatattgactactctaggtgcctcatgcaagtggaatcatacagtatttgtcttttattttttattttctgtatctggcttatttcacttatcatagtgttctcaaggttcatccaagttgtagcatgtgttagaatttccttttgaagactgaataatattcccttgtgtatatatgctaccttttgtttatccactcatcagttgttggatatttgagttgcttccaccttttggctgttgtgaataatgccactatggacatgagtatgatatatatatgtatattatatagatagaagatatagatatatatctatatagactatggacatgagtataatatatatgtatattatatagatagttataacatatatagatagaagatatatatctatataatatatagatgtccatagtcaaatatggaccatagttatgtccatagtctatatagactcagttttcaattcttttgattatatacccagaggttaaattactaggtcatatggtaattctgtttaattttttgagaaactgccatcgtgttttctacagccagttgcaccatcttacatgcccaccaataatgcacagggttccaatttctccacatccttattttctgggatttttttagtcaattttttttttttttttttttttttgagacggagtcttgctctgtcgcccaggctggagtgcagtggcgcggtcttggctccctgcaagctccgcctcccgggttcacgccattctccggcctcagcctcccgagtagctgggactacagacgcccgccaccacacccagctaattattttttggatttttagtagagacggggtttcactgtggtgtcgatctcctgaccttgtgatctgcccgcctcggcctcccaaagtgctgggattacgggcgtgagccaccgcgcccgtcctttttagtcaatttttatgatagccatcctaacaggtgtgaaggggtatctccttgtggttatgatttctatttccctaacaattagtggtgttgaacatcttttcatgtgctattggccatttacacatcttctttggagatgcatctgtccaaggtctttacccattttctaatcaggttgtttgtttttgttgttgatttgttggctttctttatatatcctgaatattaaccctttatcagatatatatgatttacaaatattttctcctattctgtgggttgccctttcattctgttgtgtcctttaatgcatataaagttttaatgtcgatttagccccatttatctattttctcttttgttccctgtgttcttggagtcacaccagagaaatcattgccaaatccaatatcgtaaagcttttatccatcagatgggtttttgacatttgtttaaaaaatatggtactaaaatataatttatcttgactagtcagtcctttaccttaagtttttctcctcaggcaaatatgcctcaccctagtacaggctctggatgtcagggacacatatggaataaaccaagtcattcatttgcagtgaagggagcttttcaacctacaggccaaattgcttccatgtgtacattgcaaacccaagtgggaaatttctgaaatatattcactgcatctgatcttgatgcactacagtgttgggcttatccaacactttttacagatgaacctctacagggcaaaagggaggtgattatttcatcagagaatacactcaaaaacatacactggagtgagaataaaggggcactgagaaaaatgtcaccaaaattgatttgacattctaaggtggatggcttaattatttttattcatttgatatttatttgtatggagttctacagattttcagcaattggttttaacaaccatcgtagatgtgtataagtttggcaatatcatgatctcacttttacatatgaagaacttgaaggtcagaaaacttgtctctttattcagatttctgtagcatttaagaggtagaacatggatttgagcctagaagctttaactcgatgccaggggttctttaagtgtggttgctggaccagcagcatcaacattacctgagacatgcaaattctcaggcccctttgctgacctactgactcaaacacatggggacagtccagtagtctgtgtattaacaagcctcctaggagattgctgcatgtcatgtgtggaaaccaccattctacacaatgatgtgtgtataggcactgaactagactcaagtccacagtgtctgctgtcagtgagttcataagctagtagctaaagtacatacatgtgcaaatatttcaggcagacagtgaaactgatgtaggagtaatactaatggagaattttctgattcaaaggagggataaataccactctggtttgagaatcaggaaaggctgcagaagaaggatggttaaaatttggatatttggagataaagtatgacatcaccagccagagggaccatatgaataaatgcagagaggagggaatggtgatgtcacagggcatgcagagcacattggtttggcttcactgagcagacagcagatgtcagaaagctttggatatcagaataagaaggatccattttgttcaattgtcaatgagaagccagggcatatttttgaggaggggagagctatgatcaaggctataacttaaggacattattttcagagttatattgaatggattgcattgagaggaagcaggggatagaagagatcagttaaatgataatggcaacaatctggacaaaaggtgagaagaccatagattgggattgaactggtgggaacaggtgtttgagatctgtaatgtgcaggacttgggatgcaaagaatagagaaggattcataagatacttaaattagaagcttcagtgactaaggagtgtgagtcatgccatcagtaaagatagaggaccagttttagagggaagaagagttgagccttgaacacaatcaacttgagattctgataggcgtctttgatgaagatgtccagcagggcataagaatgaaaagatggagataggcagagtaatcctccccgaaaagatatttgagatcttctctgtagaagggcgctcattcccaagaagagggtgtgtacgccattcctctggggagcactcaggagtaaggaaaggggtgtgggggcataggagagcctgtcttgaagactaggatgaaataaaaggctgagagatccaagtgggaagggctggctgtcagttctgaatgagggaaagagaatgagtataaggagaggagaagacagcacgcaacttcaagagatcaaggggcaagtgagtggttagaagtgcatgcagaggcataccaagttactttgagaagttctgtggtaatggaaaggagagagagaaattagtaacttcagtgggtggttgagtacagagaagagctattggttgattgtttgggtttcattttgttttgttttgtttgtaaggataaaggagaatttgagcctttttgtaggcttaagggggtgatgaaagatgagaaatgacagatggggcaagttaccaggagggatacagttgagagtccaagggaaggattattcttaagaatggagaaaaatctatctctgaagccaaaaagaaagaaggaagaaagagttcagtttccaacaaaaatttggagatgaagaggaggagaattaagggagtttgttcgggtggacttttctgtgcagtaagagaaaaggtgatcattagagaaggtggtaagggattgagtattagaagatcagaaaaaatgtttggaagaggtgaggtggaaaatgtgatggaaactcaacggaaaagatgagcagtaaaactagggcctagataacacagaaaacattattgtatagtggaattaatcagataaatttcatgattatttctggcaatattatgtgattttgaagcagggactaaagaaagtgagagagtgggacttccccaggccaggcgaagggtaaggcagatggagggaaatgaaaaaaaagaaaaccatcaaagatgtcaaaataaagaggcttgtagaaaaagcttgcttgaagtgatgaattctgaaatctagtctacatcttcttggagacagtggaacgacgactagagagaggtagagggattaaaggtaattgggaaggaagatggaagactcaagagaattaaagaatggaagttgtgggagggtaggaagttctaatcagagccagaaattttgcaatttgacatccacagagttcagttctatgtggtaactagttcacattactaccagtgcctacaggaagtcgaactgcagtcattagttaaaactgaagcaacaacaagaaaatgaagctaatttggaaaagatctgcaagagaaatataaaaatcaggaaaggcaataaacagagagaataaagttggaggtgacctagaaaataagagataacaacagttaggagagagaaaatgtggaataagcagatgatgtagactccaaagaggaattaattgagaatggcagtggaatgatgctctggcaggaacgagttctcacctctacctcttgaccagtgagatgggtgagtgggaaggattatctacactggaaaggtggaaacaccttcaaaaaaggtttaagttttatttagaattaggaaagagtgggtagatttgaagaagggcagatccaaatgaattgggccacattagcagttctaagaccttagagggcagggaccacattgccttggtttttttctttccccttccactttgtaggaatatgcctggaacatgagggtggtaacacaaaaatgctgaattaattagtcaatcaatgaatacacttaaaaaatattcaggcaatgaggtaataagagtggggaaagggatacctattcttagtttgtacttgattttaaagaaaaaggttgaaggaaacaaagtttacgagtaggttcaagacactgtgtaaacagaagagtaaatcttagttttttttttcagagtacaccttccagtattggacagatcactgatagccaccacagggcgatgagagaacaggccaagcggcagctcccaggagacagctgatgaggtctctgtagctactgtgttagagaacagtccatacagtgggagaggggagagaagatgggctctccctctatcagattgtctctctttctttctcatatttctctgttcttgttctcaggctttacaactcaagaagctaatgctattgatttaataaggctggcccatctttttaaaatgtaacagctgtattaagctatctaattaccatgaaattcccctgtgttaaatggccaattaaatgattttttattaaatttacagagctatgcaaccatctcccaaatccatttttagaacattttcatcatccccaaaaggtccttcctggatcttttaaatgataaagttaatgtaaagataatagttgcatttgttgagtgcttactatagtctgagctctatcttacgcagtttgtatgtaccaactttctatgctcacaatgacccatgagataggcactattgtctccccattttacagagagaaaaagtgaggcattggtcacatacatagtaagaggtagagtcaagatttgaactcagcacactggctccaaagctgctgcttttagctaccatgttgtattgcttttaatatatactggacatttgagaaacaagacaaaaatcatcatgagaatctatatctctctctgtttccctttatatcatcaatatggagtgagaaatatagcttgaatgcaaaaatatccatatatttacatatatttcccttaagcagctgattctggaaatattgaaaaattacgaataattttatacagaacagaatgaagttgcagtcttggcagttatctggttaacaaattagatcactgagacaaaaagaattctatttgttggtttgaaatatctggtaaggccggacagccatccacattcatcaaattaacaggataattgccaagtgtctactctcctttgttctgtatcaacatagcctgaaacacaaatggaattttcatccaaatgatataaatttagttacttgcaaacattcctggtcactaacctagaaagactattggggatatttggaaatgttcccagaaattcagtttgagtatggaacagcacaagaagtataattgtggcattgcctctttatgaaatcaactactgacattttaatccatgtaaaatcctgtatctacttacagatatttctggaaaggtatcatgtcaaataagcagagcattaaataggcatatcattttctgtaacccttccctaatgttaatttaagaaaaatccaattaatactcagtatggtagggactacaagtaggattttaggctacaggctctatttttagcaatagcatttttcggaggtagatacaggcagcattggctgaaaagaatcctcttagcattaattgtgtccacaaaaaatactttaaaaaattaaaaaccacaagcatagctccttttctgtatgacactacagtggtggatacatgtcattgtacatttgttggaatccataaaatgaacaataccaacagggaaccctaattaatgtaaactacagactgtgggtgataatgatgtatcagtgtagcttcatcagttgtaacaaatggaccaccatgtttatagtgggggaggtagtgtgtgtggagataggagatatatgggaactctgtacattttgctcagttttgctgtgtacctaaagctgctcttaaagtgtagattttttaaaaaactaaccaatatgctattgtaaaaatgaaacctattaatgcatcattttccatctgggaatgtgtttaaatacttaaaacattagataccttatgttgtctaagatggtctaagaccactgtgcgtgcatattccttgcaaaggtgggtcccagaagcatacgaggagtctgtcatttcaaggtttggaaagaacccaaatgaactcctcccagatgtctgccttatgcagattttttcctgtcaacatttctgatttgctgacattgtcttctaattccatgcagactgaagtggctctagactcccgtttctcaaggttattaatctgggagatcatgtactttgtgaatttcctgggactatctaagatcccaggcagatccccttgggctttccactctttcctgagactcctcccccatgcctaccctgttgaaaaaataaaactcataatgttattaacccattaaattgcaattgggatgcaaatacagacatacccccattttattgcacctcaccttcttgtacttcacaagtgttgtgttttttacacattgacagtttgtggctaccccacattaagcaagagtcttttagcgccattttctaacaacaccatgtgctcactctggtctctgtgtcacatttcagtaattctcacatttcaaactttttattattattatatctgtcatggtaatctgtgattagtggtctttgatgttattagtgtaattgttttggggtgtcatgaactgcacctatataagacaatgaacttaattgataaatgtgtgtgttctgaccactgcactgactggccgctctcctatttttccccctctcctcagacctccctattttctgagtcataacaaaattaaaatgggccaattaatagccctacaatggcctccaagtgttaaactgaaaggaagagtctcacatctctcactttaaattaaaaagtagaaatcattaagcttataaagaaggcatgtggcaagccaagctaggccttttgtgccaaacagccaggttgtgaatgcaaaggaaaagtccttaaaggaaattaaaagtgctactcctgtgaacataccaataataagaaagtgaaacagccttattgctgatgtagagaaagttttggtgatctggatagaagatcaaagcagccactgcattcccttaaaccaaggcctaatccagagcaaggccttacctctcttcaattctataaaggttgagataagtgaggaagctgcaaaagaaaagttggaagctagcagaggttggttcatgagtattaaagaaaaacatagttattttcataacataaaagtgtaagttgaaacagcaagtgctgacgtagaagctgcagtaagttattcagaagaactagctaagatcactgatgaaggtggctacactaaacaacagattttcagtatagacaaaactaccttttattggaagaagatgccatctaagactgagagctagagaggagaagttgatgcctggcttcaaaggacaggctgactccattgttaggggttaatacagctggtgatttgcagttgaagccagtgttcatttaccattctgaaaatctagagcctttaagaactgtgctcagtctactctagctggatgacagtacatccttttacagcatggtttgctgaatattttaagcccactgttgagacctactgcttagaaaatgagattccttcccaaccactactaacaaggcacctagtcacccaaaggctctggtggaaatgtacaaggagatgaatgttgttttcgtgcctgttagcataacatccattctgcaacccatggatcgaggagtaaaattttgacttccaagtcttattatttcagaaatacattttgtaagattataggtgccataaataatgattcctttgatggacctgggaaaggtaaagtaaaaaccttctggagatgattttaccattctagttgccattaagaacattcatgatgattcatggaaggtggtcaaaatgtccacattaacaagagtttgaaggacgttgattccaactctcatggatgactttgagggattcaagacttccatagaagcagcaactgtagatgtggtagaaatagcaagataaccaaaattagaagtagagcctaaacatgcgactgaattgctgcaatcttatgataaaattttaatggatgaggagtcttcatatggataagcaaagagagtggtttcttcagatagaatcaccattggtgaaaatgctgtgaacattgttgaaataacaacaaaatatttagaatattatgtaaacttagttgatagagcagcagtaggatttgagataattgactccaattttgacattctactgtaggtagcatgctatcaaacagcatcacatgctgcagagaaatctttcatggaagaaagagtcagtagatgtggcaaacttcatttttttttttttattagacggagtctcactctgtctccaggctagagtgcagtggtgcaatcccggctcactgcaacctccgtgtcccaggttcaagcgattctcttgcctcagcctcctgagaagctgggactacaggcacacgccatcacgcctggctaatttttgtatttttagtagagacggggtttcaccatgttggccaggatggtctcgatctcttgaccttgtgatccacccgcctcggccacccagagtgctgggattacaggattgagccactgcgcctggcctattgtcttattttaagaaattgccacacctaccccagccttcagcagccaccacccctgatcagtcagcagtcatcaacagtaaggcaagaccctccaccagcaaaaagattatgacttgctgaaggctcaggtgattattagcatttcttagcaataaaatgtgttttaattaaggtatgcacatttttagacataattctatcacacacttaatagactgtagtatagtgtaaacataacttgtatgtggactgagaaactaaaaagtttgtgtgatttgctttactttgatatttgctttattgtgatggtctagaacaaaacccacaatatttcctagatatacctgtatacttcctaaaaagtatgaaatacattccaaattaaggacttaattagtttacttgcttttctagaagagaacctggtcatagactcccctttgttagaaaaattgaaacgatgactttatattgctctaaagtagtgtcaatctcccctctctctctctctctctgtgtgggggtgtgtgtgtgtgtgtgtatatatatatcacacacatatacatacatatacacacttattatctatatacacacacatatatacatatacatttctctgtaagtatatataataatatatatctgtaaaatctacatataggtaaacataaattataatgtgtgtatatgtacaactttatacatatatttatatctgaacaatttataattcctgcctgctatctagtaagactacttaaaaaataatgcatactgtgaattacatgtaactactttgtgtacctatgaagaattaccctttttacacagataacatcttgaggggatactcacttgtcctaagaaccgtatggaacatagtagtgaaatttcaattccattcataaaattaatagtgccatctactcagaatactaatgattttaatgaagatgcagcatcttgcaaacaaataattagtttttcgcatgaaaggataaatagaatcctaactaacaaatcggtaatttttcttagagcttttaggttttgatcataacaagtggcagtttttatgtgtagtttgaagaatttattttgttattctatagtcaccgagagtgattataactccaaagtttgtgtaatacagtgtatgtttattttgagttaacagagttgtaagcctgagacaatcaaggctctttgattcttcttttgaacaccacacctaaacacctggaatagtgctaaaggccctagaagagttgggtaattatagcacattgtacaaattacctagtccatatctaagtgattctttaaaaatatatagacttattgccggatttagaatttgagctgtctttattcctaagtgaaacatctcattgttgacctcatctctcaactcacagtttgtcataaaaatgaccaaaaccacaaactcaacccatgacatagacaagggtttctcaacagcagcactgttgacatgagtctggatcattcttttctacagggtctgggcagtgtagggtgtatgggagcatccctggcctctatccactagacgccagaagcatccgtcagtcataacaatcaaaagtacctccagacattgtcaaatgttaagtgccctccccaggctggggtgaaatcactcccatttgaaaaccacttccaggtgaggcacagtggctcacactcgtaattacagcactttgggagggcaaggcaggtgtttcacctgaggtcaggagttcaagaccagcctggtcaacatggtgaaaccccatccctactaaaaacacaaaaattagccaggcatggtggtgcatgactgtcatctcagctactcaagaggttgaggcaggagaattgcttgaacctgggaggcagaggttgcagtgagctgagatcgcgccactacactccagcctgggtgacagagtgagactccatttcaaaaaaaaaaagaaaaccacttctatagaaaatgtgggttgcactgtgtatccctcgtgataattagtattattaaataagagtgagcaaagctatggccaagcaattgaaaaaacaaaaccaaaacaaaactttgaatccacaaagaaccaaggaaatgctaataaccttctaaataatggaattacttatactatatggttaatgcagttggcagtacagaaacccttcataaagtcagcctcacacctcaaggaatattggactaaaaatcagttttcagtggctgctactggataaaacataaaaaggagttttatggagaaaatagcagatgcgtggagcctccgaggctttattcagaatgcatattcacaagcccttttcttttcagtcatctgatagtgtgaaaaggcactgttttttaaaagtactgtttataacctacataaaagttggaaagtacctattttgagaaaccacattagcttttggaaccactaatacaaatggattgttacaaatgcaggttcattgcccgaaaatagaatataatgggatcctgtaaaatatgaattttaaatattagacgtggcatatttcctgtcgtgcatctaaagagctttgttgcctgcattatgtagaatggggaataggtactatatcactttctgaggaaggtcctattagcactgaagaaaaggcaacattgttctgcttttaaaataaaaatctaaaataaatgttggataatttaatcttgttctaatgtttagtttccaccccagtcttacttaactcctgttcttaatacatgcttaagttatttgttgcaagtttaatatctcaaataacgttaaaagatttcttggaaacaagactcgtttatttaaaatgtgcacattctgctcagaactgttccgaaggtattttaagcaatattatcttaaaactacttaatctaacattaatttacttaatggtaaaaagattactttatgcaagaattttttatagcaaatatgaagtgtgcaaaagttattaataatgtaatttttgacagaatgtgaaaaatatgatacagaagagattacataatttctttgatgtgagtattaaatggagcattaattgattactgaaacagcttaagtatctagctaggttatgtaattgttgaactagaacaaaaatggttatacagttcaattaaatacaaagagtgattgttatggataattcaatgcataaaactaataagctatggatactaaaatgttataggagacatatcatcctatgtcgtactactatatttaagtataaccttatattttcatgtcaaactgtctgatatctttcttttatgacaataaattagcccgaagcaattttaatgaaagtaatattgtgtagtttgttatgactgggtaatattttctgtatgaattaagagaagagttcaacagcactttgcattttcagaaaactcctcctgcagttttgtgtggtagtttttaatactgtgctataatagctgtttccctaggtaatctgaaataactttaacgttagccaaataaaaacattgcaagagaaaaatattttgtgcacatacagagtaaataaatgtgtacatatttaaagaatatgcacgtctatgtatgcttacatgcacatatatatatacatataatgatctacaaagttttcatttaattggtgattttaccattattttcttttgtccttttcattactttcctcccattatttcatatttcaggtataactgcatttacataaagataaaaaataatatgtaggctgcgcatggtggctcacgcctgtaatcccagcactttgggaggccaaggcaggtggatcacctaaggtcaggagttcaagaccagcctggccattatggtgaaatcccatctctaccaaaaatacaaaaattagttggtaatggtggtgcatgccggtagtcctagctgctgtggacgctaaggcaagagaattgtttgaacccccggaaggcggaggttgccgtgagttgagatcgcgctgctgtactccagcctaggtgacagaggagagactccatctcaaaaaaaaacaaaacgaaaaaaatctacagataactttccatattaaagaccttttcacaggcaaattgagggcacaccgaatctgattctttccactacttcccgcctattgatctttccaattaatgatggaaacagtcaaataaacttgccatgagggggaagtaccatagtttccatatgtatagtgctttataatttacaaatgctcttgcatgtctcatctaaatctgacataattacgtagagcaagaacaatttttactctcgttcccaagactagtcggctaggaactgtcagaacccagactcttctctgggtctccttatttcaaacccactccatgatagaatctgtcctcattttgtcctattctgccttacctacaagagaagcagagccctgaatttcccacacgccatgtgggcgatgggaaggaaagaacggcagtgtctgccattctagtcgtttttcctcatcgtgctgctacagattcagagcagtgcccacccgcagtttgcttttggcataaaagaacaaaccagtgtgatctggagcagctctagcacaatctgcttattagaacggacccccagaatcaaggaggaggttaaggacttgaccacttggtaccatgaagcttttagccattatctaaactctgaaaaaatgaactacttttcagactatttaaactagagtgactgagtggtctctttagaataggaagatgtggaaaactaaagtaggatctggtttacagaaacttttttccagtatccctggaaaattagctatttccatggacagactttgatttagaaatgaaagaatatggaataaatgttactgcagaataatggaatggtgagatctctgaaatacttttagttgtgacagtattgccctggatttatgtgattcatttaatgtcattgactaaataaaatgtgctaagcctatgctaagtgctagagatagaaatgtaagttaggacggtctctgccctcaaaatgctcatagttcaatataggaaagaggtagtgaagcaacaacagtagaaagagatgtgggctgggataagcacaagatgccttaaagcacagacataggcacagagaaggcacctcaatcatccatgaggtcagggaaggattaccttctggtggtaaggttttccttggctgggagacttcaagtttctgcatgttattcaatcataattagtaatcttacctcctggcactgtcagaagtgttccaagctggaggataaattctatgatcatctaattagtagtaaataaggggagaaatagaaggaagtgggagctggagaagtattttaggcagatgagatgatgggtaagcatagagatggggattatctggtcatatgaaaatcactaagcaaggataaaatgtagagtgacaagagaaaatagagaggtagatgcagacaggagtgatgtcggaaatatttaaaacttaattctccaggactcagttttcttactggtaaaacaacgtggaaactgactgactgtggggttgttgtgaggattaaatgagttaatgcatgtgtgtacctggcatataagtaggcacaaaatgagcatttgttgaatgaatgaatgatatcacattttttatctaggagtatattaatgatcatttaattttaatgtatcaacaagaccatactaggtggtttgtgcctgttagcatcatgtggtgatactttgttctccaaatttttcagcaaaagggcatcacatggtgacattccagaaagtaagacaaggggcaccaatcatctctcacaatgcagaataaataaggctttgagtagaagcaagcatgctgtttccagcaagtcttccagttttggctttgacatgtttctggcaacatatgataaaatggacattgtcaaaggggaggatgaagtatttgaaaaatgctataaaaaatcaaacaggagtggagaatgatctcggtgtagaggagatagaagtgctataagcaaagacactttggaactgaaaatctgaaatacattgaatgcatatgccttgtgaaggggacatcttatgtgtgaagccttaaactaaagcaatgaaaattattctataatcttcataaaaatttagataaatcagcagggaaagttacatgagatcatgaggttttatgaagggcaactaggcaataatgaatataactatgtagtacttgaagatgtaaaaaataaaacattatactccggatatgatgatggattgaaagacttctcagattccttaaaatgcaaaagatatgtaaacagagctttgcttcggttcacaatggacaaatccatactcatactcaatgtcgtgaaggatttgccattgaatccagttatttaaaatgacatgttttcatttagaaaacagaaactctgcaatctgaaaaaataaatgtcaaatatctcttaaaaaatggagtagttctagactgaccctcatgtgtttcaaattggtcaggtttgcctgagcataccaaaataccattccacacctgtcttaccccaggagagtttaatcaccaaaagtctatttctgtcacataattgttatacttagtcacgatgtaatttgtctgagtaataataatagggaagtgagaatctccatcttaataacctgtaccttcttatttgtattttatttttatttgatactaccacttttaatctcaaagttattcaagaatcgtttgtccttggttttttaaaaaagttttaccgtttcaacccactcagtggtcacctaaatacaacttctctgttgttctttttaatacatctgtcattctcttcccataacctttccagtgccttgacttactagtcttattttttgttttgttttgttttgaggttcctagaactgagcatactgttccaaaccagatatgtgtagaaaaatattcttacttttttctctatgcatctatcagatactgaaaaatattcactgtgcttaaaaagaaatagcagcaataaaaggtccaacccccaaaaagtaattactttcatacttttcattccacatctatgttgaatttaggtactgtggtaaatgaggtgagagctgataggatgtggaaataagtgagtttcggcagcaagtttgaatgcacttctcaaatttttccttcgtagatggattcagaaaaaatttgtctaaaacatgaaaagtcagaggagtgttctgaaccaatcatttgaaactgtgctgaatttcaactatacggtatagttttacagctttaatcattacagaatttcagaaattacttgggaattcatttgaaaaagaaggctcctacaaagaagccgaagtctttgctcctcattttctgatatcagacaccctgtggaggcctttttgtaaaatccatatcttcattttattaaacttattttcattaaattcaccagaatggttttatagttaagctttcatccacatattcttttcttaaacaatatataatgaaaatggattgcttggtactgaaagtttagggttaatgaagttttctagaaacttgcatttttttctttcaaatggagtaatgctttcatgatataggcaattcttgtttcttctatttatcactgtttcataagtttgtttctgtctttgcatatggaattaaaatagaatcgatgactctttaatataatgaaagcagaacaaagatggagtgagattagcatagcattgcagttaagagtgttgtcacttactaactggtaccattgggcactattttagttcaggttcccagaaagcagagcctgcagtgaaagcttgagtgttaatgctgggaatgtaagcccagggaaaccagagtgaggggaaagtaagcaaggcagggaggcatggagaagaaaacataagatgtatatttccaagtggccatagctttgcaacaactcatcgctggttgctgggcatgagggacatagaggtgctacagaggacatcatgagccagtccttccatgggacaataggaaatttccctgcactctcagagtatgttacccaaaacctcctcagctccagccaggtgcaaagcttatctatataaattgctgctgtgcttggggacaccttggtttgtagctgtggtggcaatggaagtggtgcctctggaggctacatgggaacagtgtcagctgttcctggaagcaaaggtcagaagcctgagggtcaggcaggctgagcagatctggggagcatgtaactggatccatcacagacaagttactggactcccttgtgttttgtcatctataaaataagagtaataatattacaggattattacaaaaattaaatggcttcatatatttagtgaaattagagagggcctccaaaggaagaagttcaaactggtttgaaccactgtggcatcattatcttacttgtagagcttactaagtgactacttaatactagttaaaagaataacttggccgggtgtggtggctcacgcctgtaatcccagcactttgggaggccgaggagggcagatcacgaggtcaggagatggagaccatcctggctaacacggtgaaaccccgtctctactaaaaatacaaaaaattagccgggcgtggtggcgggcgcccgtagtcccagctactcaggaggctgagacaggagaatggcatgaacccgggaggcagagcttgcagtgagccaagatcgtgccactgcactccagcctgggcgacagagcaagactccatctaaaaaaaaaaaaaaaaaaaagaataacttgaatcataagtttggtgtatttggttaaaaacaaaaaaccaaaaacacaacaatgaaaaacattgcattgtagccttacccttaacagcagagggaaactgtcgtgtttctctcttgagattcatgccatggagccacaggtttaggataaatgcatagtattattattattattgaaaatttcagttttcacagttaacaaaaagaatatctaatattcctccaaataagtatatcactgggacaaaaatgaaaatacaaactcagccccaaagtggagtccagcttctaagttgtgggtctagcactatcttttgcccacccgtggccaagtcttccaagcagccgcactgtacccaggccattcttcctctccataccattcagatctgtagttgagtgtttaccactcaagttcaagtgacaggagcccaatcaagagggattgctcttccctagttcagctctgtgtgctcctgagttggaatgcacatccataaaaagcactagcagagtaactccgctttcttttctttgggtgttgatagcctcggctcagtctggtctctttcctttcagtgtgatccacttctgcagttgtgctgtgctcagaaccagtttcattcagctgggctcagcatggaggcagactgacttaagacttgtatcatcaacaggttcagccttgacactagcagataaatagacacctcttccttctccagtgcctcctgacatcttctcttgagactggtgaggatgtgcagtaagtgtgggggttagctttgctcagttttcactggatctgtgtgactgtgcatgtgaacagcattacaactatgcgtattatcaccctatatttgatgcttaactttcaaaatgctttgcttctaggaaacaacaaagtcttcattgcccaaccttatttcttctgttaccaaaaaaaaaaaaaaaaaaaaaaaaaaaaaaacgatgactcgtaatcttatactgggccaaggaatacaaaaatggaaattttgttttggggatattagcctctctaaaaatgatttattataatgcatcatctaagaaatgtcaaattgaccccctgttataaacatttccatttttagcccttcttttcaaacatcaaagtatcaaatattctttcagaaaacacccagaaatgtaagatttttccctttgtaggcaatacaatgtggtactgtttcatgaattccatgaggctgtttttccccctcagcagcagttttctgattttcttttaatggtttccctaaaatgttcccattttctgtaccagtgccaatgactgatttacacttcacattctatttttgacttttcttgtctttgtggttttggtagcctaatatcgcccatttttgctcgtcattcgctatgttcagatattgctagatttctcctttcaatttttaaataaaagaaataataactacctagtttgaaagctctttgggattatgggtttggttaatatcctctaaaaacaatttcaaaaaactgaagtagaagattataaatgactttttatatgattgcatcccctggtgctttgaaataaaaacacaataaagagtctaaaagcgcttggtcaagaaggctgatcctaggttgatgccatttacatttagatttaaataaatcagcctatttattctttcaaactttgcttcaggttttaaattgagaatacatggaaattaaaagccctagtatgcttagatatattttgaaaagttatgatgcctaaattcagttgacttctaagaataataactgtgatgagcatacggagtaaggaaatgcagttagttatatttaataaatacgattttattgcaatagttactaataatgctcacctaatctgtaatccaggtagagtgaagtggggtcattagaatgtggtaatgtgaatgctgtgccttcaggtctgtagggtgcacacacacacacacacacacacacaccagctacaaatagccattgagtctattcccacttcttatggagatgaagtataaagctgtagtcagagtctgattcctcattttttatgagtgttggagtaaaaagcagtatgtcatagtggaaaactcttctactaagaatccagaccttagttctatccccagctgaaccttataaacaatacaaagtctatttattcaatcatgacatgagagattctgatatgatggtttcaggcctcattctacaagcacacttctaagaccaagagctataattctacttcaagtgacaattgtccacaagcccatggcatggggtgctttctaagattgttgggtcagcaggaggcctgctgagaaccctggaaccagctcctggtcagggtgtggttggacggagctgtgacagtgcagtgataatattaacctgatagggtggggtgggaaaggtcctgtgaatgctgggatcttggcttactcttctcacctgggccctggagtgtgtccaaccacgagatttcaacctcaatgggaatgactacgcctattctgatacacatacgtatttttatttggcagctcaagattctttggagagagggcatacacattttatttatagccaggtctcttgattcctgaccagtctatatgttttatattaaataaaattttattaaataaaaatcctgaggaagaactgaatctaacatttgagtaatggtgccctggccatttctgtactttcttttctttttattcttttttgttgttgttgtcgttgttgttctctttaagggcatctgtgcttatatcagtcttaatccactgtaagactttgagtcacctgccttaaaaagccatcaaaccattctccgaaagctgaaattcatcctcttctcaagtcaccaccttctctagaaagataatatatttaatccagcaaatatgtttcagtttttcttatttaggcaataaacatttccgaagacctattacgtgccagccctaagccatagaggcactaaagataaggaaggtatgcaccattccctctggtggctcccagtctagtggaatcaatcccccaacaaaacctgccctgaaacagagggctgcctaggggagcccagagcctgcagacagcccagccctcactaaggagaggtgaggagtctacaaaacactgcgacaagtgaaagggaaggaaggcattctggacaaagaggtgtgattatgtgggtgggatgaactggaacacaggaagtgggtgtgataggaactgtgagcagagagtctcatagcaaatcaacatggctcttctcctctagaaagcaagtgatagcatgaaataaatacatttgtatattgtaggctccccagaaatacacttttggaggagttctgaatatcctgatagtaatttttaaaagccacctgtattagggtgctccagagaaacaaaaccaactggatggatggatagatgatctatgtatctgtctgtctatctatctacctatctatctatctatctatctatctatatatatatctatctatctatcttctatctatcaaaagagattcagtataaggaattggctgacatgattatggatactgagatgtcccaagacctgcagttagcaagctggagagccaggagaaccgatggtgtagttccagaccgaaagctggcaagtttgaggtccaacaagagccaatgttatttcaagtcatgccccaaaacagtgaaagactgatgtctcacctcaacagtgagtcaggaggaattcatttactctagtcagtccttactgttctagtcaagccttcaactaattggctgaggcccacccaccttggggagagcaatctgctttacccagtctgtcaattcacatgttattctcgctcagaaacaccctcatggacacacccagaagaatgtttgaccaaatacctgggcagcccatggcctagtcaagttgacctatagaattaaccataattccctctctcagttttctgccaggccaaatactaggttgacagctcctcacgacacttaaaaaaattctcacaataccacaaattctggataatatacctgcagcctcaacctcccaggctcaagcagtcctcccaccttagcctcccaagtagctgggaccacagacatgtgccaccacattgggctaagtgtcattgagataatgtcatcactctgctttgataattttttgatgttattttcagaattgatagctaacttatcattatgattcagaatatattgatatgctctggtggtgaagtgcatgggtggctaaaaagccaggggtcctgggtttgcatcccagccctacctctcacaagctatgtagcttgaagcatctagcttaacttatctgtgcctttgtatcttctttcgtaaaatgtaggtaataataatacctaactcttggttttgtgatgcttaaatcagttaatacatgtaaagatacaggtggcaggaacataaaatatacttaaaaatatagttataatgccgatagccacaagtcttttatggtaaaatgctgttttagtcttggctcaatattacctaagtgttggtacttcttgaggaaagagacttcatcaagagcagtaacactgaatgtactcaattagcgtacatgttggatagactcaacccaaaacttcaaagcctttagctggcttgagaacaacaccagatttagaaaatgagttagagaagatgaaatagaaagtaacacatttatagaatatgcacaagcagtggagtatttggttcactccacttcttcggtttagtttgttacagtcagagaaactgtccatattttaaacggttccttggcaccttaacatgaaaaccatttgcaaacaaaccagtgtactccaacagtgggtggagatgaagaaatgcacagtgaggctctttgttaggtcttgagttgttaggagtaacaggcagattggttggggctggcctatctttgtgttgaaaagaattcacctgttcagctgggcatggtggctcatgcctgcaatcccagcactttgggaggctgaggcaggctttgggaggctgaggtcaagagttcaagaccctgcctctactaaaaatacaaaaattagctgggcatggtggtgggcacctgtagtcccagctactcaggaggctgaggcaggagaatcacttgaacctgggaggcggagattgcagtgagctgcgatcgcgccatttcactcagcctgggtgacagagtgaaactccatctcaaaaaaaaaaaaaagagttcacctgttcaatggaaaagcaacctggggtaagtcacttaactccgggttcatgagccagttgacagagcaaccaaaacacccagcttttctttttccacttgtactattttttatttgctctaacaaccacatctttcagtaagtaatttcattctgtttagataagttgttcacataatgtgaaatatatttttagggtgatgtgcgaagaaatcctttgattctctgagcttagtctcgtgagtgcttccatgtctttagggaggtctttatttacagcttatgttgacgtgaattttcagggcacccactctggcaattacagtttagaggctgtgagcgaccctcatgttggtataaccttctgctagcagttcataggtggtggaatgagatgtctatagtacaatattttttatgttcttatataacaccattttttcatagtatatgaagtatgtccataataccatggtttgcaccactatcaataacactattctgtttcaaaaataataattcagacttccaattccccatgtctgaagttagtccaccaatgaaagtatattcagacccagctctgtgaagttattgtgttcatccatttgattattaccttggaaaaattcttcctctaactaaaagagaaatgctttgctcatctatcaagtgactaaaaatagctgaggattaagtctgagtagagtgatgactacttgcaaaaccccaaatactgaaaagtattttgttgttgttattgttgttgttgcttgaactatttgagagttctccaattgtgctgcccctgcgaatttctttctttcatccttttcctaacttgaaaatttgcgtatgaatttctatgcatttttaatacataaattcgatatctgaaatatttcaaaaaggagtatttcattgtgcctgtgtatttttattgttattatcattcttagccatggttgtagtgacacatgctcttttcaaatattattataaagttaaatttttcttaatcagaaggctattatgatgatgccagttttagtctattatgaaaactctgcactttttcttttttgagagctaaactcagaatgcaccgagctgtgccttcgtgtatttttcgttattcttttctttcagaaatcatgccattcatttaatacttcattacaactgaactgcaatatgtatacatggcgtgcaaaatgagccattttgttttaaaacagattgcagatgaaaggaaaccattcatttcttgcttgcttgctgtaattactagagcactaattactccaaatcactgacatccagggtcagtaaggatgacaacagaaacatcaaagatgtggctcgcttgctgtgacagattttccatagtcccagccgcagtattttttatggctactgttttccagtttgatggttaaaaaacaaaacaaaacaaataaaaaccaaacatacccgcagtcaagattgctgaatgtttactattatttcattcgcagtttgacggtgagaacatgtatatgagcatgacagagccgagccaggactatgtgccagccagccaggtgggttaattaatcttctctgccttgtttcaaattgtaattaaacaaattcaaagagttgcattgcaaatgagtagcactatcagtaactgccgcaatcaggaataatcataatttataaacaaagcatttaagccttgtttccagttaatgagatagagctgataaaacgccagagttggcatttgttgaaagatactaccttgtttcctctccagaacgtcaggcagctgttttgccagcatgatctttcctaaacagttgttttacctttaggaaataaagtctttacaggtgcaggatatttgtgcttctgactgtagatgatttaatcattataagctacacgtgtcacaaatagctttaattatcaatggttggggccattttcaacaaaacgtaacgttcgtaacccaaatcccatggccggtggggctagaaggctgctttcacggtctcctggggaggtaaggagtgggggctggggaggagctttcaggccaaaaaacatgatatgattgaaacctttcaagggcacctttgtatacatttcactgggaatagttgacaaggtatttaatcatgagaaatgacaacaaaagtccaatgagaatgtaaatggttacacttataaaagtaaatgtttgactatttatttttagatacttaagtccaggtcctttaattcagcagaacatttaaagccaaattataactgcccttggataccagtataacgtaaaatataagaacattgtaagcaaaaataaataaacgaataagtgaaagcaaggaacagttcacaggggcattttgttgacacaaacttgttttttctagaatggtaaaaaccatggtagattggaatttcatatgttagtaattctaaaataacctcttagtaatgttcaatgcctacatatccacacatatagatttaataactgggagtggttggggaatggggttgggagggagcataaaacttctttttcttcattaaggttgtcagtgaattaaatctaatgtatatgttaaggatgcactctgtgaccaaaatgtctcatacttaactcaaaacagaggcaggcctgcatctccctgaactttgcatttagaagtcattaggattactgccttctctggcagatattctggaaactacacagtattgttcagctgaaaaggtcatcatgaagttcaaagatcctgactacattgccttccattcaactgagctgttcactctaagaatacttttggaaggctgagctttgcatttagaattcttccttaactgaattcatttggctaagtagcctccaagatccataggtagttctgaacaggactgtttgattaaaaaatgaaaaatgttactattaattttcttctaaccatcaatcccaaaactgtactgacaagtttagtattactattagattaaagcaacctggtatcatctctttggtgcctttagggttttgaagtgtaagggctaattgaatttgtttgaaacagtagaaacacaaactcaataaatgatggctgttataaagcagctgctccctcttagagaatcattatgtccgtcttaaagagttttggataaaggattggaaattcagaacatatacatcataatgacttggctccttagattttaaaattcaagtacaatgcataatattaagcccttactgaaatcaaacaactaacattgtttttcttcatatgtcagtcaggagttactaagaatgttttggataccagtgataatttgtaaagaagagccccaaatacttttgtgctttataaagatagggcaggcttgtgatccagaaataaacacttaaaaaaatagtgtagcatatatgaaaatgtttttagaatgtgctgttttaaaatttagactagtgtaagataatacatactctggagaaaaataaacttcacaaattacataagttgaatggccttagctaaattttacacttaacattccttttgtttactgtaatagtgtgtgttcaagaattcattacctggtattcttttagggaattttaatcaatttacccctttaggcaaccataaataagattttagtcatcctgcagggaaaaaaaaaatagttttttccttttcctacataacatcaaacatctgcatagtttagtaatccaagacaacttgcctcatagcatcactcaacaattataattcctgttcaattttcaaatcagtacatgctttgggacttatagactaagttgctaagtagcaacatatggcgcactactgctcctgtgatgttgctgcaagcaaatagcataattctaaacttgaaatgatttttatagaaagccaatgctggaactgctccagaaatggaagtacactgtaaaaattaatgatattcttttagacagtcccaaagggctctttggcactatctactgcatgcattctctacctcttaagctagagtatacaaatccttaaaattttttgcatatagttttgtaactgataggcagcttttaaattgaatataccaccttataataagcctgacaagtatataataaaaactcataagatttccattttactctggcaccattcttggaatattgactgttttctcctatactagctataagtgtgctggtcactcagtgctttaattgaaacatcatttaacttttttcttactgtggttagaattggaaccagcaattcaagatttctttgtgtttccaaaccctggctaaaggcaccttgttgcttaatgcctcctgaactttgtcccgttaagagtttgtgggagaaagtgagtgggctactgaaaggaagccagatgagcagctggtcagaaacccacttctttgccattctgaacttgtcatgtttgattgaggtgacaatatctagaccagaaggatacaaagtagtgatatgtaggatgaacaagtctagagatgtaacttgcaacatgaggactatagttaataatacagtatttagggctgggcgtggtggctcatgcctgtaatcccagcactttgggaggctgaggccgagaatcacttgaggtcaggtttgagaccaacctggccaacatggcgaaaccctgtctctactaaaaatacaaaaattagccaggcatggtggtgtgtgcctgtaatcccagccactccagagtctccactccggaggctgaggcaggagaatcgcttgaacccacgaggtggaggttgcagtgagttgagatcgcaccactgtactttagcctgggcaacagagcaagattatatctcaaaataataataataatatagtatttgggatgtttgctaagtgagtacattttagctgttcttgccacacacacacaaaataggtaactgcaagatgacggatatgttaatttgcttcactatattaactgttttattatctatatgtatatcataacatgttgtacaccctaaatctatacaataaaatgtatcttataaaatatctggacgaatatgccagcaggcagaacaaaacagaggggcattgggcttcccacctcagccctgacttttctccagaattttctcagcccactcagatacgcatgctatggggttctcttatctcccgataaaacttcagcccccttctccagctcctagaataattgtagtacctttcatagtcctttatatgaggctgttgttaagatataaatgttcatctaaattaaatacgtcaaaagaagcagaagtctagttctcttcttcagaactttctacagcactaggttattttatttgatttttcagttttgaagatgtgccatggctttcccccattctttcctcttctgtgtcagtttcaagaatgtcctcttctgccgggcgtggttgctcatgcctgtaatcccagcactttgggaggccgaagtgggcggatcacctgaggtcaggagttcgagaccagcctggccaacatagcaaagccccatctctactaaaaatacaaaaattagctgggcatggtggagtgcacctgtaatcccagctactcgggaggctgaggcaggagaattgcttgaacccaggaggtggaggttgcagtgagccaagatcacgccactgcactccagccaaggtgacagaaggagactctgtctcaaaaaaaaaaaaaaaaaaaagtgtccttttccacggctgcctgtttgttcattctgtgttttccaccagtgccctggactcagggactcagctcttcacatgcctgcctcagttgaagtactgtatgaaaagataaagaaggactggtctttttaatacaagaaataatcctttcatattaaggaagaatgagaagattttcctggcatcaggttatggaaaagctcaggttacttgattgaactagatttttaataaatcacttcctcttggaccttggactttactctgctaaaccatttccttctgtttggttcccctgccttgcttccttcattccctccctccttccccaccaccttcctgcttttattcctttcttccttcttctttccgtgaacggttatcccttaagcttgaactattttttgttgttcattatgagcattatagtaaaccctaaatattaaatatcctggcccgagatcatattttagaggattctgagattgtgagcagttttctctctcccgacccccagcaccctctggaattctgtctctttcttacttgatccctcaaatctcaagattaaaaataagaatgataaaatatagcaatattatgttttcctggaatcagttacaactaagcatttgacatacagttcctaaagtacattttgaatataaaattgaagagcatgtatatatccaggacagctttcatgtgaatttaaggtttgatttctacctccactgggcccctgttgctgatagcagctcaaattcaacatattagttcatcaaaccacaactcatcacctcccacctgcttcctcacccactatcttctcttttttctttatggcttataatcagaagtgttaacaccacctgttcaaacacccaaaacagagacttggggagtctcccttgtcattctgcctttggttaattccaaatagtgttgattctactttttggcctaactcttgagtccagagagtgttgattctactttttggcctaactcttgagtacatctcctcttttccagctacacaatttctgcctttgttataggactcacagtttctcatgaactcatcttaccttctctcatttccttttcctcatctttgctgcctcaccattgtctacaaggctgctttatcatggtgtgtatttgtccctgggtggcacatggcacactgacatcaccaggaatgtccttgtcttgctcacctgattgtgagctcttgaaggtaggactcattcttgtttctgtctggctctcctgtgcctggaataatgtctgacatatcagaggtatgctgcattgtttgttgaaagataagcaaatcaactaaaatattttatgtacattttttaatcacatgaatacttagagtcttccattgcaacgattcaattcttgaccctgcattgcagacatttagcaaatccagccctgccctgtccattgcagtaggaacctttatctttgtgtcagtgcccttatatattaacagaaggttatagcactccctcctccttggagaattatttcaagtacaagactcaaagagttaacatgataataaactagataatgacagtcaatgcttattacaataacatcatgctgttgtttatcatcagcaatgcaatggtattggaaacagtagtgtgctccaaatttctttttgtacaatattctctcaaatctactgttagaattatgttttaagatttacaaagaaattaatgactctctatttgtttaatttcatgttttcctaacgagaaaattctccaggttagagtataaatgaggtatgacaaaaagggcctagaaagtatatttttagaatactttcaaaaaaaaaaggtatctttactgtgggccataacgtctccatgttgattgtgacataaatttgaactgtaaattaaaccaattccttttggattagttccttttggcagaaatttcagaagtaacattaacttgactttttgaccattgacccaatagaatgataaagctgccatgctctgagtaatcgagttagcccaacaaagtctggcatcttaacaagcccagactagttactcaaaccagtcttcagtgtaacattcaaatgattactctgtgcagtcccggaggtattcattacagacaaaattgctcttgttgccttgcatacaagctgagttttcaatgggaaatgaaaggatgcctggaaaaataggccacctaattaagttaaactactctagcatttggcttgacatcttcattactcaaaattaaaaagatgcttcacttgagcacacaagttactattgtttatgttgttttcttcctaaattggcttcttacatggaagtctgtttttcagcattatatcttgaaatagctcacatatttcttacagtttataaaaatgtcttaagagctgtatggatactgaatacaggcaccatacaaatatatatcttagggcttgggatagtcaaacacacattggcctttctgcttattttgttggccaaccacattgatgttgttgaactttaggtaattcttgacccatccagcctttattattattatttattattattattttagttgggtattgactccattagctaaaatgatcatctacatgaaaatatgaattcctaaaaaaaaagtaaataggccataatatttaaactgaaattcatttgtccaggaaaagtgttttatatcaacctcgccagcggatgagctattttaggaacattttaaaacataaacacatgtagagcacaccatctactgattgccagtttctactcattgacactaatgaggctgctgatgggttaaatgttgtgtatcatatacatttccaagctgtgggatttgtgaatataaggttcattttttatttgtttctgggtaggtgtgagaattttagaataaatgtcaaatagtatgttttgtcaagtattagggaaatgtatttcagtgacaaaaatcatgaaaatatctgaatggaatagcattagtggtaaaaacagattctcaaaaccttgcactccatatggagcatggtttattcaatagacagatgtcaagtgatgccagcatatttaggcattggagggaggagttgtagcactactgcagtctgaccagttgtgtggtagcatttgataaattttgaaagcagccatttggcttgtttacaattatattttgaactattttcttctttagcatgtgaacaattattaaaaactaaatgatccttcctgttaaattttgcaattataacatgttgtattcttttctggtagcgcataataaacctgtcactaaagaatgccctccaaaataagtataatacttcaatttaagaatagtaatgtgttgaataatgtcacctgtctatgctagttccatttccaaggtgcttaaagattgttctaaagaaacactaaattttcaatatgtcattatgttaagtagaagcagttttgcccatttttactataaaaaacagtggggcttagaaaagctaaggtgttttccacctaccccagtgtcttctgagacctcctcctgtgtatcctcacctgccacttcaaacacctttaaaaaagtgccaagtttccctctgcagtttcagttcctcagtttgggagcagacctagctagacttcccagaaacacaaagagggttttagtgtaatcttcgtccatatctgtattttttctttctcctgtgttctttctgatctatattattttacagtttgagtgtttaaaaatgtaactataaccctaatgatttgaaattaattggtggctatcttagaaaatgttctccctacatcctttgctgttcttaaattaggatatttgatgctgtcagtagcaaagccaaacaagtgacttccaaggcccagcatcagattattcaaatgtgatagcctgatctgaaattcccaagggttccgatggtcatgatttaagaccagtaacgaaggctttcctgtttgcaactgggcctcccagcatttcaggggaggccttccttcaagaagagctaagcctactgtttgttgttgttctccaaaatcacaaagagagtaaccttggaggaaatgggagtgggggaaaatagggatgccaggtgagaccgggtcaacagaaattgccttcaaggaagcctggacttccctgtactatgggtgcaaagttttttttttatttcttgtgctctgacctcaatgaaacttcttgctttgaaagatgatgataaatttcagtagtaggaagcttcttcttgcctggaagtttaggtcagtaccctcctcccccagtgtcctgaaataattagatttataataataatagctctcagttggaagctacctgtttctgacaaggaactaaacaaaatctatgcacttattttttcatttgatccttacaacaattcagtgaggattagagaggtagagtgacttaaccagacctcaaaaagatagtaaatattagagctaggattctgaccttggaaggtctaaggcttctgtcaaactccatccttggtcagctaggcttaattttattttagaactttaaggacaaaatgttgacatacttcaattctagagtattgagataacggcaatgtgttacgtgtgtgagaatactctgggaaatattagcttacgccaaatgaaatcatggctattttaccatttcttagttacaaagcagtaatttcatacttgtgcacatataaaagctgaacaatcacacagtggatatttgctgtccctggattccttgatgcagagcagtgattcctccctccccttgtcagccagcttttgccatgcctgcaccaccgctgcccagtcctttccctccacactccactacttttcttgtccaagtccaggactcttttcccacccaagttctcttccttttcccctccagaagataaactacaggaagtctttccacagaagacatctcaccctccctccactctttcctagaaatcccacttctggggaactgaacatcgagggttcttatcgtcattaaactgggggaaattgtcttcattttttcaactatttttttccacatccctatcttcagcataagctttctttgtaggaaagatctagcaagtgagatgacctccagtatttagagagatgcacttacaattcttccctgggagtaggattgcatatcagcatgtgatgagtagaaatgggagcttctttttctcttttctggaccccttgattgaggaggcaaaccaagagcacaggctttctgttagctctggtcctccgctaatttggcttctttatgcagaatgtgagtttgcacccagcatttgttgatttctactcaagagacaaaataaaaatgattggccataaatagacacgtacagcatgtatttttatatgtatatatgaactatacacatgtaattgtatattacacgtgtatatgaactatacacatgtaattgtatattacacgtgtatatgaactatacacatgtaattgtatattacacgtgtatatgaactatacacatgtaattgtatattacacgtgtatatgaactatacacatgtaattgtatattacacgtgtatatgaactatacacatgtaattgtatattacacgtgtatatgaactatacacatgtaattgtatattacacgtgtatatgaactatacacatgtaattgtatattacacgtgtatatgaactatacacatgtaattgtatattacacgtgtatatgaactatacacatgtaattgtatattatatgtgtatatgaaatatacacatataaaaatatatatattttatatacatatagaaagagcccaacactgaatgctcaactccatgctggttgcctgcatatggcttagcaaatagaacctagccataagcaaaaatcaatttaacacatttcttttaaaaaataaaaatttattaaaacttaaaggctgcacatgatttaaaatagtatattaaaacctaataaattgcaatcaattgttaacagtaaaaaatatctatttaattttttttgggattctcatctgcccaactagttctataaatgcaggcaaataatttaacctctctggacctcatttttctcatatgcaaagttcagggacgatttcttaggtttcttcttgagcaagcattctatgattccatttgagcataagtagagaactatagaatgttatcctaaggaaataagtggattaagttatttgtcatggtgtggtttgcaacagcaatatccgaaacatcctaaatgttcaaaatagagaactgatagaataaatgaaagaacatgaatgcaatgcaatatgcaaccatttaaacactaatgttgataatatttattggcatggaaaattattcacagtccattttaagtcatcacattaagtgataataaaaatatagctaacatttattgattgcttctttgaaccagtgtattactcaaagtatttacatgatctcatttgtcttatttaatcctgatatatccttaatgaattggagactatcatcatccctattttatagctttggaaactgaggcttagagaaattaagtaaatacatctactaagggatgagctgagatctgtattcagcatttccagctccaaaatccaagctcaattatctgacttttgttatggaaaacaaaaacaaaagctcaaaaccaactagcaaatatgcactaaaaagaatctcgaaagacacacattttaatgttttgctcctgagtggttggattaaaggtgatttttttttcctatgtatattttctaatttttttaagctagttaacatgggttatttataaaataaagccaaaaaatatagaactggatctcagaatgtacgaactcaatatgagaattgaaaaagtctagatgactaaaaaaaatagattgcattatgtataaaattatatgctgaatgatgaaattaaatacttcagttacccctttaaacattgaatatggaagatgatctagcactaaaaaacatgtcctgactaactttcagaagtggctcctttcacttgaatctggtctctctaatgatttgtttatggtttggagggggagtacattatttgttttccaaaagcttggggatttttttagccaaaggagaggcccttatttatgacaattacgtacaatgcctggtatgaaaattccccctaaaaatactgcttggagacttatgtagacccccaagcaatactgagaggagacaaatcccttccccattctggtatcattaatgaattatggcgggagaaagccctgcatgtaaacactaaggactttcctggaagtatgtggagagagaggcagatagtattagggctaccctgccccaccctcatttgatctgcttcaggtgcttagcccagggttccagtaatccctgaatcctcaaagcctcagctggcaaaccctgacctcagggtcccccagcccaggtcccaggaagagccagtgtcagacattctctggggcaggttcaagttgacctcgtgttctggtgtcactccggctttgcacactggcttttcataagtgaaattttaccttactccccagttccagaagaggcctgcattgagcctagtagcctgaagtttgctttgattggtgggaccagtcttgcccttgaccttatcttagaggttgaaggcctgaccttgctgttgaacctgcatgctattgcctggacagcagcctggacagtagcctggacttgctcatttgtcagttttgtggtcctcccctgatcacttatcgcatcttggcagaagtgtctgatctttaggccctgatatcagtgtaaatctgcttatagcaatcccttgatcatcccagcttcaagtaattctttttgtttacactctgatatcacttagtttgacacttcaaatatactgttctttattgagagcctaagttcccatttctctcttctaattcactatctttataacaaactgtgtcttttttttcctagtatagagagatttttattggacttatgcaaataaccatatcgccataagaacactcacagtttttgaattctggaggaattaagtaatgtaataaaacatttttatctttgtttataaaattatactttaccaaattgctgtaaattacatatagctgaagagagaaaattttcttaaatctagaagacaaaacatttgaataaaggaccaacaatattttaaataaaagtataaaaacctgatcttgatcagttattcaatctcatataatcaacttttgttctgcttaatctctgagtcatttcatgactccatcaaattctttatgagagttctagaaattttatgtagcctatggatcttaaaattatctgaaatttgtattgaagagaacttggagtctttctcatgaatctgattgtaaatgtttttagagaagaataaaaaacaataatgctacatgactaaaacttagaatagcatggttaaaaagctgatgaaagcttacaattgacaaatattcaattctttttattatatataacattttaagataaccaggtttatgactgacaacacactgaatttctataaatttatatgatttttgaaacatgtacatcaacaaatacccataaatgcaactaaaagaagatctagtatcacctataatttgccagtgtttcttacgcaattttataaataagcctgattctttaaatctttacaaaatgagagctatatcttttgatgtttttcacaaactgtgtctttcggttctttgtatctcagatcactctttgcaggatgcttacacatagtaggtatatgacaatgcttctgtaacaaatgaggcactcattgctttttatttaacaccagttaaaaaaattaatgagcacaaataaatgtcatactttctaccaaaaatttcattttgataactgttgcttgaaaaattagtacattgtgtgtttttaaatgaagatgatttattgctattgtctaaagcatgaagaaagacaaaaaaattgtttgcaggatcattggcttgagcatatatcaatggcactgttggacaattcttgctgagcgttaagatgatttatggaacagaccgaagctttccacagtaatacattatagtcccaagctatcaacccttgttcatgcagagacaaaagaatctgaaaaatacttactcctgaaggtcttctcaaaagaaatcagagattatattgacacaatttaaactctttcaggaaaaatcaccattacatgtaatatctttacttctaaaaatgtacagaggaagcttattatttttctaataaacttctcagtttaatttgctttcccttcagttctctgaatcatgcaacaggaatgtttaataatagaagatgaaacatgtttaaacattggcattcttctatccttaagtttcaggaattatgttacagattaaaaattagtgcattatgtatatgtttgatggcagtactatttatttatctttcaaatacagttctatatgagaaacatatttgacaaagttataaccatagccatatttttagtgtatgcatgattgcatgaatccatcacataatttaaagatacatacgagatgatatcttttgaattcttctgagttatgggacttcttgtcaccaaagataaagtgctctgtataatgattgcaatatgtggacagagactcacaaatacaatgcctctctggtagagaaactagattttgaaaagagaagaaaaggcaacgtttaaaagagatttcccattatttattcctggttagcatatattaacactctctctgggccgtatgaaaacatgaattctctgtagtcaaaagaaaagtcagcataattaacattccatttccagatgttgtcatatagaataagaatataggaactggctgtagcaaaaggaaatgtggactgcagaagagaaaataatgtaaacaggatactcagatcatggaacatgtaaagcagtatgattaaaaaggaatgtgagtatgtcattaaacaggcaggggaaatgagatctcccagaatcaggtgagaagtttccttttctactgaaatgggagtctgggaaggttggacttcagggaaggactttggctttagtgaaatggctgaaaaggcatccaagcagatcaaaccaaagcaaatcagaaggatccactattactttcccaatctcagtctcttgattccattaatagtctcaaaagtgagcctctaattagcaatttgacctccttgccaagaattgcccagagaagttcgcttttctaaggacacagccagtatgttagaaagtatagcttttgtacaaatttagacagtgacattctggttcagaaattcattcgccttttagttgggttggtaggagttgaactgtgagaaccagatcagccagagctgcaggcccaccagcagagctccccgaaggagcaaagttgttgggcctctgcacatgcagtaattcttggcaccttccacttcctttgccaccctgttccccaccatctttttattccttaacttaaaaagtgcaatttaattccgttagaataaaggtgaagccttaacctagctatttatggggagcaaataaataaatacattaggtatgaacgggtttacacttttctccactatgaggcctaatcaatggcaaatatactgaaattcctttataatgacattgtggagaatggatctaaatcttctgtactgtctacagttgtttgttttgttggacatgacccaacccatggcatgtataaatccgtttaacagtaaccgtagctatataaagccattgtttatccagaactttgtatctggcaaacacatattattaggctttttacatatgtttttgtttttaatgcttataagaaccccgtggtttttaagcttgctgcagaacccaaattaatatgtggtttaaaggacttggaagcagaccttgtccattgggcttcaaagcctcaattcttggcaacatgcacagtggccattcttaacagtcactgaagaagtcatgcgtattctcgcctagtccaacatctgtctccttctcatcagagaaagatgtagcactttataagctaaatgtgcgattaccaaattttaaggttttaagaaaatgacttgaaatagtaattgactctctattatagaaccatagaaatactcttgaggttggtaatattttgaaattactactttaatgctcccaacagttcccttgtgggcttgaaaagttcatctattttccagaattaaccatgcctcatggtagttcactccactctaacccacattcagtggcgctgggatcctgcttcccatccgcagagtgatgcacagtgcctcttgcgctggaacacaagagtcctgttgcgtagctcagcactagcaacacctcgcgactctcttgtgtcttgaaccagggagtagcttaagatcagggagaagctggttaagtaacagtaatataattttgagttctttgaatcatgtgcatcatttagactgcctctggtttagaacaaatcactctgtatgctaatatgtttccaatttaccttgagttaatatggtgaagattcaagataaaattaaaagtgttggcctgattttcaccctgtagtccctaaatactttttctccatttgtgtaagatggtcattgctgactttcagcattggttggggaagagggagctcgcatggttcatgctgctgttcaggttccaatctctgaactgggatgggtacatgtcactataaaatgtgatgaagaagatgataccacctttgaaaatctatacctggcctccctcagcattctagactggaacccagactcataggacttccaaggacatgtgattcactccttggtggcctctaatttgtttgtttttttttttttttagaaaaaaaaaaaagtagtcctcttgtctcctgggcatctggggatcatcttggaaaggaccaagtgatctttgttcccaagagagttggagaatgaatgatctgtaaactccaggcctcactgagtcttgagggagggaaataagcccaagtcagaaaaggaacctgctggaataagtggacatgtgtaccaggtcccctgtatcacccaggcatggccttcacataagccttctctgacaattcagcccctgatctcatcactcatataccttcttgtggtctaatcagggcttctcttctggccaggcatgggcatcagaactgctgctgtgacttccttcacgtgccccagcagtcacccaaggggccctgatatcctacctgccatgggggttaggctccatagcttctgagagccagagggccacaaactctcctttacgaatcctctgaaatctctgtgtcactatgggataggaggtaccagtcacttcaggggatcagagcagcagtcagagaggaattatattggtcacttttgcattgtaataaaggaatacctgagactgggtgatttacaaagaaaagatgtttaggtggctcacagttctgcaggctgttacaagcatcacaccagcatctgctcaacttctggtgaggcttcaggaaacttctactggtggtggaaggtgaagggggagcagatgtgttacatggtgagagaagaagcaagagagatgggaggaggcaccagtctctttttaacaattggatctgtgtgagcaagcaagaactcactcgttacttggtgaggagggaatagggaaaatattgaatcatattctattgtataacatcccccaaaactgcaaattgtctaaattataaaactattgttaagttaaatgtatctttattttttaaaaatcaaaataaagctctcatgtcatagaaaccaatgatgaagaattagcaaattcatttccacattaaaaaataataagtaattagcctggcattgaacttgttctaagttctgggacattttggcatttatacaattaccactatacttttatatggcatcaattacactgtaataggctcatggcaaataagcatatcatgatttctaatataaagaacagaaactactaagtaaccttagtagttaaaattcttgatccacataactagctattaccagttaagttgtggaatctgtggttttggtgtatagttgtctgaattaaatacattaatgtgtaattacatgaaaataaaccatgtagcttaactcaattgcaatacaattgttatcactgaatgtaaagtgataccaattaaaccttcttttaaacaccacaaattaagaattaactactgaagaaaccctagagtgtaaagtggtggtctactataggtggattatcccttagtattttcagagatttaatggcattcctaaaattaaaaacatctttctccattattgctggcattagttgtgccttattcaggagaatttctttctcttttctctttttttttttttttttgagacagagtcttgctctgtcaccccacgctggagtgtcgtggcacgctctcagctcaccgcaacctccgcttcctgggttcaagtaattctcctgcctcagcctcccgagtagctgggactacaggcatgcgccaccacacccggctaatttttgtatttttaatagagatggggtttcaccatattgaccaggctggtctcaaactcctgacctcaagtgatctgcccacctcagcctcccaaaatgctaggattacaggtatgagccaccgcgccccgccaggagagtttcaaacaggcactaattaacttcttaaaagatagatgtcaacaattcagcatttgcagtgttgacagacaaattatgaaatctatgttcatataatttcagtgggtgggcaacggggtggaatttgggaaaggaaaggcctgatattaatgctaatactattacttaaattatgaaattttgtttattggaaacagttgggtgttggcaattttgtatcattcaacctaataagatagtagcaattaaactactttataaatagcatagcaataaaaatgccatcttttatgatatatttatccctcatgtgtattgagttgatcttttccaagctgagtgaacttggacaagttatttaatttctgagtctcaattttctcttcaggaaactgggggtaataatagctacacaatggattactataatggttaaatggaggcaacatagtcaaagaccttggtacagtgctttaatatgaaatagacatctctcccacctccccattaggcatcttttatgcttatatgcatacttgtacaaggaaccaatggcttagatctgtaagggtctaaagtatatcagacgagtgagaatttcatcaaacttgtaattttgacacagcacatacatatttttcacatgggatacatattgttaacaggagaatttggtaacaagtgattgaacttctagagctggtgatttttttagcagaactttagatatttaagaaaaattatctgcatataacagtcaaatttttcccttcatacaccccctgtctctaacctacatgtgctgctctatgaccaggtctaaattccagatgttccaagtagctcttcatttagtcttgtcttctgatggcacctaaacaaatatatcaaaacttgtacaacatttagaaagtggaacttgaagattttctttctgttagacaaatagacgccatctggaaaaaataaccccaggcgcttggacacaggagcatgacgcttattggctggacaccatatgaataccttacactactttatttggctcccacccttgcctgctcatttcaaatcttgcacacttgagcaggcactgggctgttagacaagggaatccttgtcacccatacacccaaacactatgaaggctcactcttaatttgaaagataagcttgcgagaattatctggaccgaaacgtttcctttcatactgtgacacctgttctatgaaggactgctatatatcactgtgtatttaatattaattggtaacgatgtttgattttttatttcttccatgtatttttcaacatttaccacattccatttcaaacaggcatgtcctcacataatctttccttcctgttcccctccctccctttctattttatctaatgctagtttgtaaaagaaaaaaaaaaacccacatatgttaatgctatttattttactgctggcttttattccagaattagtattataataatattagtactattttgtctttcaaaatggacagaactgaatttaaatatttgcaatattatttgtcagctcttaggaggaaatcaagtaaatcttattggaaatcataaaagtaatcttcactttgattttgatgataagatctttgcgataaaaatagctcttaatggcattttcttcatatatcacactttcagtggaactacacttttatgcagcatgtttaagtcgcttcttttctacgacattttcttttgtcaattgtgagcaggtagcctttcaaaacccaaaagcaattgcccagaacttctggaattcgtttttattacatcccatgatctgagcagtagggagccccgtgaaacatgtttgatcaaacgttaattttataaattgccttccttccgtacaattcccatgaaagaggtattcagctagattaaaactctggaaaattttaatgggaactttgaaatctgtttgagttcagctttttggaaaaataaaaccacctaatggaagtggtctttatacgagaagtggatctgcctttgaggcaattttctttcatgcataatgatgaaatggcagcaggataatctgaaggtttgaaatgtctttgccaaatccatatgctgcttgtaataatatctaaagggtcaagtgtttgatatgatgatgaagagcaagaagatgataatttgcaacaatgtcacttttgtcttttcacagtcctaccctggtccaagcctggaaagtgaagacttcaacattccaccaattactcctccttccctcccagaccactcgctggtgcacctgaatgaagttgagtctggttaccattctctgtgtcaccccatgaaccataatggcctgctaccatttcatccacaaaacatggacctccctgaaatcacagtctccaatatgctgggccaggatggaacactgctttctaattccatttctgtggtaagaatctgcttacctgtttgtggtgggggctgagggataccataaggacaaggaccaagttcatgcgagggcctggcattgtgataatagcattctgaaactgtttctagctgtggagacagttatttataaatcatacacatttctaaagcaatgttctattttatatttaagtcaaggtaaaatcaattaattacttgtgcagtcactcgtatttatgacccaaagtactaaatattgtttgacactgaatgtgctgtcatagagtcaaaccggcttaccagctttcagagaaaaagtcatcttgaaagatgccacctctcatccagtggaggattcctccccaaaagggagatccccacatcttctgaactgcagctgctgttaaccttgattttccttcctattttcggctctcaatttccacaaatgtataccataggaaggtaagaaaaaatttttcagttttattttggaggtataattctggtgatcaaaatttatctccattaaagtattgcagtctactggacctgttgtctaacaatttataatgacaacactatgaattcccattaatttttcaaatttaataagaatgtgtatcaaccagcaaactagcaaaaaatcaaattctcaggctctacccagggagtccagtggtttgtatattttacaagcatcccatacttgagaaacactggcttattataaaatctttccttctgatttttatgtcatctgaaacttaataatttctctgtctataccccaatagtggaaaaaaaaatcagtagtagatggccaaggagagagctttagaccatgtcataaaaccctcctcccaggtttacagtggcttttaattagcactttttggttttcattgttcactcacttaacagtccaactaactctcttgtcattttcataagtcatcgaacagtactgtcattttcacaatgaataaattaattaacttgccaatattaaaaaacacatttcatattatcacttatctaaatcattgggggatatatctctaacttgagtgattttgcaggatgacttttctgttaatcatgaacataagggtggaataaaagtagagtcaaaagaaactccaaagtagtttctttagagaatgaaacccagagcctactgcctaatacacaatggtgtatagaattttcctaaaatctggcagccatctgggcagccaagaggggagactcattggcagcaccatcactcaggtttttagattatattccacttgtatagatttagcttatgagtattaagtatgactccataaatagaaaatggattttttttaacgtgctaaatgtgtaaagctgaaaaatgtatttcagtgtagtcaccttgaaaaatcacctgcctacttctctttgggactaagccttcagacccaattcatgagccaaagaaggcattcaggtcatgcctctgtagggacccctgttccctagagaggagaagaagggggcgttcagtatgcatggaaaatgccagttttgttctctaggcttattccccatggtaggagtgagattggggccataggaaggataatgagatattcaattatatagttcaagtctttttcctttataaaatttacctcctttctagtaacaaatttaccctccttagcatttctacatccatctcaatacacctttaagagacgtcactcttaaacaaatgcttatgcaatgtcagtaactgtggctcagagattttttccagatttgctgcccatggcagtcatgccatcctcaaatggcacatttgggactggactcagtcacagccacaagataggccattttcatgtccattcccactgtcccttcctctttccctatcaggagcttccttctgttcataaaatttccttatgctctctgcccaccaacctactgtcaaaaactggactttgataattttgcctcaacatgatgtttccctaggaactttcaacactttgcagggtataggggaaacaaatctactatttggcctaagataaaggaatgaagctctgatttgctattctagttcttgaagatgagcctgtttgggattttcatagggtggcaagccttcccagtacccctcaagctacattctggagctgcacgtctcctgtgcctcctcacagcactggtcctagcctttaatgctgcaagcaaaaagcgactccagcaaatgcccgtgttggtgagacagtgggtaaggttcagcacttcccagtggaatgtggtgtgacgatggagctcttctataatctgtgctgtccaacagcagtagtcactggctattaaatgtggctagtgggactgagggaccaatttttcattttattttattttaattactttacagttaagtagccgcattcacccagcagctactgtgttagagagtataggtctcgttaatgatgttgattctagcattaagtctatattaagcccaatttttccaggccagcatggtctcagagaaagaagatttggagattaaatttgttgtttctgtttctcaaggcttggggatctctggctggattccagaagccagagtctgatacactataaagttgcaatagaaatctaataaagttggaagaatcaggagctatcttttgtctactaattcctgtgagaaacaaagagcctcttcagttcttgttttgagctcccacacgactagaatgccattcctcagtgtatatattttgaatgcttaccatggtctcaatgtttgaaaaggctcaaatgattgataagacctagctactgtccttctggacagtgaaaacataaacagttatgaaacaattagaaacatggggcaattagagaccaagagagtgcccaactcagatgtactggccatgaactcagtaggaactcttagttgaaagagttttatactctggtttgggtataaaacttagtagaaaaggtaggacagccgtcacggcttgaaggagggctttgatttggataaaccaagaggaaagaaaaggcatgttggagagtgttcaaaaatcagattgggtattttgaaatgagagatttgaccaaaaccttcaacaaccacctaaagaacttgggcatgttaggacaggttagaagcaatcgctggtggtttttactcaagggcaaaagtattacgaaagcagtgttgtaggaaaatccttctggcaataggaccctgtgtagatagcagcggtaagaggctggggttatggaaagccgctggcgcccgttatcccaatgtaggtaagaggtgccgaggaactagagcagtgtggtgtgccattaagccatttttgcatccacaaatatgtatggatctaaagatgaacaacattttgtcttttcatattttacattttaaaagcatgaaggaattagtttctttgaaagaaactttgaatattaaatttgctcatcacacttccttgtaaaaacttactaaaactctttgctagcaagtttgctcatggctaatatgatcacaaaatttaacaactgagctacggactggtttgccaattgttgaaatatgtttatgtgtagggacagtttacgtcatcagtgcccattagacaggaaaataatgtctacagatatgagagtttaaatgttgcccacctcgaaatgacagtgccccttccaagattttctttcaaggtcacctacaatatgagaacaactaataaaagctaacagttgtagattctaaatattgattttgctgtgaatttaaaaatcctatgagtagaagccatcctgggaaaatttatgtgtaggatcaactttctctaattatattttctaaaagctcttgaatgtgatcaaagctgagccttttgctgttagtactgtgattgtatctttgtattagtattttcacatgatgacattttagtattcgaatggatcaaggaagtgaaaaatacttaagttcttttatattatttattgtatatatttagatactgtatagattttagatgttattgtgatgttttatatatgaattatgagatattatagatgtgttacttatatatcaattattataatgtatgtcatttactgaaattttgtttttagatatattctcttgtatctgcctctgtttcttatctccactggcaacataagtgatacagtttcaccatttataagcatttcctacaaatgcctaatatattagacatcaacaatttagtccataattaaaaatcagtgtctgaatgaggaactagtatcccaattttacaaatggaaaatgaaagttcaaagtggttaagtgacttaatggcttagtcagtaattactccagcttccttatcaggaaaatggggatgataattctaggccttacctcacggggttcaggaaatatttaagattacgcagaccagtagctggcacataggaagcattatataagtgttggttaaataaaatgagaaaagcaagcctgtatgactcttttggagaagttaaaatgcatgggaaggaagactttccaaaagagttatttatactttcatcctgaatcttcacatctgtcaaaaaagactgcaataagcctactattaaccaaaggagtatttaccctttactgggtgtctttatttatcattgtgattcaaattgatgtctttgggccagagtgcgtcagttcaaatcctggcacttctgcttaccagctgtgtgaccgtgagtaactttttgtgcctcagtttcacttgtttaatctcatcatgttgtaagtattaaagtagctaatatctgtaatgtctggctagatatattcaatgggaacctctttctgataaaaaggtatccaaggtagatatctatattgccttctggaatttatcatagacatattggggtgcagcatacatagagtgaaagtttttcccaaatttcccaccacttttttgcattttcttgtctgtgccattttattgttagtagggattcctgcaactagttaaatttctggcactttgaaaaggattccattttcctgaagtccctcttttctaagacaggctataaaacagggtagaatttctataagtatgtaactgtcaaataagtgccaattagttctgattctctaggtccaagttaaacagtcattcatgacccaatatgcaagagttccatttttctcaacattcctctgagttattttgatagtgagtaattgatttgtgtgcacttctcagagatagagtctggttagaaaagcattgaaatgagagccatggataagcttgtcagtcatgggcaagtcactgaaccctcttaccagcagggctggagtagatctatagaagactggatccacactgagcttgttgggagtggtgtcaggggtggggtgcaggagttagaggaaacagtgttgcttttatttttctttgcatttcttataaaagttcccttgaacaaatgttctgcccccaagaagatggaaagccccaagactagttgatctccatgatccttctcaggactagcattttcctgtaatttgttttctgtcaaccacacaactttgatctagactttgagactcaccgggtttgtcattttagttacttagtaatttttcttgccatggctttggctgtctcagtgttttaactgcaccccccaccccccttcaaagtttaatcagttataagaacctactggatagataatttcttttgactggaaaatgtaatcctgccattaaaaaaaagtgatattgctttgtgtggatggatagtgttttcatgttgttaaaaggaaactacggaactattttagcagaaaggtagaataagaaaatgcccatattaagtattcatggctgaagaaaaatcctttgatttctccaaactgaaatcaagagcctctcttctgtttctccccactttggtatattcaccgctgcacttaatcatggattggtgaacgggaaaatgcaaccttgtataaagtcatcccagactctcagcctggcctatatgtggtgattgcttgttctttgtgcagtcaacagaagctctttcatacaaagaaaaaccgtgcaaagttttagaatggcctcaaagaaaggattcgtttagaacctgggctttttgtagagtgtgcttcctaatgacgcattatagaaaatttacaatgaggaaagcaacaaaggcgatttcaatttctttgaatgtgtcaaatttccagttctggagtttgaaatggaaaaaagatgttaaaaggcaataaaattggggggtttatttcccaaatgccttctttttccagcgaacaaaagcaagcctaatgtatatactcagatttattgtcatttttagcattcagtcatggtacactttgcattcaaaggccactgtacaactgttttgacaaccatcgctttcataggtgctatacaggactcatgaaactgaagcagaagtgttccttcaggcctatagggagtgccgcacatcaaggaattcagatgtattagagcagcatgaatttccaatatgttgccattatggaaaagaccactggcttattgaataatgcagctttcaaagccaagcagaaaatgtgattacagacaatttgattgctgtttttaaaataaatattttccaaatcttgaggtattttatttcatgtaatgcataaagtatgtaaccatggactagagctaagcatctttcagaacacggaggagcttatgatgtcagcccatttaatggtggaataatacaagtgtttgtttaaaatggaatggatgtcaccgcagcttgtttctttctttaaacaaagaggaaaataagccataaaaaataattttgccactttaacagaagaaaaatgatgaagaacaattatttagcattatgccacaattcatcaaatgtttagcaattatagcctgtttttttttttcacaaattatccttttttgaatatcgcagaacccaagaacaatgcgttaaaccactttaatactgtgaagaaatgggctggtttttttgttcttagttttgaccaaatacaataaatatgcgggttggttgggttttttcctttttggacaaattcttaataaggccaagaataggtgttgtttatagttaattgttaagatctacttaagatctttgtttgcacaaaacagactactttgaatgtggtattgatatagttcaatggactcagtatgttaacgatttggggcttttattgctataataaaatattatcccaaactagagttctccttaatagtattcaggaaaggagccaatttaaaaataacactttttcttttctaagccaagtaatcagactcaagattcacttggtatataggagttcttgtactttttcttcaacccttgagttcatacaaatgtgtgcctcacccatgcatgaaagaagtaaaaagggtataacatcagttatataatatgctataagcaaactctgggacctacttaatccagtctcttaagtctaggcaggagtaaacctaaaccatttgagatatgtggttttctaagagccaagattccataactttccttggtagcctgtttgtgcttaattaaccttgtaacattaagttaaattgcagtaagagatttagattctttccaggaagttccttattaaagttaaaccaaaatctcttgcttaccaaataggaaattttagcctattttgtctgcctcagccatctgaatgcttggagaacagttgatttcaaatatttgacatttattaagtcaatcctgcagttgtgttttatctggcccaaataaccccaattcctttaacctttcctcaaaggtcattatttttcaacttttaaatcaaattagctctttttttttttgacatttatgatcttaaggaatgttgatgacaatggatggcagagctctagaacctgagattgcagattaatttctgattttttctaattattctctgcctctacgtggatgttttatgatagggtccttaatagcatcattgattgctgatatgtttaattgctgattcattgatccctcctacagtgtgtgactcttgctgtgttggtttctagccagcagtttcccatcttgtatttgtgtaggtcatttcatgtcctaaaggcaaacatctgaaaaggccattgtggtattgctcttaaggcatctttttttcctgcctgggtatcaattatttagcaaacaaagatgaataaaaaaatttattgtagtttatatttgaataattgtctttggacaaagggattctaagtatgtccataagtaagaatttccagatcctagccatgagctttcagtcattagttataacttcaaaattgttagtagaatgtttcgtaatgtgttgagggggcagtttggggaaagcagcacagaacctggataaagaagacataggactggaaagaaggaataaacaataaatgaaaacaggcctgttctggatagcagttatatacctggaggatctgtccaggcatgtgtaggggtatggttggggcttcttgtgggtggtccttcctccagtgcttcttctagaactgagctctgcgctcctcatttcaggtccagcgaatgttctgtcctccctctcctaccttgaataatcatgctggtgcttcatgtgtcaagaattgctttctctttccttccttccccattcagcattaacactcagcattaactccactccccatggagaaaaacatttttcttgttctctctctgcctcatgagctcattacaggaaagaggacctagaaaccctgagagtttacttggtttcattgcctagacctccatgtagaaactgctgatagcaatgctctatataagtgtacagcccatagtaggagcttaataactatttttctgattgaatgaatctatttgttcccacttaaagttatctctagccataatatttcccccagacaggtacaagattattattgctttttgggctgacacttctaagcagttgtttagtcttctaaaatgatacaaatattccagttttatagaaagtacaatgtcatttatcatggtgtctaaaattctataatgctttcaaaagacctaaatgaatttgagccctaaacatagatctaactttatagtcttaatacttaatcaacttactactgatcatttctaacctattccactattaaattgatgtatttgacaattaattacaatgtgtagttgatcctcctttttagataaatccatttattttctgagtatggctatttttatagagaaaaactatcagtaaaattacaagacttctaaaggagtatatttgtgcctagtcttccaaagtcttggggcagaagtagcagtaatatgaaaaattgatgtctattaaacatttgcccatatgactcatgttatttttttaattacaaaatgattatatctcagcttgccatgtctttgacttgctttttgcttgatttatgcaagtagattattaacattgaaatgttgcattataaactcattttgtcatgaaatcataggagaattcatctaaaatatttttcaggagaacaatgagccagtctcatttcaagacaccactatcttcattattcattaactattattatctagagcatatgggaatgctttaagagcaggttttggttttagatttttttttcattttagtttttttctagtttgaaagtttcaagatctcttacgtggacaagcattacctacagaaacataatattatttgtctttttatattagccatttatatacttctttgtgccagcagcaatacacactgtgtaggagaaaaggtatgaagtcctggagggtttttgaccatttgttacagtcattaaaatactagatttgactttccttttttaaataacttaaaatatgaaaaataccaaaatcatccagagagcgtgtctttttttctttcaactaataaatatatttcacattttgataaatatataatcacaaaaatgatagttaaatcctctgaatttaatggactatacaaattccccagagaaatagaagtactctttgacagagagaggattaaacttctttttgtaattcagggtagcatttttatttttgataggcaaaaaccctctcaaaatgtgttacatttgaaaagcattatttttcaacctttagggagttttgttttctttaatcatgatcttaataatctttaataaaaatatgatccaaccctgtaaacatatcatgctattaaatgctttacatttttatatctattgtatatgtaatcacattctgtgttaaccagtagatgtaactaatggtttaccaaatggagataggatcataattcataccgtatgaaacttgcaaatgctatggatgaaagataactctctctgcacttctcaagacagtggattcataaagtttattgctaaaaacgctgtattattaaggctatcaagagacaaaattattagcattttgaagtattttttctattgtgatgtgtgtgtatatatatatatatagtgcttgaaaagttaacaggaaaaggaaaataggctatgatcacgtaactatttttcacatagaataaaagtatgctacttgcatctgtatgtatatatgtatgtatctttctttctgtctctctacgcattcatgtgttgattaggtttgtgtgtctgggactctgatcccattgtctttagtattaaaaggtagctgcaccaaggtgaagccatggctgaaagtatcagtggccatttccccactggacagatgcagagtgggacctcttgttaatagctactatcacatggattttttcttgtgtgcggttgttttttctttccccaaagcagccttgttcctgatttccatagcacacaaggctggcctgtatttcccagctaatagcgggcgctctgccttctctgaagctgcgcttccctgcagcatctcccgcataaatcagacatttctagggtgacttcatgatgcctcagatctgcaggtggtatgtatagtgaatgatagaacccaggaactgatcattcacttgggttacatatattaaacttgacgaaagtatgagaccaggaaagatcaaattctcaaatatggaacacttcttaacttgtccggggagtgttggagtcacccgcagaaacctactgatggcattgggatcttgagaagccgtatgagtggtgggtacgcctgtgggtctgggtgaggccgcctgcacttgaaccctggcaggcccttcactatccacatgtgaccgtggggaagtgattccacctctctgcacctcagttttcgtgctggtggtgaggcttgatctggtctgtgcatctgaagccctccgagcagtactgggcagacagtgagcttcatgtcagctactgtgttattcacctcctcagaacccccataggttgtggtctgggtttttcttatactatctgtcattcctcttctcattactggtatctgtgtaccacgggacgttctaacaaccaatcaactgacatttattgggctccgactcttgccaagtcctgggctaggtgttttacacacagttttcttcttcatccccacgatcacaccaggaggtgggaggtgcgattctcatcttacgcagaaggaccatgggacaaagatgcagagcacagggatggacagctggcaggtggtgaactaggcaggctggggtgcagatctcctctacatttctggtgaggctgggagccgtgcttttacacttggtagaggcttggtaaatttgcattggaaacctcaattgagccttttgtcctctctctgtctctcagtctctctcctgatgaactcggcaccgtgatgactcaagctgacagtgtaaagccagcattcacagttctgccctcttctttaaaaaatcagaataaactcatattatttttacattgctgaaataataaaagagaatgagtagagaaaacgagagatcctacatttcaatgaaagaaggatgggcttgaaatcctggctgggtgactttgacaaatcagttgatttctctgagcctgtttccttagctataaaagaaaaaaaaaaaaaaggtgtgacaatgatcatatttacatcaccatatggttgtggggattaagctggatacaggattagcatttttagtacctaaagttgtaggtccattctcaagtcacttgttaaagacattagctttccagctaatgaaaaatgtcagctctttgtcaaaacccagtaatttaaattataccagtcttctgcaaggaagacagcgttagcgcctcaggtagcaacaggctgtacaacagacaagggttctgcagctctaactgaagaccaggagttggggtctccgccatttaccacattcccattattggccaacctcaaggtattcttttctctccatcgacagtataaaaaatttagcttataaatgtatgaagacatttaaatcattttataaataaaaggaggaaaaattctaggcagcttgccaagaatagtaggtctaaaattagctagaaatgtttacctctctttattaaattcctgctactttttctaatgtgtttatatcagtttgtcccctctcaaaactgcatattctatatgcagtgccttcacaaaagccaaagaaattaacatagagtggtaaataaactcagccaacttttcttcattcccgttcaagaatgataaattgacgtggctgggatcacaaaagcatcttgataggccaagtcccaagggagcagcatactcatgtccccccatgggctcagggccttcttgataaaccccagagtgaggaccagaagactggtccacagaggatcatgaggccatcatgaaaccagccatcttcctctcacccagcctagggaatgtcccagcctctggggatagggttgtggagatcccctcatgaggccaaaaactcgctgggaagccactctctgtgctgggcaaaagtcatactttgatatctcagaagatgagctatagggtccaagcatgtgagcactttgtgaggttttcatggtaattcacaatccagctcagcccaggcactcaactgactgcataaagtctccagaagagagtttagtccgggatggatttaccagggtagctcagtggaccaagaccctcttatgcatacacagctagtctccactgcaaaggggaaggggcacatattcagaatagtcagtgcatggtaaagtggcagcacagcctcaggtggcagaaagctatagaaacatagtcccttaaaaatggtacgacaaagggctgtttctcagagcgcagtatactttaaaagatggaataaaaatgcagatgtgtttaaaaaccaggggtattttttattggtataatggaaagaatattgaaatcagatgtgtctgagggcagagaatcccaaatctaacatcatggtgtccgttgttccaattaccatgcagtgattagaaagatgggctcgtcctaggtgcagaagcaggcacagggtactttagctgccgcctcatatgtgaaatggagaaaggttgttatcgtatactttcttcctcttgtggtgtggattaaatgagatagtccacgtaaggcaattgtcatagatgcttgtgaatagcaggttatagattctccacttccttggcctcctgctttatcacaacagcaggggatgggaccccgtccttccctgtggtcttctttccttttggcatcttgggcaactggagaagagctaactgcgcgatgaatgcttaattctcttgaatgtactattgtaatttctttattctcatgtgagttttcataaaaacaatgcaatttttatactgtaactgacatgatttgcaaagtaatgctttttatccacattcagttaacattttggcctttttaaattaaaaaactcaaattttctgaggtttataaaacaggattactaagtgtaggatttgggttaaacccataagttctcctctaacttgccatagaagctgtggcgtgaatggtgagaggtgcaggcaggccgagggttgggggctgtggctgtgcacgaggtgcatctccatgtgccatctggggctgcttctggaaagtagggagcgctgcagtgaggaagaggaggagtcaaactccaccccacattctctcgcattgttctctaatgattgtgtgaaaaagataaaatgaaaaatgtgaaactattccaaaaaacacaggccaagtaagccaaaaagaaatgactataatacacatattcctgaagaggccagagaaagaggaaaataggaataaatctccctgggcaatctatcaaaatgttgagaaaaatacattactaatgagaaaatatcaaacacctatcgggagacaaatgcacataactctgaatcgtggatcacaagagtttcctcaggcaccttgatgacaactttatgatgcataaaatagtagattctcccctattacggtttattggataagcacttccatgaacacaggactgccctccacaggggaaggaagaatcatgcctgaagggctcttggtctaagttatgaagaagatgccattcaggcataaaatgtgtgagatgagaaagtgattagggttatgtccacaagagagcaaacaaatgttttgacaaggaatagatctggttatgggttcttggctttgagaatcttcgagtgagtatttgtgacaatatcctgcagatggtgtccagggatttccctccctacttctgcttagtatgtatggagagaggggatggtgaggacaactctgtatatactgtacaatttgaaaatctctccttcttacgtcttctgcaccttcacatgtcattggaaaattaaggtgtttacctgaatactaaaaatgcatttttacctaaaatagcaagatgtttgatgcatgaaaatctttgaatatctgcaactcattattctgcatatcattttctatttgtgaacacagccgaaattactgtagtactagcagccttaactttttgactgggttctttatcagaagattctcttatcagaagattcttaccttagagcttcatggaatataaaagtttccaaaattgatatgaaagttgattcccaaactgaaccccagttcttctctttgtgttgcattcatatgcattcatgcacacaggacttagaatagctaggccgttgggtgtctactctatgtagtagtgtatcattccaaccaacacagctgtgagagtcaagcaggtaactagtaataattaggcctacaactgggactgtcttgagggacccggaacccaggtcctggtaagctatgtgtgagacattatgcttggtgatagcaggagtacaaaaattaatatggaaatagttcctgccctccagtgtctagcaaaacaaatgaggtatgtattcagaaaatcatgcaacagtttaaagcatcactctccctttaagttataaaatgatgtaaggaatcaggaaaagctacctaattaatggaggtagtgttcttaaggatcttaaaaatgaaaaaaggtttgattaatgaatgacagggagaagtggggaagaagacgtttttggagtgaggaagtttcactgagtgagtattatgtgaaaggaaccattgtccctcccagatgcttggcccaaaaacctgggattcatccttcgttcatcttatttctgtcactccagacacccagttattttcttacccaaactgagcaagtctccacagaaatgcctccaaaatacattttgaaatctgccctcatcgcttccttcttcaccactgccaccatgatccaaagcaccatcttctttgtggattatagcagtgatcctaactggcctcgcctcctgactcctgttcctccatgatacattctccacacaagagtcagtgtgacctttttagcatatattaattagattgaccacccttcagtgactcctcattgtacctaggataaaaggagaaaaaaaaatccgtttcttcatatgatattcaggctctgccaagatccctgacctcaattcacactattctgcccctcaccgagctagtcacactggttttctgtctcccacctcccaccggatgacctttgcgcttagccatccctctattgggaacacgcttgccccagatcttcacattcaggtctcagctcaaatgtcactgctcggaaactctagccgtaagtggcaccttgctcctgccctgccgctcgcccctcattacatcaccctgttttataaaatgagttgtcactggaaagtgcatgtaatgaggaagaagtgaataaatatcagccacttggagcattgttacttcctgaaatcatctagtttattcaagtagttgattggccacctcccactgctagactagaagcaccgtgagaggtggtggtcttggctgcctaatcctgctgtgttccacacatctagaagagagaagaaggcatgcccttagtattgttgaataacacatatatatctggtgttttttatatatatgtatatacacatatatatgtgtgtgtttgtgtgtgtgtaacacctatctataataaattaaaaagtcatttaaaaattaaaggctataggaaaggtcacagttcatattttaatatagcagggattccatagaagcaggtggaggagttaggtatgcatatgtgtgtatacacacgcatgcacatttcaatatatacacgcaaacactaactgtgcaaatattctaacttatcatgattaaaatatacgttacgtcttatctttgccttcttctcctgtcccttcctcctaaacttcaatcctggagctgtaaaattcataaagcacacagttaggagaattccaagaaagtatacagatatgattgaggcaccagggatactggcttatcagccacatgaagtaacccatcgttaacttacatttatatagcaccttcatttaggaagatcctaaactaagaacagctattgttctcagctcaaatgccttagctattgtcaggccacggcattctatgatccaacaaagagggaaaattagggaccaagatagtaatacacaattcttcccacccctgggtacctgatcatagtccttaaaatgataaaatctaggagtccgtaggtaatagaacatcatcatcataaaagctctgtggttgattgtacttatgcttttgaagtataaacattaagataaaaatatatgtagtgaaaatgactttgataactaaaaacgacctctttcagagattttgagtccaacagctatttaggaagtactttaataatgaaaaacaattataaaaatttcaggttagtgggttttagtaagatctggttgattggcaaatagtttgcataagtatttacaaaatttgtagggaagggcagagaagagtttgagatttttttctttttctttcttatttctgcctctaggaatctagttagggaaagaatgcttattgtgtagtaaaattaacgttcattttggggttattagaaatactgaaagtgtagctgaaagatcctggtaagtcacttaacttatatgggccttaacaccaaatgtattctaatatttctggtggagtataacatttcatagttaaccatgtggattttggcaaattgtcatatagatctgtgtcttaaagaactgtttttgacatttggatccgattcgttcctatctaggttggaatatgaactggatatttatttgaacttgtttatggatttttatgtaacttgattcttactacattcttaatgtcaatagatcagtaatcaagtttcaaaaacagccattttactttgcttaaagcagaaacaacttttaatgaatgaaatatagcttgcacttgttcaagagatggtgcaagagcttcagcttccaggctgaattttccttttgacatacttcatgacgcagccctctgatgaacagtacctcctggttctctgtgtttcctttcttaactccgtgtctccacataaggcaagataggtcctaaaaaatgactggacacttaatgtgatcaatcagcctgtctgtcacctatccatgagtcatagatgcatatttacaggaatcttcacaatcttatctcaagggaataattaataaactgggaatatcagatactttaaatatatataatttttttcttagttctaacaagtatatattgagctctacctctgttcccagaactatgataggtgctgaagaagtaactcctcacagagtagttattacctagcttactgtctagatcagagattcttttttttttttcttcttttttttctttttttttttttttaatgttttttttttattatactttaagttttagggtacatgtgcacattgtgcaggttagttacatatgtatacatgtgccatgctggtgcactgcacccactaacgtgtcatctagcattaggtatatctcccaatgctatccctcccccctcccccgaccccaccacagtccccagagtgtgatattccccttcctgtgtccatgtgatctcattgttcaattcccacctatgagtgagaatatgcggtgtttggttttttgttcttgcgatagtttactgagaatgatggtttccaatttcatacatgtccctacaaaggacatgaactcatcattttttatggctgcatagtattccatggtgtatatgtgccacattttcttaatccagtctatcattgttggacatttgggttggttccaagtctttgctattgtgaataatgccgcaataaacatacatgtgcatgtgtctttatagcagcatgatttatagtcatttgggtatatacccagtaatgggatggctgggtcaaatggtatttctagttctagatccctgaggaatcgccacactgacttccacaatggttgaactagtttacagtcccaccaacagtgtaaaagtgttcctatttctccacatcctctccagcacctgttgtttcctgactttttaatgattgccattctaactggtgtgagatgatatctcatagtggttttgatttgcatttctctgatggccagtgatgatgagcattttttcatgtgttttttggctgcataaatgtcttcttttgagaagtgtctcttcatgtccttcgcccactttttgatggggttgtttgtttttttcttgtaaatttgttggagttcattgtagattctggatattagccctttgtcagatgagtaggttgcaaaaattttctcccatgttgtaggttgcctgttcactctgatggtagtttcttttgctgtgcagaagctctttagtttaattagatcccatttgtcaattttggcttttgttgccattgcttttggtgttttggacatgaagtccttgcccacgcctatgtcctgaatggtaatgcctaggttttcttctagggtttttatggttttaggtctaacgtttaaatctttaatccatcttgaattgatttttgtataaggtgtaaggaagggatccagtttcagctttctacatatggctagccagttttcccagcaccatttattaaatagggaatcctttccccattgcttgtctttctcaggtttgtcaaagatcagatagttgtagatatgcggcattatttctgagggctctgttctgttccattgatctatatctctgttttggtaccagtaccatgctgttttggttactgtagccttgtagtatagtttgaagtcaggtagtgtgatgcctccagctttgttcttttggcttaggattgacttggcgatgcgggctcttttttggttccatatgaactttaaagtagttttttccaattctgtgaagaaagtcattggcagcttgatggggatggcattgaatctgtaaattaccttgggcagcatggccattttcacaatattgattcttcctacccatgagcatggaatgttcttccatttgtttgtgtcctcttttatttccttgagcagtggtttgtagttctccttgaagaggtccttcacatcccttgtaagttggattcctaggtattttattctctttgaagcaattgtgaatgggagttcacttatgatttggctctctgtttgccggttgttggtgtataagaatgcttgtgatttttgtacattgattttgtatcctgagactttgctgaagttgcttatcagcttaaggagattttgggctgagacaatggggttttctagataaacaatcatgtcgtctgcaaacagggacaatttgacttcctcttttcctaattgaataccctttatttccttctcctgcctgattgccctggccagaacttccaacactatgttgaataggagcggtgagagaggacatccctgtcttgtgccagttttcaaagggaatgcttccagtttttgcccattcagtatgatattggctgtgggtttgtcatagatagctcttattattttgaaatacgtcccatcaatacctaatttattgagagtttttagcatgaagggttgttgaattttgtcaaaggctttttctgcatctattgagataatcatgtggtttttgtctttggctctgtttatatgctggattacatttattgatttgcgtatattgaaccagccttgcatcccagggatgaagcccacttgatcatggtggataagctttttgatgtgctgctggatttggtttgccagtattttattgaggatttttgcatcaatgttcatcaaggatattggtctaaaattctcttttttggttgtgtctctgcccggctttggtatcagaatgatgctggcctcataaaatgagttagggaggattccctctttttctattgattggaatagtttcagaaggaatggtaccagttcctccttgtacctctggtagaattcggctgtgaatccatctggtcctggactctttttggttggtaaactattgattattgccacaatttcagagcctgttattggtctattcagagattcaacttcttcctggtttagtcttgggagagtgtatgtgtcgaggaatgtatccatttcttctagattttctagtttatttgcgtagaggtgtttgtagtattctctgatggtagtttgtatttctgtgggattggtggtgatatcccctttatcattttttattgtgtctatttgattcttctctctttttttctttattagtcttgctagcggtctatcaattttgttgatcctttcaaaaaaccagctcctggattcattgattttttgaagggttttttgtgtctctatttccttcagttctgctctgattttagttatttcttgccttctgctagcttttgaatgtgtttgctcttgcttttctagttcttttaattgtgatgttagggtgtcaattttggatctttcctgctttctcttgtaggcatttagtgctataaatttccctctacacactgctttgaatgcgtcccagagattctggtatgtggtgtctttgttctcgttggtttcaaagaacatctttatttctgccttcatttcgttatgtacccagtagtcattcaggagcaggttgttcagtttccatgtagttgagcggctttgagtgagattcttaatcctgagttctagtttgattgcactgtggtctgagagatagtttgttataatttctgttcttttacatttgctgaggagagctttacttccaactatgtggtcaattttggaataggtgtggtgtggtgctgaaaaaaatgtatattctgttgatttggggtggagagttctgtagatgtctattaggtccgcttggtgcagagctgagttcaattcctgggtatccttgttgactttctgtctcgttgatctgtctaatgttgacagtggggtgttaaagtctcccattattaatgtgtgggagtctaagtctctttgtaggtcactcaggacttgctttatgaatctgggtgctcctgtattgggtgcataaatatttaggatagttagctcctcttgttgaattgatccctttaccattatgtaatggccttctttgtctcttttgatctttgttggtttaaagtctgttttatcagagactaggattgcaacccctgcctttttttgttttccatttgcttggtagatcttcctccatccttttattttgagcctatgtgtgtctcagcacgtgagatgggtttcctgaatacagcacactgatgggtcttgactctttatccaacttgccagtctgtgtcttttaattgcagaatttagtccatttatatttaaagttaatattgttatgtgtgaatttgatcctgtcattatgatgttagctggtgattttgctcattagttgatgcagtttcttcctagtctcgatggtctttacattttggcatgattttgcagcggctggtaccggttgttcctttccatgtttagcgcttccttcaggagctcttttagggcaggcctggtggtgacaaaatctctcagcatttgcttgtctataaagtattttatttctccttcacttatgaagcttagtttggctggatatgaaattctgggttgaaaatccttttctttaagaatgttgaatattggcccccactctcttctggcttgtagggtttctgccgagagatccgctgttagtctgatgggcttccctttgagggtaacccgacctttctctctggctgcccttaacattttttccttcatttcaactttggtgaatctgacaattatgtgtcttggagttgctcttctcgaggagtatctttgtggcgttctctgtatttcctgaatctgaacgttggcctgccttgctagattggggaagttctcctggataatatcctgcagagtgttttccaacttggttccattctccacatcactttcaggtacaccaatcagacgtagatttggtcttttcacatagtcccatatttcttggaggctttgctcatttctttttattcttttttctctaaacttcccttctcgcttcatttcattcatttcatcttccattgctgataccctttcttccagttgatcgcatcggctcctgaggcttctgcattcttcacgtagttctcgagccttggttttcagctccatcagctcctttaagcacttctctgtattggttattctagttatacattcttctaaatttttttcaaagtttccaacttctttgcctttggtttgaatgtcctcccgtagttcagagtaatttgatcgtctgaagccttcttctctcagctcgtgaaaatcattctccatccagctttgttccattgctggtgaggaactgcgttcctttggaggaggagaggcgctctgcgttttagagtttccagtttttctgttctgttttttccccatctttgtggttttatctacttttggtctttgatgatggtgatgtacagataggttttcggtgtagatgtcctttctggttgttagttttccttctaacagacaggaccctcagctgcaggtctgttggaataccctgccgtgtgaggtgtcagtgtgcccctgctggggggtgcctcccagttaggctgctcgggggtcaggggtcagggacccacttgaggaggcagtctgcccgttctcagatctccagctgcgtgctgggagaaccactgctctcttcaaagctgtcagacagggacacttaagtctgcagaggttactgctgtctttttgtttgtctgtgccctgcccccagaggtggagcctacagaggcaggcaggcctccttgagctgtggtgggctccacccagttggagcttccccgctgctttgtttacctaagcaagcctgggcaatggtgggcgcccctcccccagcctcgttgccgccttgcagtttgatctcagactgctgtgctagcaatcagcgagattccgtgggcgtaggaccctctgagccaggtgtgggatatagtctcgtggtgcgccgttttttaagccggtctgaaaagcgcaatattcgggtgggagtgacccaattttccaggtgcgtccatcacccctttctttgactcggaaagggaactccctgaccccttgcgcttcccaggtgaggcaatgcctcgccctgcttcggctcgcgcacggtgcgcgcacacactggcctgcgcccactgtctggcactccctagtgagatgaacccggtacctcagatggaaatgcagaaatcacccgtcttctgcgtcgctcacgctgggagctgtagaccagagctgttcctattcggccatcttggctcctccccagagattcttaattttggcattattgacatttttggttgaacaagtttttgtgggggagaaggatactgttttttgccttgtaggatgttagcaacagttctggcctctccccattagatgccagtatttctgtcccccaccccctagctgtgacagtcataaaatgtccagacattgacaaatatcttctggaaggcaaaaatacccctgaatgagaacaactgctctagacagacaattttggtcaatgtggaatgggcaatgattagagatttcttcaggccttctcttaaaagcatactgcaaaaggaaatagggagtctacctatttgcagagttagtcttgcaggaacaatcagagcatcagagatttgagctgaaaattacatggctcactaggcaaaatccttcattatacagctcaataaagtcaaatctcagaggtgttcagacttgcctaagtttatacagctaccagcagcaggacgaaaccaacctgttctgactctctttgggttcttcccatcatacttcactgcttctggataaaggaggcattgatattgacagcacagtgcttagaactatgaccttcactgttttccttgggtaaccattttgataaacgccacttacaccagtttccatgatttagtcaactgccaaatgatgccaggtggacctcctgccactgcaattctctccactccattgagcacactttcagcgcgtgctctccatttcttgtcactccaataaccaggacatgatttatatttttctcgaaaagtggctaagtgaaagctaactttgagcaaaactcagtgatttttgaattttaatgtaaataaatccaaattgttctttttttcaagcatctaaaaatccggcaataaatattttttagacttttacatagagctttataaaacattcttatacttccaagtattggtaagaaaagagtaatatggcatttttattaagcatctactagcttcaaggcataatgctactcctgtaaaaaaataaaaaattttatgaaacagacactaaggaagtgatatataaataaatcaaactaaagcaattgttagaaggtgactttaccacgaccccacaggtgaagcaccaagagaatgaagaaaaggaaaagagaaaatggaaaacaagcattcatcaagagcacattctgccaggcagcaggctaagtgctgtacgaacactgtcttgtagtcctaagatttgaaggggtatcacttcccacatttacagaaaattgcagtgaaaacagtggaagtgaaggcatgccaaaagggaaggaaaacaaagataaaattttcaattttattttatttttatttatttgtttagagactgtgtctttctctgtcacccaggctggagtgcagtggtgcaatcatagctcactgcagccccaaactcctggcctcaagtgatcctcccacatcagcctcccaaggagctgggactacaggcatgagccaccaaatatttcaacttcattacatcatgaaatgggtgaaggggagaagttgtatataaggtgggagtagagagccaaatctcaccaaacattcattcaatggatatgaatgaaagaataaacattcgattggggccagttcgtagagaaccttgagtgtgaagccaagacatttgaacttcatttgttagtaaggacagtggaaaatttgtcatcaatcaaaggagacatgatcagagttgtacaacttgtcatttctctcctaagtcactctgtggatatacaggtagaacactctgctgtaagattaaagcatgactcaagtatgttgggaaggccagaaggttagcattgtcatcatgctcatgaagagataggagagcatgtgtttgtttgttacagataagatcttggcaatgtagtcagagagaagtgatgtattcccatgccatgtgcaccactgggtctagaaaggtgagttcactcctgagccgtggggtttctcaaagcgcagcccacagaggggcagcatcagcatcatgtggaaacttgttaaaaagataaattcttaggtcctatcccagaccttttcaatcagaaattctggttgttgggacccccagttgattctgtcacatactcaggtttgagagctgctgttctaaagtaacttaatgtgaaacaaatatctgctctttttccccagatggaaaaaagaaaatttagtcagccggccctttgaaaaatagaaagagaaaaatgtaaccattgccatagtaaacccagacaaagaatcatgcgcagagtttgaactaagcttagtttaggataaaacctaatcatggctagtaaaatgaattgaattgggtcttcagttaccttagtgtatttccttatgcctgtcagagggcaaaatatcctatctgaaaacctgatttaaatccataaaaggagtaaattaaagtaaattgtacttctttgatttcaaaatgtgaattcattaaatttaagaaaaattatgatgagacctgtggagataataggataaagttctataaccagaggaattacaataaaaccaaagtccatttcagtggtactctctgaaacaccaaaactccattttcattttagccgaaggctggggtggagccgggggagctgcattgaaaagtatttgggccgggcacggtggctcacgcctgtaatcccagcactttgggaggccgaggtaggcagatctcctgaggttaggagttcgagaccagcctgaccaacatggagaaaccccgtctccactaaaaatacaaaagtcgctgggcatggtagcatgcacctgtaatcccagctacttggaagactgaggcagagaatcactggaacccaggaggcagaggttgcagtgagccaagattgcaccattgcactccagcctgggcaacaaaagtgaaactccgtttaaaaaaaagaaaaaaaaagaaaagttttgaacttgagtcttatgtgtttttttctgctcagagatgccttgatcatcttccactgcagttcggaataatcagcttcagttcagccatgtcagcatttagtctattctgaacaacacctaactatcaatgaagacttacctatgtaagatagaatactttatgaaattgtgcattttctgaatttaatccttacattattaaaaatagtattagcgagaaatacatatgtattagatatacagtatatgcatatatacatacatatacatataacaataagaaatagtatggaattggaataaagtttggggtaaaactagatatttccaattatatgtagatattttcattttgcttcaagtagtgccattgaagtatctagacatttctaacaatctctccaggtccaaggtattaaattaaataactacactcgtcccaaactgagagtgactcatttgaacagctcctgttcaacactttcaaagggaactgcttaaaatgggtcatcctgtattaaaccatgaaataaactcccaaggggatttggaagacatccaaggggttgtgtaatttgacagtgaaaagggaaaagactgcaaagtacactagaggaaggaaagcttctccgaaggaaaaaaaaagagagaactaagaaatattttaccaagcaataatttaaatcctatatttaaattaaatgcctaatttaaatataggaataactttaggaaaggaagtatctttggttatccgaggtgcatgttctgtagatgctcagatctctagcctcatttgaccatactcctttgcaactattctttgaatctccttgataaataccagtgatagctccatactagagcaaagggccaggataggggactcagaccactgaaatagaggaatacaaataagtctactatgacttatttctttgcgcctatttctttgtgccttggagagagtttacaagactatgctactaaggaaacaggctctctaaaaggtgcttgataaatacattttgataaatcaaatcatactttttaattcacttactttaaactttcaaaactgtattccagagaaagaaaaaattcccaaataataaaattcatattgtcacaacatgccccaacaaaatatgagccacctgctagacatgggaatatatccattgcatacatggccggttgaacattgaaacttcatggtatttctgttcacacaggatccattaaccatctacccactctttgacaggttgcccttaaacttttgaactccaatagttcccaaagtttttacattctaatttcaaaaatctgtcacatttttccaacctgacaatggttgaactttcaagattcattggtttaaaaaaaaatgcggaaaatccaaagtagttggtaatgctattaaatctatttggattgtatgaatctcaataatatttgtgtaggcttgaaaaacatttgtcaaatacaactatatatttttacgatttgcatatggattcctagactattgcaataacttcaaaagttcctgattcaaatttgtgtattactgtaccaatgcatggcacaattagggccatttaagatgatgccaaattggtctctgtggctggggtcaattttccccacctcctttactatattatgtggtagaaacatgatctgctccctgatgggcattttggaaactcaagattcaaaagagagttaaggctgggcacagtggctcacacctgtaatcccagcactttgggaggccaaggcaggcagatcacctgaggtcaggagttcgagaccagcctggccaacatgatcaaaccctgtctctaccaaaaatacaaaaattagctgggtgtagtgatgggcacctgtaatcctagctactcaggaggctgaggcaggagaatcgcttgaacccaggaggtggaggttgcagtgagccaagatcatgccactgcactccagcctggatgacagagtgagacttcctctcaaaaaaaaaaaaaaagagagagagagaattaagagacatattcagtgcttctcaaacattaaatttttgtaaatcactggaatcttattaaaaatgtagatgctgatttggcaagtctgaaatcaggtgtgggaggttaggcctaggttactggtacagaattaactttttttttgtaaatggttgcttttcaaattttaatgtccatacaaatcaccaagtgatcttgtttaaatgcatattctgattcagcatgtacaggatgggggctgagattctgtatttttatttatttatttgtttttaatttaatttcatttaattttaagttctggtatacatgtgcaggacgtgcaggcctgttacataggtaactgtgtgctatggtggtttgctgcacctatcaacccatcacctaggtattgcaggatccacattttgaatagcaagaagacttgtgttgtcaaacctgagtgctcatcagaaggcaaaatgccctgggctccacctcaatgatattgggtctaactgtttcagggtggggcccaaagattagtattttcaaaaaattccctaggtaattctaatgtgtgactagagttgaaaaccatgaagctacagtgtttctgtgttctctgaaagttcactaatccccaaacccactagttcctacaaagggaagatagccaatatcatcccattaatgagaaactctagaaaacaaaatgattaaaacaagagaaaaagctgtaggtagttttcaacttcatataagaaaatactttgtataaagtagagctgaccatgccttaagcaggctgcattagactcaataaatttttgtccctagagacagattgagaccagagaactctttgtcagaaatagataaggtgttctgattaatttattcagtaaatatatattgtcttgtgtgttccaggggctaagctagacattggctcttgtgataatcaatgaataaatactcaatggtccttgcctttaatatcagataaggagacacaaaagtattgaaacatgttatgatcattgctttggaggagggataaacaaattgcttaagaaacatagaagaagttgctcatgaatcagccagcagtattcaagaatgcctttcaagagactttcaaatctgaggtttgtagaatttggaagagtaaaacccagagaaacatgaagggccagctttcaaggcatggggaacagcgtggctggaaaaaggcacagaggtaagaacagcaggtttgggagatgagaggtgagaaggcatcaggtgcatgacaggaaaggcgttcagacagttgggcacatgtaccatcctaaagtgcctgtgtgccttgtttagattgtgtgggctgggttacgtgtaaaaggttaaaatgctgacgtccagattccccatctgtgctattactgtacagttctatgatgaaggattttagatcacaaaattgtctcacctttaacaaatcacaattgatttgattacctcccagaggtagacatttgcattgaggggaaaaacacacactgggggcctatggcgggggctctgggaaaggcagagagagagcatcaggaagaatagctaatgtatgctgggcttcataccaaggcgaagggttgatttgtgcagcaaccactatagcacatgtttacctatgtaacaaacctgcacatcctgcacacgtacaccgaaacttaagataaaagttgacggaaaaaagtttggatctttctatatatttgaagatatctagcacaaaacccaatgaattgagtccagattacttgcctcatataggctttctgtacaagaaactgagcatctagtttgtgccctcgaggaattgccactagttttattctaagttggcattaattaaaccaacttgaaataatagtctaatggtctatgagacagcctcactgatactggactaggagggcggatgtggggtccaattctgcctctgatcctaaaaaattgtatgtgccttcatgcttgaaaacaacattcctggtgcttctttttaagctaattcacttttttttttgagacaggctcttcctctgtcgcacaggctggagtgcaatggtgtgatctcagctcactgcaacctccgcctcttgggttcaagcaattctcctgacttagcctcctcagtagctgagattacacgtgcacgccatcacagctcagttaatttttgtatttttagtagagatgaagtttcaccatgttggtcaggctggtctcaaactcctgacctcaggtggtctgcctgaatcctgtatttttaactcccagaatgggcagaataataagcattataatccataaacatctcagtacaaatatatagaccaaattatcaagtccaatggaccctcaaaggacaagacacatttgatgtacatcctgtgtttgggacatttccaggggacctacttcagtatggatgaccccaataagaatggagctatcaagtgccttagatgtaggtggcaagggaaatacaggagggatggagaagtcggagaaaccttagagaaatcaatcgactgatcttttccctcctgggttctagcagcttggtcccacttcaatctgtagaggattcctaagccttgaatgtcagaatataattatgaaaagagatttagactttcagtgctacaggctgaaggaattttatgacatccaagacaatcagaaacagtgttgccagaacagccaaaaactgttggttttattcataatctcatgccaggagagagagggacataagcaaatatttttatattttgaaagggatgttttattttataacatcttgaaggaaagaaagcaaacaagcctggctaatgcctttttaaaagagaatatgtttttcctagttaacgacaaagatttcactgagatggagaaaaaaaatgtagcgtttataaaaatgttgatgtagatataattagatccattttaggaccaaaagttttatgcagaaactgacagaaggatacacaataattatagtttcctgacaagctgaatagagttttctttttttatcttatggttttaaaaaaccaaactgtaaataaatatgcagtttgacagattgtaattgcgatcagcaaggcgtcttttcatttaatcagatggtgttattaaaatggggttacaattaaacattttataatgtgacgtagaactccattaaaattcttcagcaaacagcaatttacatctgatgcttcagcatcccttttctatttgcagaaatgttattggctgtgaccttccactggacgggtctctttttattttttattttttcttcttactttgataaatgatattgaacagccactgtctttttcttcttgcacaactaagatactgtttttgcacattctcgacttgtggcccttatagtagacatgctggaccaaacacagtgtttgaaaaaagcatgtttacttgacaggaaattcatttttctctgtttatataatagtcatccccatcaacttcaaattaatattgaacttacagttaaatttgtttcagggaaagattaataggaagcttttgcaaagtgtaaatatcagttaatattttatattcctagaaaagtacatccttaaacaaagaatgaaaaggtgtgaaattgaatttgacagtaattaaaaggaaagtggtctcacaatgctggcagggtgaaattatgagatgctttactgttcttgctcagaatctttggcacgattgtgacaatgcatcgccgatcttcataaagaacattcagaaatgtgactaaacattgccataggatcaaagtcgaatgattggataatgaaacataatggaaaagggaatccaaattgtaactctacacttccgtcagtataaaggaataatgcaagcatggcgcacgttgtgaactcgactgtgcaattactgaaaatctatccccatacaaagcataaggagaagttgaattgatttatagcacaaaaagtaaattcagcaaagcctatgggaggacttttcggcctagtgttgaccaaaaattccctacctgtacatcttatccagccaaggagacagtttactggtaatgaccatggtcactctctgacagcataagtgttggaagtattttccatttccaaaacaaagcaaactctaggaaactataattaaagatttttttccaaaggccacctttcaagttagaaaatgttcaggtggtaaacattgcctgtcaaagtaaataggatctttcaaggagaaaatatttaggaaagtagtcatttggttaatgaatataattgttcctctgtgggagtgaaataaattaatttcatattattcaagggccaatgatctacttttgtatagtatagatatgttgggccaggcacggtggctcacacctgtaatcccagcacttttggaggccaaagcgggtagatcatgagggcaagagattgggaccatcctcgccaacatggtaaaaccccgtctctactaaaaataccaaaattagctgggcgtggtggcgcgcgcctgtagtcccagctactcaggaggctgaggcgggagaatcacttgaacctgggaggtggagcttgcagtgagccaagatcgtaccactctacagatcgtgccattctacagagggggaagagccccagtactggaaagttaaatggttatacagccaattcgtggacaaacaagaatgagaacaagatgcattccctgagccatgttctattccctctgcagcgtgctctccccatacattcagatttggctattttattttcattcatccattcaataaatatattttgagctcctactgtgtggcagtcatgtggaagtcatagtgagtttgttaaagctttgattataattcattaccaactaattccatgtgggaaaagaaaaagtagacaatgcagtcattaccatggtcaggcccctgctgctactgcttaagagtaaaaaactaactaaataaaagtgattactggagtatagctattatctctgagccattcaggaatacagggtagagcttgtcatgttgggtcaatagaacaccagtgaatgtcattttccagagattcccagagctcaaccacaggtggaaatggttctcgaatccccataggctgtggaggtagaataaaataataaatgtgaaagcacctcctttgtaatgtggaaagcccttaaacaatctaacgacaaatatttattttacccccactggaaactaggttctgtgctttagtatcacatagaagccataaacgaacaaaaaaaaaaatatgtcgtctacaatcacagtgtttacagacaagcaggaaagatggttattaaacaaatatacaaaaaagtcacacatttcacaatgtagaggcattttgtaaatttttattccactctgaagcattctgtgggaccagaattttagtatctttcttagcaaaaccattcaaataagtgtatttgaacacttttctcattggaatataccatgaatctttttaaaaaacatgatctgagcctcattttctaaacatctaatctttcttaattgctaaagtaaggttttggtagtacttgtgtggttcattttaatagtgtttgctcatctaacctctaccaggaataagataatccattttattagaaatgcatatatggcacacaatagcacagtggaaagaaccctgggagatcaggctggggtgcagggttaagagttctggatctgatattatatatttctgtaactttgggccattcattaattaaatatctctaagcccacataataagccctggatatatgttaactcattagtaattcagttttctccctcaaaggaaggatgcaagactagggggatccctgaggtcacctcctgttcaaaaattctatatttaccatgtaccctcaattcagtgagacttttagtagtgtaaatattagccagtattcaaaaagatcccttattaaacttggaaagcaaagatgaatattcctggaattgatggaacacccaactgagtccaattctaaataccattgggggcaaaaatgcagcagctgtttagcagtgcagagaaaaactatatctgaattttggattagaagtgaaaaataccttatccagttgaaactacacagggaatttaaataggatataattacacagttggaatttgtccagaagctttagactaacccgcctccttctgcaagagctacatttaccctgggatttttaatgatggcatatgatcaaggccctcaattttaacaaccaacctaaaacaacagagtccactacacatttgtaatatcataaactcccttaacacccatcttagaacatttgcttaactgtgttcaacaccaccagttcttacaaaatcatgtcttctctccagggtctgtgttaattctgcagttcttaatttctgtgatcagtgcttgaaatagaccaaatgaatcctatttgctcagttagtgctttttcaaaaaagttatgctccattcgaagacttttttaatggtaaagagtattgtttttatttaggacaactattctcattttcatgattcaggctgggctgccagccaagatttagagagagacagagggtagtacaaagtcattctaaggctttgtaatagggatgacatttaccaagaactggtagagctggcatttttctaaacaagtagatactgagtagaattcataggagttcatgaaaaaaattgctagattttcaaacgctcacaaaggatattcagcattttgtaaggcatagggtggaatgaggaagaagcaaagaacaacatatcattgtgaagtggcaggtgtagttcaatcagcttttgaaagaaacatgaatttaaataatccaggtgaccagaaacagaaagatttatatcccatttttggcaaaatgacatgatcaactaactcatttttccagaaaacttataagattcatctttattataaaagttccatgatgccaaatgcaaagtaggcagtacctaagttctagattttgagatgcctccaggtttgacattattttctgagcctggatttgagtctcaaatgaggtgcttcccttgccagcactcaatttccagagattttgataggtctttgtgagcctaatcattctcctataggaccccccgtcctgcatctggcaccgatttagaactgctgacttggatcaccatgcagatgatggattgaattgttcatttttcattcatgcacagagatagaggcattgttcttcttcagttcagaaattgatggtgaccagtaagtaaatgcaagagttaaatgtgatttctgtcagataaaggctgtaacttttgcattgaaaggaatatacacaccaagttaaggaaaaagggggaagaaaagcatactcgtaatgatagtttccctaatttgaaataacagatttatattttaatgcactgagataaatatagaaatatttataaaatatggagatatgttaccagaatcaagaaaatgaaaataatgcttaaattaaaccagaaatagtgtgctatacaataaataatactatgttaatatacaacacctttcccattggacaacaatgtggaagatatccatggtgcattcccaatcttattctataaaacttggacacacgaatgtcactactatacctatacctttttgtaaagtctgtccaggctactttaaagcttgcagtgtattctctctattgtatttttacatttcaacttgtatgtaccacatatttataaaccatcctgatctagcttgaaccagcttgattacttttgatttgtgctgaagatttcttcattcttactggaaatttcaagacattttactctaaacctattctttctttctttagatttatttactacctttagaagtagagaagtccaatttcaatcatgtttgaaataactcattttagacaagtacgtgctgctctgcttacaaaacatatatgagtggaatatgcaattactacaactcagtttcctgccacagaaacatttcagcaatatagcattacagaaatagaatgacatgcataatgaaagatttcaagattcacccaaggcatttattctcttcaccttaatgttctcagcagtagcagagtatccattaaaaggtactatgaattatggttgcctagcaactggaaggagcttgtaacagcaccaaagaatgaaatggctggttgataaaatgaattttctctgagcattagcctgttgaaactgccttttcttgtggaacataaagtgcatttatttgtctcatgcattttttattagaaaattatttgagttccatggacttgaatcattttgctacaggagatatttgattttaatgtgttgtactaaaataagtaataaaagacactttattcaaagcaaagtcaccaaacaatcctatgttgatttttgaaggaagaaataaaatatttgataagctactctgttactggtttctaattaagaatggccttagatagaattcaaaatttgactgatgctgtccaaggtatagggttaaaatagtggattctttttagttatatgaactgtagaagcattctgttgacaatgaaatgcaagagaagaatggattttaaaaatcttactctatttgtaaaaattcatttcaacgaaggtctcagtgtttacaaaaaaaacctctaccaactatacatgatctttattttatcttaattttattcttctaaacatcttcatcttagtatgctgcccatttggagaaatacatatatttcactgtcattcctagactttctttatttgcagtgattaaattatggcctatatagtcttgccttgcaggtcccttgccctaagaaatacactcacatgacatgaatagatggtgtcaccagctactgaaagtacatttttgaaattgtcatattgtatgagcattttttcaatttaaagtaaatcaaatcttctgtgtaggttcatagaaactaaacaaccaaaccttgaaaaattagttaaaaacagcttaaagtagaaatgattaaaatgctagttgatgtattcagttatgattttttttggctactcatcttctacacttcgatattattatatagatgtctagaatgtttcatatgtatgtttttaccttgctgtacaaaataaggtattatatgtattcatctacttgtgtgtatagaggttgtattatataaatgccaggcatacattttaaaaagccattttgtataatattttgattatgaatgattcattttcaaaataacatatgctgtggttgaaaaaaatagttatgttgggccactgtttattccactgggtgaatgggagatacttctttgttcataagtaaatatttggttcaagcctgggccaggacaagttagttcaaagaggaagggtcaaatgggaatgttattgatcactgcaaatagaagaacttcatacagaataattacccatctagatagcaacaaaaggaccatctcctgaaatgataatcttggcactatcttagagtccaactaaaaaaaaaaagcattgaaaatatatttgttgaaacagatcaaaataggcaaacagttttgtaatttcagctaataacattcactcatgtgttttccctggagtgtgaattttccagctgatagcctcagatcctcacttcagtatggatatttagcttttctcatattattcctttaactacagttagaatagtggttcatgttgaatatccctaatctgaaaatccggaatccaaaatgttccaggagcatttcctttgagcgttgtttcagcactcaaaaagtttcagatttcagagcattttggattccagcttttctgactagggttgccgaacctggtaagtataatgcaaatattccaaaattcaaaaaaaaatgtcagaaatctgaaacacttctggtcaccaatattttggaccagaaataatctacctgtatttctgtctttgttaattccatagttgacccagctttctcatttcaaggtggagaagttctcatgtgagcactctatcacaactgtgtgagagactccaatatagttttgcttgagcaagtctcaaagcacttatcaaaagagagagaatttatatcttttaaaaagactggtgtctaaagcacagattttggccaaaaattgaaaaatgagagtgtctatctgtattgattattagcacttttcctaaaatagttgtctgcaagggctaattttccctgctaaagaataagaagtttatacaattgctagccagttagtagaaagcgggaaagtatagctgagaaatgattatgttagcctgtaccttacagatctttaccacttacaaagaactttcatgtacatgatcgtgttagatttttacaaccactctgtcctataagtaggcctaggagctaccattaaagaaggcagaatttattggaaagcatcctggatctggagtaatgagaccagggcagggctgcaccctgattatgccacctcagccaaggtactggacctctcagagccttgatttcctttaaagggaatgatattgcctacctcagagagtaaactacaagattacatttgtacaaacacctccgtttaatagatgcttaatacataagaatagaaatagtcaatttgcaacgtggagccttggagatacaactgatttcccaaggtcaagacacagaaggggttgacctcctctgaatcttagtcagtgtcctcgtgggattcacccctacagtttccattgcaaaggaagcatgcaactctcttcatctgagaagaaactgggttgggaagaaaacggacaacttggactcaagcaaaagtgtgagcacaaatactctgtcattcactggtttgggcccaaatgcttcctgtatcccctgtgccaaaaaccctgctcttgggcccactgcttatagttcctgaagctttttggcatgatgctctgctaccagatcacaacttcctcaaactgagaaacagtatgagttgcttccctaaaccggatgttttgtagaacaaattttgctttgatctttaatgcattagcagttacgttactaaagttaattataacctattgggactaaaatatgtagtttttgagcacaacgagagataaaagctgtatatgaataatcaaacatatgaatagatcaaacattaatcactgttaatattttgcgaaggtgtaaattgaaattccagagagagcttgactgatttgattaacaatgagtttaatgctgcagaatcccacttgaacataaaactgttatactcataataatcctatgtggctattgagggagccaaattgaaaactctttctgatatttgcatagaattatgagatatatcctgtatgtgtttaccatgtgcttaccagataaaggatttttaatggagaaaggttcctgaaaatatttttatgtttgtatcaaatttattcttaaaatgttatgatattgctatagtttagaacccaattattagtttatcttgtgattataggtaatcagtattaaattcaaggtacatgttttcttttaacatgaaaaactttaattaaaaaatttttttccatagacacaatcaagaactagccaatcttttgatggattgccaagtcactagtagaattaaaaaaaaaatgtagaaatatccaaggtaagagggcaaacaggatttatcattcatgaaaattacattcacggttcaacaacaattgttactgactcatgtatgtaggatgtgttaaaaaaaaaagacttccatttaaatgaaatcccacttctacagccatctatgaaaaagtggcagaatctaacattttagtcttggaatgactatagcctcatgaatattccatcactgacagttgccaggatcttcaaataagcaacaacagaaggtcaaaaagaagcagagaacacattactgagttttagttgatgttgcagtttgattttgagtgataaatttctctttacaatgagttcctgtcatgcctgtggttgacatgaacttgtgatacatggattatgccctcctggacgtgtcctaaaaacactatcttcacaggtttctgattttctgacacgttaatttattttgtagtatccaggaattctacatccaaattattaaattctgccatccagatagaaaagttgtaggacaggtacattgaatttcactttaaaatgaaataaaaatgtttatagagtagggtgtgagtggtaattggagaaaatgatgatcatcatctgggaaaggcagggcatttttatataggtgaatttgcttatagaactttccattgctaggaagatattttataatgcaaggtgtaaatgcccttttatttcaaaccgtcaatggtgatactagaaggcaaataaaattaggaatatttttattattatctccagggttaatattttaagaattacactcagagctatagtctaggaagaaaaatgtaacaacctgacaaataaaagactaaagaaatgtcttatatgcctttatactacttaagacagaatgcttatgtcttatccctaacgtaggaatatgttacagtaataaatctcagcatttctttgtgtatgaagcagaagagtgagtaactaaataatgggtatcttgcctattgtgtggcccatgcagggtaataggactaaacccagcaccttggatagactaaagtactgaaatggcatttcctcccttaaggtgaaaaggattttttgtttttattttattttattttattttattttattttatttttgagatggattctcgctctgtcaccagactggagtgcagtagcatgatctcggctcactgcaacctccgactccctggttcaagcgattcccctgcttcagcctccccagtggctgggattataggcacatgccaccatgcccagccaatttttgtattttagtagagacagggcttcaccatattgtccaggagggtctcagtctcctgacctcatgatctgccctcttcagccatccaaagtgctgggattacaggcgtgagccactgcaccgggccaggattttttttaatgttgtgctaatatggtatattctgatggccagctcaaggaatgacacattcattacctatttccaggggctcagaggcagagccatcccccttttatgttgggtgtgggtgtgttttcccctcttgccgtattgtctgcgtccttatgcagccagggttttccgcttgaacctccatgtgggctggccatggcctgattcgtctgtctgtgtcaggactggaagattttatcccactttttgacatagccaaacgtaggaagcaatgcaatttggtgaatcaaagttatgtgaacacttgaatcttactaatactgaaaaaaagaataaaaaggagagaactaaaagtctgatatttattaactactccttcaagtctctttttgaaagaatctagatgtgaaacaaatccctctttaattacttacaagtcatctgctctgggctgggctctgcgctggaagctttgtagatgcagtacagtatttaatccacagcatcccctcccgaggtaggaactataacctccatttttgtagacagagaaactgagcctcaagggaattaaataaaacaaaaattaaaacccagtctgcctctctggtggtctttccagagcagtcccaaacaaaagaatttgctgtgttatgcagagaaaaatggagttgtggcatcttccagcataggataatttcagaacagaagcctatgacgccaacacagaggaagcagatccacataattctgaaggtcagacaaaattcagtcctatcagattttggtttaaagtaaacacacaaagaaccaaatgctttaactgcaaggcttcatatccagtgaattcactgaatcactagcatactatagaacttagacctccaaagtttttcctcttcttctgtacagctttgtttatgtttgatttttgtattccttttaatacaatagttatacaaaaatgagtaggataataaatgttttatctcatatatttatacgtttgcttatatataattgtattcataaagaactactatataatctttttatttatacagatagaccctctaaatcttttttaaacttttccaaagactaactctactttaaaaatagaaaaaagtttactcagctagaatttagtaagactccaagcaatcaaaactctatctatctatctatctatttattttggagacagagtctcactatatcccccaggctggagtgcagtggtgcaatctccactcagtgcaacctccccctccccggttgaagcgattcccctgcctcagcctcctgagtagctgggattacgggtacctgccaccatgcccagctaatttttgtatttttagtagagacacggtttccccatattggccaggctggtctcaaactcctgacctcatgatccccctgcctccgcctcccaaagtgctgggattacaggcgtgagtcaccgcccccagcctattcattttttgagacagagtctcactttgtctcccaggctggagtgcagtggcgcgatctcggctcactgcaacctccacctcctgggttcaagcgattcttctgcctcagcctcccgagtatttgggattacaggcgccagccaccaggcctggctaatttttttatatttttagtagagatggggttttaccatattggctaggctggtctcgaactgctgacctcaagtgatccacccgcgtcggcctcccaaagtgctgggattacaggcttgagccactgcacctggcccagaactccagaataaccagaattgttaataatgcacatattaggaaagacaactgaatagcaaacaagctaatatcaatgagccttttaagaatacatcattatatcaaaactattattaatttagctctttctcctattcttttaacatcaatatcaataaatagagggcaagccccacacatgaagccagaacatctatgtttaaagttcaactcaacttcttactaaccatagatggcaattaatttcaaagatcttttattaattcatctacaaagtggaggataatagaacctttcccgctgagctgttttgagaactaaacaccacaatgtttgtgcagtacctgcacagattgccgtagcagggtgtgcaatcagcaaagatttcctgaatcccaatctgacccattgtcgcatggcatggcaacttttcaactttcagaaaaacattgaattaaggcccttgcactattatttcaaagcacacgagtgcaattggatatgattttgaacacagttaaaaacaacagaggcattcttgggaatcaagtttccaataagctaaagggcaatccattttacttggaaacggtttttatattcagttaaaaagtgatctttatttttaacttacctaacaataatacatctagttcatagatggaagtgaatgccttcctgtctactactgagggaagctctcattttcacctgctcactaagaagcaaacatactttgaattcgcctcttcatgcatttacacttcaatcttctttttagctttcacgtttcaccttaaacagttttaaagtccagtccaatgttcagttgtatcttgagggtgaagttttgaaagcttttgtaactttcttctatgtaaagtcaacttaggtcttaggaaacactttgtttggtatttgtgagggaaagaaaacccaccaaaggcagctaaagccattaggaactccacatgcgagaagaggtgctgatgtgttttgttagagagctactaaattaactctgccaaaaatataataattgcactgaacttataacaaattaatgacatgatttacataaacatgcactgaggacttatgtgctgtagatttcaaaattatattttcagttttgacaagactttgaaaacactatcactagataatgtggtgcatgttactcagggaccactgcagtggtgaatatcatctggaaataggtaatatttcacatgggtaataatttcagaagattattatataaagataaacaatgtcttcggagaaaagaaagaaatattatcttcttgccacctgaagatatgaataaagttgttgagaactccatttttccccagaattacaggagtatgtttgtctgtgttttgtgggggggagattatggatgtaatctggagcaatttgaacggcaaatcatgattcccatgcaaaattataactttacaaaattactgtagacacaaagcagttacagattgctgagttaaatggcaattggagcaaaataaaccaatatagtagagtaatataaagacaatttatttgctcttacacttttatttgacctgaaacatatggtgttggaccaacaaattcatctgcttctagttacttctaagacttggtaattacacggttctgtagcattttataatattgttgcctgcatctttgttattttaatatgtaatcctcacaattgcttctccaactcttttaagtaatagggagctccagttaagtaaattgggggagcaggtagatgaagtgacttgcccaaggtcgtacagaattaatgcagaaatgaagctagaaatagtgaggtgctgattcccaatagagtacatctccaaaggccacctcgtgcaagcaatacagtccatacatttaacctagaaactgacatgcacaggctgcatgtgactcaactttacccggtatgtgtgattttacatatctctcagttaactcagtacttgaaatcctgtacgggcagtgttcttgtggccatctgacacttttgagggagcccaaagccacatgcattcttcctttatctgttttggatacaatattggtaacatccttcatacaactataatccaaatggattttaatctaaaatcagggcagttcaggtttatgtttgctcagtttaactgttacagtacccactggaaaaactcaactgactaaagccaccaggaaaggcagttttattttaagtggagaaaaaaatgtccctacatgaatgatttggcttctctctctctctctctttctttctctcctcacatctgcctcctttaaaactttgtacatcctggaatggaatccatcattgtttttgcattaaggcatgccataaaataaagaaatgctgagaaccaaaatgttatacaacaatggctgtaagcatgtttctgtgatatgtagaaagtggagcaattataacaacagtcaattgttgaaattgctgaagagcttgatgattaagctcttcagaaatggtttctacccaggaatggcagagtttttttttccctctcacacaatatcagtctcattgtctaatttcatctgtagcatgctatgaatacgaatgctttagaaaatgtactaggtagtagaaaccgggtgatgcgagtagctgaccaaaatgtgtaaataaaaacattagaatatcatacttctcagtgagacactgtttgctagaaacacagagcccaggctctgccacggcaaagagtgctaaagcagaaacagctacactgcatctaggatgaatctcacatgagaaagcagagttgcttcctaaatttaaaatcatgttcagattcaagcactccagtctctctaagcgctcagcttctcagttcaacaagggagcttaactttcatttcatgaagaaatcagagttatctaacagaaactctttcaactttcctttttcccatcctgaagggtctctgttttcacctgttccccttacctacataggcagtcgggtggcgtgattacaaggggagggtggtacctccctccccataccaccactgttcaccctttgtgctagtcagatgagtttggagtttctacaaatctgcttgccttgattgtcttaaaattacacatcacatagggctgaacacataaagcaacacaggatgacatcttggtcctttgactagtccttccctttggcttctgtggaagaaaactcctcccctgctctttattttcttttattcccttttttctttttcctatttagattagcatgtctaaatgtgtacttgaccttctaatatgtctctgtattttaaatattttgtctcttgctttgggttgaattccttctacctaaaaatgtgtttaggtcttttattttcttaaaagacaactcagcgctgttcctaaagatcgctagtgtctcacgtatttgctccatctttcctctctttatcaccccatacttcaaaggtggcctgcccttttccttctttgaatccctagataccatcaatttgctcatatagaaaaaatgcagggaggagagagaggaagggagcacctcagagatcagtgtgcttaagtaatgaacataccgatctctaagatcctgttggacttggctgtgattctggctctatgacatctcactggccccacctcatctgccagtcttaagtgtgaacaccacccaaggttctgcatccccaggatctcaaccagccccagagtttccatcaccctatttaggggactgacacatctatgtcacccacactactctcattttcaacctcaagttccatgacttcaaatgcttggtgaacatccatcccgtccagggttttctgctagcacctctaatttaataatttcttcactacaccaagtatctcctcctaacgttatctatgcatccacgcttctacctaccaatgcctaagacctttctctcatagccccctggagttatatgacactgttgccctttcctccctaccgtccaatatcacctattgcccaccttattcagcctttattgtcattatttctcaacttgttcctcatatatccaataaattaaatactttgccattgtatgaacgcttcttatgctttcctgcccatctgaaattaatttgacttggaattttctactttcccgacttctgctttctaacattctactgacccttcaggttcagttgaagatgctctcaagtggacatagtttatctcctgccagtgtgctcttgtaacgtgtatccctcccacgactctaccacattctgcttttaattgttgatgcatgtcttaagtcctgtgaatatgataactacattggattcctctttgaatttctcccagtgtagactaccaaccatattttgtacataattcccatttactgaacaattgatgtattgtcaaatatatttggttaataagagcaaaaaatatgatgatcagaattatggacataaaatattttgtgaaatgtgcaaatgattacacctcacttttctgatttcccaccaaaataattttttaaaaatatttttctatttttacacccaacctttatgaataatacatatccatctgggaaagtgtgagtcatatgtcataacatatatagcctctaaggtttttaaattggaaactttgtttttataatgttaagagatcactttagtcatagtttgaattttcaactcttggcaactaataatgcactttctgttgattttgaaataaaaacttagcaatattaaggtgattacaagatatctcagcattgaaattttgttgtgacaaatcttttagacatagaaattcacttcttaaatcatggcttccattagataagctccctcctaggaagtaaaatcttatttgaagacacttacgggaggtccatctattactgacagatatattttatagtataaatgtcattttaaaatttctgtttttttctaaatttaattatttgagttagtaaaacattcacattgttcaaaactgcaaagtatcccattcttaccttccagcttcccattttcacccccaccaccacaagaggtagccacagacttggtttcttctctctccctccagagcttacagattcttattccatcctcccctaaccctgactttttcttttacaaaagatgacacactactccgctcctttcttttctctcctggagctctttctcatgagagctgctttattgtttttttaatcattgcctagtgttccattgtgtgtattcttcataattcaattaactagtatcctgtttaagggtattttgttttcagggttttttgttttttttttttttttttttgctattgtaaacaatgctgcaatgaagagccctgtataaatatcttatatgagtgtaagtgcagcagtggaacttctggataaaaaatgtatatgcatttgtaattttaatagatatgccaaattgtactctgcatgtgttatacaaatttacatttttattctctagatatgggaatgcctgtttctcttagccttatcaaacttggattttgcccaatctgatagatgaaaaagatctaggtattattttttatatatttaagagccattcatattttcttttgcttgaatgaactgtctcttaaaattatccagctgttagggaggaggtatggatacaatttgatttttttttacttgattcacttattaaatcaatgacatgcattgagtaatccctccttaattcattgatttggatccagtggatgatgatttatttctattatgtagaaaattcaaatgtacagttgatcctatttccagattttctattctgtagtctttttattcctatactaatattctgctgttgtgatttttttcaagtgttttagtaaattttggcatctattagtgttaattgtttttcattgctctttctgcatatttctgttgaattttgtatttttactttaggacaacttgcccaaccctatgaaacaaataaaaacaaaaatatcctggtagtattctataggtatttctttgtatttctaagctaacctatagaaaattgacatcttaatgatattgagttcttttcttcaagtgcatgtcacgtatttccatttcttcaagtcttcttttgtgaccttcagtagtgttttaagtaagttttcttatatatcttacacatttgttgttaaatttattactagttacttattactaggtgtatttcattttgctattataaatggggtattctattgtatgttctatctggttggagactttaaaaaaataggaaaatgaaatgtggcctttcagaatgtatgaaatacagtcatgaactgcacaatgacatttcagtcaacagtggaccgcatatatgatggtggacccataagattataataccacatttttactgtaccttttctatgtttagatacacaaatcccatggtgtaacagttgcctacaatattcagttcagtcacatgctgtacaggtttgtagacaaggagcaataggctacactatatagcctgggcctttagtaggctataccatctagctttgtgtaagtacattatatggtgtttacacagtgacaaaatcacctaagaacacaattctcagaatgtattcccattgttaaacaacacctaagtgtgcaactaatgctgtattcgtaagaatattcctagccttaaatacttaacattgatcaagtatataaaacgtataaaaaccaaattaaaaagtttaagaggtaaaagagcaacaaaataaacttaagaaaggcagaagaaagaccttaaagagcagaaaatagcaagcaaaacagaaaaacagtagaactgagaaataaaattaaaatctagttctttgaaaatacaatgaaataggttggttgaagaagagcaaagcacagactatataaaataaacacaattatatagagaattaatggactcataagagactactttgctcaattccttgtaaataagtttgaaaattctataaaaatataatttagaaaataattgaactgagaaaagatagaaagaaaatgaaaaagttgtgaaagttgtccctctccccaataaaaacagcagcatgtataaatggctttagaggagaatttcagcaaatatttaaaactctcaaaaactttttcaaaacatcaggggaaaaagtaaaactgcaacctttcttgtatgaagtgagtataatattgatactaaaaattgacaggaattacacacaaaaataaaactaaagaacaggctcactaataaataccaacacaaaaacctaaataaaatatgaaaaaacaaaaattagaagaatccatcctgaataagaaagatttattccaaacatgcaacagtagctcaatattagaaaatgtgttgatttcacataaattacatgataaatatatatcagtgtatctgacaaaattccacactcattttctatttttaaaatttaataaaatagtattcaaaggatactttcttaatgtaatgaaaagtatttatctgagcataaaatttagtcttatgtttacagaggaaacctaatgtttcctgataattctcatagtaaaataatgagataaggatgcccctataacaactacctttaacacattgaaagtactagccaataaaataaaataaaaataaacataaaataaaatataaaacataaaataaaagtaaatataaaaggtaaattgtggttgggaagaaaacaaagtaaagctgtccttacttacagatgattttattgtgtacttggaaaacttaagagtatccattataaacctgcaaacaatagggtaattcaaatagaaacttagtataaagaaattaaacttttcatgtgtaattatcactcctaacatttgcttgaagattatatttttttgtcatttaagcatcaaaataattattttaactgcaaaatatgtgcatttttatctgaccacaggtagaatctgtaatctctttgccattgatcttgatttcctatttttcatttaggaagcagtccacttcagacacatacacatggtcacatgtagccctggttgtgtctcagcaaggaaggcatccagtttcccttctgatgcagctgtgatgtcaacactttcagaaaatttgggaaacaatttgataaaataattagagttagttgcagtttgaaattaagctttatgctgctcatgtctattgtagctttccttaatatgtgatactttcatgagtaagaatgtcaagaatttagcatgtatgagggtggtaggctggggcttccagcattcttctcagtgaaggctatttgagtccatttgatcacatctagacagaaacatggccaggtaaaaagactgttctctcctgaaacctctcagaggctgtccccttttagactctgtaatagcaatcaactgatagaatgtgctttgggacagtcattagggataaattggggcagatgtacaagtgtgtgaaaacactgaaacttcaacattgcaattatcttcagggatccaatgttaagagtatactgtggatggaggcatggtttaatatcccaataaaacccctgttgttgtgaattccctactctagaaaatccctttaattgaagtttcaggatatattatgtgtacattagtgaaataatagccagattattatggagccaatattataagtcttcactgcagcacaaacatcagggattgaggtatagcaattaacctctgaaaatcaacacagcaaacacaccagactaatctgtagcacttcagtgcaggatggcccttgtccaccatggacttatgtggtctttgtcatgaagccacaagacagagaaacattagccaagaacaggcgataagtgaatctcaattgaaaactggtttttggtaatatttggtattggcacggcatattggctttctttttttactaacatagcaaaactctttagatacccagtaaattattatgaccatcagaacgagctcatttggtgagaagaagccaatgtgaccagagtaaggtgacacatagcaagaggtaatattttatacatagtttaaagctatccagaaaagagactgtttggaagtgagcacacctctcagtttttcagccagaagtagcaataggttccaatctgactactgtaatgaaagaaaactaccaaagaaatcaaagaaaactatacattaaggtgatttatttaaaataaggtaccagtaattatgagattactgcttttgtcgtattttgcagtagaagaatgatagagaatataaattttttcattgcccacacccaaattaaataaatatacatcacatataacccattaatctattgtaatgttgaactatccttattttcagaaagtgctatcttctgtaaaaggttaatactgttttaaccttttagcttattcctcctccttttctggaagacaaatagtacctgcaaatacaggtaactcttttgaaaacattctaggaatattaaagacattgttacacatgtttgaaaataaacttttcaacccatgttcagctttgaatcacttcattccagtgttagctcagaatggtaaatgcttggaaatgtatttacagtgcatattattatgcatgcaaataatattaaggaagtgattgtgactataaaagttctgagcattatttggtaaagctaaaagaaatttaagcaagggtcatgatgaatctttatggaataaccaaagttaaaaagaatttttaaagcctttataaggacagtagtaattcaaggaaggattaagtctgtcctgaattaaaacttggattttaagcaagagacaaccatagttgtagtggttttgctgttttggtgctggtgtttaattactccaagccagcacaatttgggtagaagcaccagaaagagccttcttatacctgcaaagctctttgacagtctattgtaatgcatttcaaccaacttataaatcattttgcagagactaatgatttattactgctgtaatgaacttcacaggcatcaatacattagtatccactttgaaaagaaacttgtcaggtcccattggaatgatgatcagtttactattgttattaatgaccctgatcagctctttggatctatgaataaccttcttagatgacagaggtcttccatttggcggaaaaatcaatgcatatgtaaaataaaagtatatgctgtgcttcatccctttatcaatgccagggattgttgtcagctttcaaagcttaaagcttcaaaattgtttaaaaatctacctaattcaaacctattaaaatgctggtgaatacatcctaaaaggatattgtcattccaattgcttgtctctatgttacaaaattatggtgttttctttctttctgcttgaagcctcagctggaccctggtggtttgacgaaaatagaaattaccatgttagggcttttttcttttttaatgttcagtgtcagacatttgacctgtgaggcttttaaaactgaccttgttgcttctttccattcattaaaccacaacctttgcactcttgtcataaaagataaatgaagattcacacaatctttatttaagagaagatttattgtttacattaatgtagattaagtggaaagataccaattatttttcaagtcaatcatatgtcttctttgaggtttcaatttgtggactgtttgtcattattacaatttctatataattagcagtgcttttataaaaaaaaaacatacgaatgaacaatgttcatagaaatcctacattccatactttgtccacttacccagataaagttccctaatgtgatgtttttggtaagtgattaaaattagattttaaaatcatagttttattctacaaggctgtcacactattaatcaaagctttggagaaatttttgaaagggtaattatttgtcaatgtagaaaatgattttaagaacagaagtaacatgaagtttcgttgtagcataaaactccctaaactaagaatttggattattggccacactaaaaatagtgaaatcagttgatttgaatgtataattttctaaggttttagtaggccacataatggaataataaaatagatcatttaaaaatgtttgatctataaggttgttcaatcaaagtcctttaggccatttactggtaagaaaactgaggccagagagtttaaggcaagacctcctgtctgaggctcacagcctgctggtgatagtgagctcagtaatggagagtcatgtgttgagcagaatgtggggacttcagatgggaacttaaactctgtcattgtaaacccagagtctagctctgtgtgccttgctccacatcatagatgtctaatgacactgctgagaaagtgattaggacacatatcactgagaaaatagaattaaaaaaacaaaagtagaaagcaggtgggtcgtgtacgtgtgtgtgtcagagaaatctatggtttgcctttattcagaaatgagtgtttgcaagcgagacattgttcttctgtaccttaaagagtggaatttccaattagggtggatatgtctctaatgaattctagatcctatctgtcagtgaagcttgcatgagacagttcgaagaatcttagagttgatagtgacatcatccagttaactcttttcccaatgcactcatatgtcctacaacatctccctcatgtatttgtcaagcctgtgctgtgatactttcagtgatggtagttgacttctttgcacagcaaaccattccagtttgtctattgttaaaaggtcttctttgtgttgaacttgaacttacctttttaacattttttcaaaattatagtgacattggctatgttcttaaagaaagtgggtcaatttctaatgaaatccatctgacttcaaggacaagatacccttaaaagcttagacaattgcagagcaaagcaggggctaacttcagtggaactcattttgtcaagttctcttaagtaaaccagagctactatgaaattgcagaaacagctaagaaagatatgaccaaatttggaccactaagaaatgcttctcaaacatcaaatgaaattatctattttcctattgttgtttggtgtgacagtagctgcctgtccaatgaaagataaagtcatcgtgaagccaggcatagaatgtcctagcacactcaagaaaaaacaagagttcaaacaaggagtatatgttaggatgttaggatgatcttcttgttacattcttatgccatcctaatagtgtcaggcaatgccattagggtgacataacaactggaaaatgaaagtgtttattttccctaacagtcatggttcaccagacatgcactgcagtttcctgaaatggctactgaagtgggagagcttagttttagtcacaattgcacaattacatgaacaagttacttacatgagggaagttactgacatgaggcaagttactgcaaaggcaactgcagtagtaaagttaccgcaaaggctaattacatgcagcaagttactgcacctttttgaggactggtttcctcctctgagaaaaagtgaatattatgccttccctatccatcttacagggtagtttgagatgatgtgtaatcacatttcatgataatgacaatacccttagtatactcctgatactgcggcttggtgtgcatgtcacctttcctaaactagactttaagctcttagcctctaagcctttttttttttttttttttttgagatggaatctcactctgtctcccaaactggagtgcagtggtgtgatctcggctcactgcaacctccgcctcccaagttccagcgattctcgtgcctcagcctcctgagtagctgggactacaggcacgtgccaccacaccccactaacttggtatttttagtagagatggagttttgctatgttgcccaggctggctttgaactcctgacctcagatgatccacccacctcagcctcacgaagtgctgggattacaagcatgagccacagcacctggccttactctctacgtcttaatggttcacatgtgccatgcaaggatgggggctagttaatcccaaagttcttgctgctcctcacaaaaatgagaaaaatccacgaaattcttttttaaagcaaactttattgtctttagaggataatactttattcgaagataatctcctaatttcatgagtgttgaaatgtatttgcttttatgaaatggtgataatgaaatagtaatcagatttgcagtgtcctcatttaacgaagttaaaagttggtaaatctttgtcattttcattactttggaaatactttgtggtcggtgaaatcctaaagtttgtggatccacattctgaatctttatagctcaatcccgctcaccccccacctcctcccacacaggggaggcccctgtgggagtcctcttccccaaccccagataccaggacaatgcctcctatataggaggcctgcagtcattatttgttaaataagtaaattaattggtgatgtgttttctttagaggctagctggtacattattcacatcttcatgtagctattcaaggataacttccatatatgcaaccaaattgataaaaagttaaaaccctcctttcaataagcccaataaatccaattgcttcttctcaagtaatgcgatgttaagccataaataacttagctggacagcacagaaacattatttataagcttcaaagacaatcttaggtatacgtaagtcctttctcagctcaccatttttctgtgagcaacttcatcatctcaggcccatgcagagctctatctctcacattttgctttagcatgtttagctttcagggtcttattctagcagaaagagagagaatgcctgcatttcctattctttaataaactatccagtatcccctaagaggatactcagctgcccgccactctggtctctcatgattattccctccagatgtagaaataaagtcttaagttcattaaaactctttccagctaatggctataataatagtattcaccatttgttaagatcttaatatacgccagatattttgcatgtattatttaactctcacagctctgaagggatgggttttatgatgtcccatcttacattttaggaactcaagctcaaggatgttaaataaccagccatccttttcccctttagtcattgcttcactctgcaatgccattgtctactgccccctcatcccagagcactgacatccaggcagataggaccaacttgcacactactgactttcctccaccctcaaggcttcttgtatctcccttacagttgtcccttgtcccaggaataatccctcattctagattagtagctacggaagctgctctaggtttcttcagaagtggatttcctatgggatctaggaagtctttatttttgaatgtttcaaaatagatatgaccattttaaaaagacagtaaagataataaaacataataatcctttattcagtgccattttttacaaggaagagaggaaaaagcaaagtattaaaaatgggttgtaccagtacaaggacatattacatgtgggtggcactataaaaaatattttttttaattcttggggatcaaatgattaaaatatgtattctgaggtttgtcatagatccatccagtagagccttgtttgttttggaatttggtcaactacaaaaccagggtttggttttgtttcatttagatttgtttttaaggaatgctttgtttggtacaagccagtctctcgattttttgcagggaacgtactgtggcattccccaaaggactagtcagccacagtaaagaatttattagatggctagattacatggctcagtgctcttggcatattttttttcatttataatgaagtatatttgtttgacgtaataactaaaaatatgtttttacttcacaatctccaagtcacaaattaggtgatttcttttgggccttaagtaggaattaaggaggttttcttgaaatgtggtaatgcttctttggagaaaattaatttttattctgttgggagaacatctgacttttacttaaaattctgcaagacttgagtgtaatttctaaattatatgcactaattgacattccgttttagccatcatggtaaaactatctaaaatagattgccatagaaacacagaaattcttagctatcatgccagtagtctaatatggtttctgtaccaaatatcaaagcatcatcagttctataggattctaattggaggcctttgcacatgaatgtaggtcttaatggaaatgagattttatgcattttccttctgttgcccttattcaaacacaatttttgttgttgttgttgagtttttttgtttttttttttttgagatgaagtcttgctttgtcgcctaggctggagtgcagtggcatgatctcggctcactgcaacctctgcctcccgggttcaagcgattttcctacctcagcctccagggtagctgggactacaggtttgcgccaccacacctggctaatttttgtatttttagtagagatggggtttcaccatgttggctgggctggtctcgaactcctgacttcaggtgatccgcccgcctcagcctcccaaagtgctgggattacaggtgtcaaccactgtgcctggcctactcaaacacaattcttacgtgatgatctgtctgctggcaaataatatattctcaaaaaatgcctttacaaaggtttctttcctttttatccataagagagctagaaactacagaaaagcctggggaacattaccaacaaggtccagaaaaatagaattcttatcaaagacaaatgaagctgagtgtgttacaccaacaatacgttgctcaagtgttgatactgtaaaatagagcttgactgattatttctctattttcaaatggcattgtttatctcaacattcacctaaagattgaggaattatttcaaagcagatttaaaaagaacaatgagtaagcctcactagttttaaagatgattgagaagaaagatgatagacctaaaattctaaagtttctttggcctgcaaaaaattttgtttggaattttaaaaaagtatgctatagaagcatattacctaaagaacattgcttggagttggccatctgtcctactccctgttcttttgatgttggtttgaaactagggagagcaaaggagtttttagattctctctctttttttttttttccaaataccacctaactttgagtcattgcctctttccaccctcctataaaaaagggaaaagaattgtgagtcaagatgggataaacatcagggataaaaagctgatggcactgctagtgatgagtatcagatcagaattctgaaatctcagagagagattgtatgcaccgtggttgccaggaacctttccatacctggcatatcagtgtttgattctgtcactgtgctccccagtcagggtaacctagagcaacctctgtcatcctcattaccctgagcaatcagaacaaatgattaagagtaagcaaaatcaattggaaagttttcctgaggctttttttttttttaatatgtaggctttctccaaatattcatctacttctgcaatgaaacagaggttgttgctgggattagaaagtgtttgaaaggcctgcacatgttagtacactgcacgactgcatatttgctttggatgacagacttgtattttctttctgcctgaagagactgtttgttttgtgaagtacaagttaaaagagactgcatataacctacaggatgttctttcagatccctgattacatatatctttggtggtgtgagctttattggattatgtgcagttctgtgattccactaaccatgtgtgcaaacagcaggcaaggttggagggttattaagaagtcttgttgagtctctatttcacaagatcgagaaagtgaatacatttattctaagtcaagtgtgccaattcagaattgaggaagcacaattttgtgcgggaccacacattccctctggtgctactataactagcaacatttatgcttttattttcttgtctgatgcgtttattatggtaaagtgcatgtcactgttccatagctattttaaatatgtaaaaaccaaatgaagactttcatgtttataggaaaatcacttaaaaatcatacgtaatgctgcaatagaccacctagatacatcactgttataattaattaaaaggaagacacatggaaaatcttttcgtaatgaaaaacacaattgtgaaatttggttctagcattggttccctttgtaaactgagatctcaggaactaggacataagtcattctgtaaatgcaatcctttagtcaaaatacagtctccataaatattttagcagcctttgtgatgcttttaattctacatcatttcactttagttcacttcaaagctaaattattaacgtgcctcttcctaaaagttcaaaatataatatactgaagggactttactaattggaattcagaacattctcagaatgtctgaaagtatattgttcgtgtttatttgcatttctaggagaaaaatgaaactggctaggcaaaattgtaactatttccttccaccagcagagtgcttggcatgtaataggcactccacgaatagctgtggaatgaaagttctcaaacagaagttttttattctagcctttgaaatgttgtccttttttgctccttgaacacccagaccctttatgctacccgctagctacatgtagctgggcatctgtatcttttcagcctccgcaggacaattccctatgtcctctttgactctccttcaaagccacattcgctcagtgaaactgatcacataaactttctgaggaaaacaatcagattaaagtaattcaaaccaagatgtgaaggatttgggctgactttatatatttacagttgtcctttccccccaccccagcattttaaaagagggatatgttgattcaaattaatgaatgcgtaaaatagtgcattccatccaaagtatttggagtttggggagctcatctagcccacatcaaatcacaacacattttattctgtctaccaggacccaatatcagcctgaattaacccaattcagatgataaaattcaaggtaataaaaaaatgtgtatacagtttctatcatatattgctgagcaaatatctgtatttccatttgataatacatagcttccccttaatacatcatctgtcagaatcttctcttaaaaaaaaaacaagattgtacactaacatgtattttgtggcaatgcttatgtttctgaaatatccatctctatacttagtttattagtcaaatattaatacctggtagaaaagtaaggcattctcggaaactttattaaatattctaagttaagtatacaaagaaaagtaatctaggatctgaggaccagatcagtctgtcttaagcaacaattacaaccttgattatactgacttacgctgtttattccttctttcataattcatgcaatacacataccctgaagatacagtcccagaatggtcagacctcaggaatcatctggtcacatcctcgtattttaaagagcaaaaactgaagcttaaagactatttgtgattgccagttgtggctaacagagaattgaatccagctcatctaacctttccagaacttttgccaacatgagccataccctctgctcacttctttttcttccactacgtataaaaccaattgccaaggaatatcaccaaaatttcaaagatactgaaccagaactttggtttaaattattctaatgcatagccatgagattgtaaattatagccttttaaacttattatgctctttttagattgtttttctattctaagagggagtcacttttctgagtctaggatgtcatggagcctgccctgaaaaaaatccctgaattcagaaaatcatctttgaaaaacttaatgacagagagaaaatgcaaaaagttaactattaaattactatatactagtacatttctcccttaatagacaatacatgtaatacctttaacttcgagatctttgagtgacttaaaaagagtttctaaggaagataagttatttgactcagcagaatttcataattcttgccaatcatgttagaaaccactacttttatttttataaaaaaataaaataaaagtaagctgtaataaaaatctccttagttggcctcccacatgtgaagcagaagcagtgacaaatgtcaccaccagagaggtcttgtacttatgtccaaacataccaaggaaagactccgtgaactgtcggctgtactcagaggtcttctatgtccttgctgactcctagaacaagggaaatgcaggaatcttcctcctgagtgtttagatcgagcttgtccaatccatggcccacaggccacatgtggcccaggacagctttgaatgtggccccacacaaatttgtgaactttcttaaaacttgagatttttggcagtattttagctcatcagcgctcattagtgtcattgtattttatgtgtggcccaagacagttcttctccaaatgtggcctggggaagccaaaagattggacaccctggtttagatatagccttcatggtggataagataaagacatagtccactaagttgtcagcaataatgggaattccccgccttttagtgttagacaccctacatgtttttgcatcctttgcaatgttgttttctactcctaaaagtttttcatgacctcatatctgtgttttaaattaaggtggattaaaattttgccttcattttgctgtttgcaacctctattgagattttttggaattgactccaatacaagtagactttcctttctcaagaataaatagtgcatgattcttgtccttggctctgattttctaatcttggctctgaaatgcttcaagtaggcgaatccagaagccaacgttaccttagcgctcacaaagtcttaggaagccaaaatgtccctgggaacacatatattcttaccactgtctacccacacacactcaaaacatctctcactctttccttccctaaaacaaaataaaaattccatcattctgaataggcactcctgtattactaaactaaaaaactttccctcctgaaattttaataccaaaagttttttttaaaaaaatctaccaaagggcagggggcagagagagtaaaaatatggatgggcctgttagcacacttccagcacttagaaacctgatagaaaggataccaggcacagatggattaaagtcccttatagtagactcactaggtgaaaggaatactctggaagtttctttttcttcagtatgattaatgataggacccagctccttgtcatgcttggccaacaatagaccctcatctatcatggtttcccaaaaaaaaaaaaaaaaaaaaaaaaaaaagcttcctggcattcaggatgtgtattcctttcaagaagtgacaatgacaagtcactcaggaaatctctggtctctgcccttaaatagattatggaggagaaatatccaatattcatggaatctctggcaactggacagctaaatggagtctccctcatgagcaaagattgaaagtagtcagatattctactaaccatcttccaaagatgtttagtataagtttagtgccttccttttgaaagattccatcagatgccagcacaataagcccttagggagggaaaaacatcccgttaacattcttagctgcactttgattgacacacatgagattgtagtatacagacaacttctttctacttacaattaatatttttagaatgtagtagaagcatcaggatgcagtagttccttggttaaaaagacagttgagcatataaacatccagtctttttggagtagtaccaaggcaccaactgactgtttgggtccatgtttccagctcttgtagtctttgtagtacggacaacagatatgaaactttgtctatgaaaattttccctttagatgtgtttaaaagggtgcaagaagtcaaagactcctatgaggcaatgtgaaagaggattctttatggatttttagaatatttttcataatcttttaaagtatcatcatgttgtaattcagcagcaagtttttatgcagcatatctttagtcagtctttccaaagcattaggcttaatttataaagaaaccattctgtttgtatgcatgcaggtttaatcagtttatacactatttgaataaacgttataattgcattaacaagtacaatgagcaagaacattatttggggaactaatatacctgactcttggttagcatacagcttgactattgggagtaaaactggggcaatttttaaaaataagttttttattttagagaagtttgagatttaaaaaaatattgtgaaaatactagagagttgtcacataccccagactaagattcccctatttttaacatcttacattagtatgatatatgtgtcacaattaatgaatcaatattggtagcttcttactgtctaaagtcatacttcatttgtatttcctcagcttttccctgatatcccttttctgttccagaattccaccaaggtttccacattacgtttagtcctcatgtcttagtagactcttctcagttgaggcagtttctcagactttccttgtttttgatgacctcagcaattttgagaccatcagatttgtccctcaattggcatgtgtccgatggttttctgatgatgatacattaggtaatgtactattggggggaaaatgatagaggtaaagtgccattctcatcacatcatttcaagggtccacattatcagtatgacttatcactgttgatgttgaccttgatcacctgcttgaggtggtatttgtcaggtttcactgatgtaacattactcttttttttccctccctttccctactatactctttgaaataaaattattatattcagcccatgtttaaggaatgaggagttgtgctccccccttctgaaggtgtacaactacataaattatttgaaattctttggcattggagacttgtatgttctccttcatatgtgtttacttattcaaccctttactttaatcagaatgtgctcatgggtatttatttttatactttgtgttatgattcagaactattttacttagtgttttgctcaaattgttctagcattggccaatgaggctattttaggtggctcttgtatgtatttttctagcaaacactcaccactctgtatgtgtgtgtatattgtttggttttgtattttgtacatgttctatcttccatgaaaaaaaaatgctccagacttatcttgtatattttctgctcctgtcctagagcaagccatttttctaaggagccttatttctttttattggagaatggtatcagaaactaagatggctaggtatgctcattgctactggggttttattgcttcctggatctcttaactggcagattagggagatatatgtatgaatactgacctgtatatgtaacacatatctataaatatttccatatgtaaacatgtatctacattaagctaaatatgaattcatactgattgtcttcaactccagtccattgctgcatagcctccttctcttgctgtaacccaccacaatagtgagaaacttggcacccacatccactatccatttaaatcagggttccattccaccatctgccatggaatagtggtatccaatttgtaagtaaacccatgcccacttgggaagcaactttatgaactagggtacagtgcttatgtacaattcttttgcctttagtcttatggacttctctcatttccaaaattacttaagtcagcatcttattatcctgctcctttcaatgaggttgtttcatatgtttgcaatacattaagcttcttttgtcacattatacttttcatcctgagattcccccaatgtcctaaatagctttttaaatttgtatatattatggtttactttgtatgaggttaagttctaaaggttttgataaatgcctactttcctatatgcactattacagtatcatacggaataataccaccctaaaaaagccccctttgctttctatattcaaccatcttcccttcctgatgcatggcaaccaatgtttactgtccacatataattggaagcaaatgggatgtagctttttttttttttttttttgactggcttctttcaatcagcagtatgcattttaaagttcaaccatgtcttttcatggcttggtggctcatttctttttatcactgaataatgttttactgtatggatgtaccacactctgttcatccatttacgtattgaaggacttttttttactgattatgaataaatctgctataaacacttgtgtgcaggttttggtatgaacatacattttcaaatcagtagagtaaattccctggagcatgatggctaattgtatgtgaagactatttaatattgaataaaagatcctactctacttttttatttttctttcttttcttttggggcctggggtaggagcatatggattccaatcttccagcaccaattttttgaaaagactgtcttttccattgaattgcccttgctccttttccagagataagcgactatatttgtgtggatctatttctgggccctctattctgttccattgatctatgtgtctattcatttgccaataccatggtgtccacattattgcaagtcttatagtaagtcttgaagtctatcagtgtgtgttccttaactttgttctttggtactgtgttggctatactgggttgtttgcctttccatataaatttcaaaaccattttgtcaatatctatgaaatagtttgctgatgttccattgagattgcattgactctatcgattaagttaagaactgacatcttaacaatactgacccttttattccatgaacacagggtatctatttatatttagcctatcttggttttttccatcaatattttgtggttttcagtgtgtaagtcctgtacttgtttgttcgatttatgtctttcatttttggagtgctgttgtaaatggtatttttaaattttcaaattccaaattttcactcctggtatacaggaaagccttatatcctccatacttgctatattcacttattatttccaggagattttttttaattctttgggattttctacatagacaattatgtcacttatgaatagagtcggtcttatttcttcctttccgatctgttcaaccctttattttcttgcattgtcttattgcattaggtagaactttcagtacaacgttgaataatagtagtgaaaggggacatccttgatttgtttctgatcttagcaggaaagctttcactttcccaccattaagtatgatatcaaccataggatttaaagatttttaaaaatcaagttgaggaagttcttttccacccctggtttgctatggttttttttttcatgcatggtgttatattttgtcacatgtttttactgcatctatagatatgatcatatagtttttgttcattagcctgttgatgtgttagaatacattgattattggactgtcgatgtgttgtaatacattgttagattttctaatgttgaactttaaccttgtatatctaatgttgaactttaaccttgtatatctaatataaatcctggttgtggtgcagttttagatttgatttgtaaatattttgttgaggagttttgcatttgtgtttatgagagttaacagtctttaattttcttttcttgtgttttggtctggttttaatattagagtaatactgttctcatagcatgagttatgaagtctttcgtctgtttctaattcctggaaaatattgtggagaattggtataattttttccttaaatatttattggtaactttctgggactagtgattttttttggaagattgttaattattgattcaatttatttagcaagtaaaggattatttgggatgtcagtttctctttgtatgagttttagtagttgttgaattttaaggaattgttccacttcatttgacttctcaaatttgtaaatatagacttattcatattatacttctattaacgcttttttttttttttttttgagacgcagtctcgctctgttgccagactggagtgcagtggtgcaatctcagctcactgcaacctctgcctcccgggttcaagtgattcccttgccttagtttcctgagtagctgggactacaggcacgcaccaccatgcccagctaattttttgtattttagtagagacggggtttcaccatgttggccaggattattagctttttaatgtccttgagatcagtattaatggctcctctttcatttctgatattggtaatttgtgtcttcttttttgttgactagcctgtctagaggtctatcaattttactgctttctcaaagaaccagcttttggcttggttgatttttttttttttcctgttcttttcctgttattgatttcattgaatcctcctctaattttgattatttcttttcttctgtttggtttaggcttaaattgctctttctctggtttactatggtagaagcttaagttattgatttttggatcttcttttcttatatatttaatggtataaattttcctctaagcactgcttcggctgcatcccacaaattttattgttgtacctttattttcatgtagctctttcttaagttattcatatgttgagaaattttaaataactattttttaagtactttaggaaagtttgacccagattttgaaaacttttaaagaccaagagccatggtttgattcccacatttgctgataaactctgccatgtttggtgggtggaagtccctctatttcttattctctcttaattaataatagcccaggacttgaaagagataactttctcattagtccaccgtgcagaaaagccaatcattgttttttattgattctctatcatgtggactagcaaaagaatttacaacaaaattctattagtctgtttgcatgctgctaataaagacatacctgagactgggtaatttataaagaaaagagaggtttaatgaactcacagttccacatgggaggggaggcctcacaatcatggtggaaagtgaaggaggagcaattgcatgtcttacatggtggcagtcaagggagcatgtgcagaggaactgccctttataaaaccatcagacctcatgagacttattcactatcacaagaacacagaaaagacctgcctgcatgattcaattatatcccaccaggcccctcccatgacatgtggggattatgggagctacaattcaacatgagatttgggtgggtacacagctaaaccatatcaaatacaaaacaagacaaaactctcttgggagattaagaagctttaactgatggttctgcaattcagtgcctacatcctaatttcctctgagcctggttcttcaatgtgcctgaattgggcactgacaacagagcagtaaacaagtcaagcaaaaaagccagccctcagaatttagattctggtcaggagagccaattagtttgtgcaaattcgtgccctgctgctcaaacttgggttcacacactagccacattgacaccaccttggaatgttagaaatgcagagtctcaggcccctcctcagaacttctgaatcacaattacactttaagaggattcctaaaagattcatgtacatgttagagtttgcagagtcttaccctagacaatgttagattgtggttatgctgtgaaaaagatgcttgggttaggaaggatggatctacgtttaataggcttgtccgggaaagcctcttagaggaggctgccctcgagggagactgaaacgtagagccttattcatctagacccagccctttagtcccttcaacccccacccccagaatggggacagcgcctgcttatgtgctataccttgtgagcagacaatgagcgtttggggctgaaggccaggaacataagccaaataaaagctatctcccttttttttattaaaaaagaacaacatcaaaatataagtgattttagtctttaactaaaatacccctggcctatgaaaggggaaataaaatataatgtactattccagaagattctgacttctgtctttgccaagagtgttttttgtcttcaaaaaataaactgttcctggaaaattctattagcttttgtaaatgtagatgcagaagaatgatcagagggttttaaatttaaaaaatgctgggtagatattccttcttgttctcctataataggctctaaactttaatggtgcaagtttctcacttttccctcagttgatcaatgtaaatgagatttttcctatttattggagttgtcatgttgtggtcatataattatgctgagatattaaatatgtcttagacacaaaaattgtaagtaaatacaatacagaggaactttgagcttatttccatatcattaaaccacgttttacccataagcaaagtgcatttctcataacttgtaagaaatatcttgcctcaccgtagcacacatacttaacattcttttaaaagctactcaatttgacatcagtatttgaattcttctatcaccaggaaattaggggacaacagagttgcaaatatcaatttataaatgtgcagttagtaagattataattctattctaaatggccattctgccaattaacatttttttcaggaggctgggcatcatattgaaaaaatttacctaagttaagattgcctgggggcattggttaagaaaaggatagaaagcataaatttgtgtccaaaggtaagtacttacatagcagctgtttctatcagttactttgttgcaattaaggttttgtaataaataatgctgctattttttattcctgtggcattaaaatgtgtgaggcttatcagtctggtaattatgtaaatcctaaaataatttatcctttttagtgtctggcagtctgaccctgttggaggttattgaaccactgcttgatgagtatgtcagtcagtgtaccttctcatccagcaatccctgtataactaagtgcaagtcaactcttttacaatacagaaatttattgtttaagtggttctgttagtatatagacttaggccacagtcgtactttgttgttgttaaaaacatgtcactgtcagccaggcacagtggctcatgcctataatcccagcactttgggaggctgaggcgggtggatcacctgaagtcaggagtttgagaccagcctgggcaacatggtaaaaccctgtctctactaaaagtacaaaaattagccaagtgtggtgtcaggtgcctgtaatcccagctattccagaggctgaggcaggagaatcacttgaacctgggaggtggaggttgcagtgagccaagatcgtgccactgcactccagcctggacgacagagtgagactctgtctcaggacaaaaaaaaaaaaaaaaaaaagccactgtcattaccataattaagaaaaaagatagtgaaatgacaaaatgaatattacttctaattttaaaaaattcccctggcagattaaaatctctactaacgactccaaacaatactctcaattagctgactcatattttctttttcttttctttttgtttttaccacataaagaccgaaaatatatttaagaagggcatgtccacagagcagcatacaattgctttagtctgttccatattccataaccacaaaacttcacaattataattgaggggaaaatttattctcttgaaatcctttcaagattttattgagaatcaggtatttaacagggacagaaaagcaggcaaaggcattctagaacagttttcaacaagaattaaaactaaaaaaaaaaaagtacgaggataccaaattaaatttttaaaaacactgttttctgagaatatttggacattttaccaaaattgtgttatcctgattgttggcatgaatattcagagttaactgcaaacttaattgaattcttattctgagacagccttccaatatataatggcagggaccacaccagagtcattataatcaacatatgtattcattactctcctgtggttaaaccccttgtacacaattttaaaagcttacaatggcctagaaatggttccacaggctttgctgggtctttaaggtcaacatctcctcagtgtctcacccatccaccaccttcctcagttagattgcatgggagagatgccacttaatggttaagtgggaaaagttgtcttcatctaaaactgaatgtagggaaagctcttcttttctgatacaagtttctgataccagctctcataaacccatcaagcatccatttagtctttcactgttaaagtgaaaggaaactgtattttttaagcgaacgatgtctactcagtgtttatgcctcacaatgaatttgttccaagttccttttccctttcaattttgtctcagagagttattaagctttcacataattaagccatgatccccgtctgggcccacagtaagacttgtgcactctccaccttctcttacagagtgttttgctttcattcttcccttctagaaaacatgctttactaacaagtgaaaggcactgattgacaagtgaaacaatataaagaaaggttttgatggaaatgtttgtcagtcactctgtgaaagcataatttatgtggcaacatttttagctaatgaaatgaacgttgtaaagctctagataaaaatggctactgttgctgtacccataaatgttttttaggacccaatgaaaaaacccaagttatttttgaaacgttaggcccatatttggggactggtgaaatggtctctctgctaatatagtatcaaatggtagtgtattttttatttttgttttttgatttctttcagttaaaacaactttatacctcagaatatattctgacatatagtcttgaaactacagactaagtctagtcatcctaagacttacaggacaatacacttaagaatcacattgctaattcccaaacagaaatcaaactgtcagatagcttttagccacattttttaaagtataatttgattgtatgttgaatttttgaggttttaaactcatccttatcattggatgaaaggccacatgattgttttatttttgttcaattttctttcacactatcttagacatatcattacttttatgaaaatatagcagatgtactgactgtcaaacaattagatggtgtgtctgctgtcaattatattgcctccggagttaaattctactcatgtaccttctgatgttaaaaaaaaaattcttaattctaagtgatgctcactgcaattttaatgcaatgcagacagactccttgttgcagcattattctctgcaattctatagcagtgcaattttggttatagcaattaatcccctttgacttgtattatagtatgtcttccaggctgtgagttatttgagtacagggatagtctcatctgtctttgtttcccctaggacctctcacagtgcgaggcacagagtaagtgttcagttaaaaaaaaaattaattgaatttcctgcaaaagaaattagtgcattaaattcagtcattctaggttctagctgcatcctcccctataagtccttccaactatcttttgtttaaagaacagctaaaaacatcatcagatcatacactgagtcaatagtacagttccatggttatgatataggctttgagatcaggcgccctgtgacaaattgcagctgacccacttactgaataactggagaatgccctctctgttcctttgggtccctcgtgagtaccatggcagtggcgactgtaacagtttcacctggttgctgtgagtcctaaatagggtaattcatggaaacttcttagtaccgtgcttagtatattaggtgggacctgtcagtattagatatttttaataagagaacttaaaatcacaattaccaaaggctaagaatgggcatttgaggaaactgatatgaggacagttacctgcttgtgagagagagaccagttcaaatcagttgtgctgagtatagtcacttggagaaatagagattgaaaatgtgaaagatatatttcctatttttcaataatacctaaatttatttatgccacttgtcacacagggctataatcatgcaggattatgattttttttaacactttagaccataatgacataatttcaatgtatatttggtaggtgttaaaccagtaaatgatagataattcaaattattaacattagtgctttaaagtcagtcactattaaaaccttattattagttgagagggtctatgttagtggacatggaactatccccccaaaatggaagatatttgttcaaattaaaattagaacatgtagttcatatattctaaatgaacatgtgtgcctctgtaataataactttattatcaccaagttacaggatagagttttaattatgatctttatatcagtagaagccatgtatttaggattaaagacctactgctttagctagtctagttaaagactatggcttgatacattctgggctccaacttttataaaaaccagagaatacttctaataacacttttctaatttcatggttcggtgcacagtcagtaaagatttaaataattcagaaagaaagcctattctctttctttattagaagtttgagtcaggcaaattctttgacatttaataggtttttaacccttttaataactttttataatgaaatttattggctgttgttttaaagaaaggatcattatattagcatgaatagcagtcactagtttttatgattagttttgagaccttgaccttatgtgactcaaagtttataaaaccataaatgagtgagtgatgttaatattaactaaattaggtatacctagaaatattgagactatatataattacatctatcccattatctaacatgctataaaattttggcagacaaatatttgaatcttgtaattgttttaaaggagcttaaggtcacttacagagtcagacactttaaaatagctgaaagacattgtaattttcctagaatgattgttccaagttattaataccatgctcaaaaggagaggatttccagccttttcctgtcttcgtttcatgctattttaatgttttataatgtattatttgaaaggattattggatgatttccataataaaatactaatgtaaaaattgtacttttcttcaagtctccaataagttggggcatacaagtattctgcacagggaagctgtctggctcaagcagaatataaggttttaattttgcttcttaagatgtatttttaagctgaatgtcacgtgtatctaatgatttaagtgcctctaaatgaactcaaatatcaatgttctgaactgatgttaggaagtcaatatcccacttgacatctctatttttgcaagcatcccattaacattccgtggaaaaatatgagaaagcaacttaaattcccaagtttaaatatggtgtgaagaagcattcttgctagctcatgctgctatgaatacacagaggtagttctagtaagtgatccgctactcccagacggcatgtctcccagtacgtcccaattttcttattacttaacctacacttccaatccattctttttatttcaatgcacacaatcctttgaaagtattctagaaataaagcacattattcagtcccttctctgggcacatcaaaacaaaggagatatgagcaaacagtagcatgtttgatacacttttaatataaaatcatagccccttgtgaacaaaacactgcctacactttgtagcacagatgcaaaagtcatgatctatacaaatacaaataaaaggcttcgttgattctaatcataggtagacccagagcacattcataaactccccttaccagagatgtaatttgtaggaactgctaattcagatgttttgggaatcagagggtggaccacatgatccccagagctcttttagacaggacagaccctttagtccgtgagcctctcatgtcctgccattatctgcagttatgagagatgcaccttgtcaagtaaaagtaaactttgcctgttgcccatttgcacatttcctttattttcgctgggcaggaaagccctttcaagggctcactgaagcacggtgtgtcaaacttggtaatattgacgttgatagtttaagattcacagcaggaaacaaatggcattggcatgaagcaatcagaaacgaggtggctcaatctgagtaaaaaacatctttccaactgtgcagttaaagggcaacgctatacgccataacctcctggccgaagttgtgatccaaaagagagattatatgtacatagttgatggaaaagaatgctgtcctatgaactggaatacctttttatacgttaaaatgtttttgaactttgtatctaccagttagcctattagccttgatcagggagctattaaaacccaggttataagttcaacctttatctgtgctgttgactttctctcagtgaaaccctgtgctctgtgactgtaagctgccctgcttatcccagggaaggtccccatagatacaagcttttggctgccagaatgtttggtcataattgtgtcagtggctcaccagggaccagaactggtcagggaaagcaactcaaggataataaccgaagagaaccatcagcgtgagcagcaaccacaaaaatgaattcatttgtgacaaaatgcattcgtagtccttatcttagttaatcctcacagtcatgttttaaggaagcatttaaggtcagtacactcctctcctatttgtctccttacaacatctcactgtcctaaaatatttattgtcttgtctgtctcttccactaggaagtgagctgcatcagggcacgaattccaactacatggtcaccactgtggaccaggtacctaagacagtgcctggcacatagcaggcactcaataaatatttgttggtgaaaaattatcctctttttatgagttgaaaaatgagggttaaagaagttgaaagtaagacaactcattagaaacagtggcagctaggtgtcatgaacagggttgcctccacaatagcacacggcccccctctcctttagagaaaggaaaaaaatcgaataaaatggcgtaaaattgctttttcagttgtttatagatataaatccagatgcatacactagagcaactaagacacttctttctggatctgctggatgtggcagcaattgcagtggagttctgcagaggaggccaggcaagggcactaagggcgttaacaggttcagggtcccccttctctctgttgcttgctgctcttcaatatctgatctttggttcatccctgggagacgatgtacaaacaaacaaacaccaaaactggtgacatggtttttagccagtgtgatttttagccatcacttttaagactcttcagtgatgttttgctctgaacacaccaaattccttgagtaataaggggcccattcgtggaagaagccacaatggagagaccacagtgtaaaggagtgagatggtcaggtaatgtagaagtcaggcagtgtgagcactggtttctgaggcagttttaatcttctctgaagatggtggttctagagagtactatggctgttcatttggcaaatatctaataaattgtgctccagggttcttactttcttgtgataaattgttttataatgactaattaccctaactaaactacaggtattctattgtagcgtactgtaaagaaagctgaaccctacttgttgctattgtcttttgaaagaaaagcgaagattccaaatattaaatacaaaaacaattttgtttttggaaatgcagagttgaaatcaagttattctaaattaaaatactgaggataaaaatacatttttataaaaatgtccaacctttcttttgaacctcacttgtctcaatctttaaaaatatagcaagttctgtgcatatgtatttttccaaattttccctctttcattgttaattatcagtgttcagtgcaactaattgaagtctaatagcaaaaatcttaaaataaagtttatttaaagtacacatttctacataataaatagatcacaagaaggtcacgtaaaaacgatttatttaatgtgtttggacaacaaataattaagctctctcggaaatgcatttaggaaaataataaataaattttgattattaaatttccccacacatttattctgttgtatacatttacatattaattgaatccctggcaaaaatatgtaatcaaattggggacttaaataatatcaacatttacattcttctcatagactcttagagtgcattattcctaagaaaaatgaaaccgctttgccttcctgccctaattaatcatgcaggcctgcatggacagccaagagcaaggctcagaagtttttcttaaggtgctatgaacggtgtgtgtttgatagtgtgtataaaagggaccgagaggaagcacttgtcacagctaaagccagcagggtctccttattgccctggggaaagcactccacagctcagggtgtcaaatgctgacagacaggggtaaatggacgggcttgagagattcctcacgttctcctgctcctgctgcaactggcagccttccaggccttgcctgcaaagaccacagaaagcagcagctggtgagccacattagcaaataaggcctcagggctacccatgttccagcgctctgtgcaccaactgctattcactctaacagctggatcagagcagagccagccgaggcggtggtgcagttttatgtgtacaactgttttgatatagattgtctgctagaggcagagataatgatagctttcaaggctggtgtgttggacggggaaggatgcagatacttgaaggaggaatacagactctggaaggattgtgaagcacacagagttttaaacactgaaaggcaggccctccatcgttctggtgccattcaagtatgtgattttaacactatttcatcactaacatgactaatgttattccaaggatttttttttcaccattccagttacaccaaaatcttactcattttttaaaaataataacctgagatgagcacagggtttttatttttcttttgcttttcaaagaaaatccaaggagccagtcacagtggctcacgcctgtaatcccaacactttgggaggccgaggtgggtggatcacctgaggtcaggagttcaagaccagcctgaccaacatggtgaaaccctgtctttactaaaaatacaacaagtagctgggtgttgtggcacatgcctgtaatcccaactactcaggaggctgaggcaggagaatcactcgaacctgggaggcggaggttgcagtgagccaatgtcgtgcaaatgcactgtagcctgtgcgacagagtaagagtccatctcaaagaaaaaaaaaagaaagaaaatcaaaggaaagaaagtgaaaacatatgctgaaatatgtagctaatattgtgcctcatgtttgcaccttgagctctgtcctcaacgtggcactcttcagctctaggtaaccagacaaggggagaaaggaacatggccttagcatcaaggcaggtcatgagggacaatacatgacttcagctttggcttcctaattgattttaatgggacttttgttttgcattaattggaaaaattgaaatctcctcttcatcattataataccccttcattattttaattgacaatggtcatcaatagcaatgtaaatttttaggaaacagatctgtcttccaaaaaagtgaaacctagcacccattttcaaatggacagagttttgcaaatggtgagataaatattaagagccacgcaacactaaaatgccaatgacatgcaggacattttgccaagaaaatatgaagttcattaggcttgaaaataaacaaaatgaggaacacacacatgagaaattacctttgagacatttgagccctagaatttagcaaatgaagttcccaaaagattaaggatttataacaactatttatgtgaagctggcatcatcaattctaattgtaccagacctaaacatctattcagtgttaactcaagaaatatgtattgagttcctactacgtgccaagatctgttctagatactagggctataatggtgaacaaaataaattctctcccagctttttaaagtttataatctgttagggtgtatcagttaggattatgttgggctgcctataacagaaaaccccaaatgtcagtaattctgcaatgacagacatttacttccctttcactcccactgtaagtaggttgtccaggctccagaataatcacaccctcagcctcctttcttgtgccttcagcgtccttatggtgccatgtcttggtccaagatattttccctagctctctccatcacctccacgtttttgccagcaggaacttgaaaaaaaaaaaaacaaaggaaggtgagcccctcccttcatggagacttcttggaagcaccacacgaggattccgcttacatttcattgtcacagggccatgcatagctgcaaaggaagctacaaatgtcctccttgagccagctagaggggcccatttttcagcacaaaaggaaaatgagtgtaggagggtagcttgaggcttctgccacaaagggaaatggacattaatcaagtcttttcatcttgtgactaagaagttcccaggaaaaaagaaaaatcatcagactagttaaagtcagtttatactgatgaattcatttccttagttacacactgacacagcaaatattttttgaatatttggaataccatttaactaaaagatatctcaagagggattgaaaaatgcattagtcatgaactaatcaaggagattattatctagaaggtacatacatgttaaagaaataaattttaaagtggtgtcccataaagaaagtataaacaaaatgctttggcaattcagaataagaaggttcttggagccttatagataaggtgacctttgaacttgactttaaagtacatttagggtttggatatatgaagatggtaaaggcagcatggaatcgtggggaaagtacaagtatgtaaaaaaagtatatttcatttttacttcagtctttgttgatagaaagatctgagatcatttaacctctctgtgggcttttgcaaagcagctattcctacatggctccctcaaagggaagttacaaggatcaataagtaaaagtactgggcaaaccacaaatcactgagcaaagtatggggtttttcccctctttttaataactttagacagcaaattctcggaaaatggtaattgaataatgacagagcagcgtaaacaaagacgcatgattaagggagagagatttaggtaaaaaaggagcaattggatttgactgaacaatagagtagatgaaggatggttataggtgtgagtttcatttggaaggtttcatgtcatgctgaacagtttggatttaatttgggggacagatgtcattggagaatttttgagcccatggctcatgaagattaattttgtaccactctttggggtagatgtaaagagaccaattttagttaagcagctattgcaagtgaaaagataattaaggcctggatagatgaatgggtgtggaaacgggtggaagggcagatggaaataattgatgtttcagggtagacccaacagaactcacaagagtttggtagaaaaggaaagagtcaaaaatgactgcaacattttgagtagaggtgacaaggaagatgaaggtgtcatcaacagatattggtcagacagaaaaaaaatagatttgagaaagaaaactttgttcacatttctagcaagaatgatgtccaagtagtaatgtctcacaagcaattgcagacttaggcttggaatttgggtcagaattgtacattttagttgagaacatttcccattaataaaaccatggcaaattttatctgggtggaagaaatgtgactcagaataacatgttaaggaatcacttagaggtgggacgttgtagaaaaaagagaagtcagtgaaggggttgagaagaatcagaaagaacaaccattgcaattaagcatgacttaagtgaattattcaaaataaatttaaaatattggtgattaacaggaaataatattctgctacttcaggttttgcatttgacatgacagagctgtagtcaatcaatatctttacagcaggaaaccaatagtcaaaacattagcttacttgcatgatctaactaattattcatattttcagtaatcaaactttatcgagtttaattttccccatattatacattaggcagtgattaatactgaactgtctcttaggaaaacaaggtaagtggaaatactcctcctaattcagaaatgttgccatgggtagatcccactgtttgtaagtgtatctgaggactgaagacacagatatgctccctcatttgtgcttgccatgctccacacaggaaaagagtgctttgatttggtattcaagctgtctgcctgacctaacaccactggtgacaggatacattgaactaatgatgagactgtggaaagagaggtaccctcttgagtacttcaccatccttacccagattgatactttactcttccatagccacacccaccttcttctccttccattgcaagagtgggaatgcagattttagtgtccagagatctacacactacacaaattaacatgagaaaacatcttagaagattgcaagacaggggaggagagaaagtgcgataaagtgaagattgcttcaagcttttggaacacttttagttgtagtcataaatctggaactccacatgaaaattaatttagaaaccatcctctctgatatattaaaaccacaagatttctgaaaggatgagaagaaatgggctcaatacagacatgttacagactgtacgtgttttgtaacttgggatttatgtgaaggagaaataaagatagcaattagttacatacttttggaaagatcatttagttgaagtatgattttgctactaaatgcttttcatttacaaggctataaaacatataagttggaatatgcacattagtgctttatttggttcagggttgggaaagaagactgcccccctgtaggatagtgtccacttacaggtagccattactctgtgcccataatgggagcttttctgcatgctaagggtctaaaaacatacaggacttgaggacatttgacagtaggcctgaaaagaaatttagtatacactgtctcttctgtgtatttttaaaaatcagtcctaattttcatggtaccctctgtccttggcacaactttaaggatatcagtgaaagttagtattatttcataaagaagatcagattgtagaagttacatgtacatctaagaagaggcaacaaccattttagtaaatgtgactgaaggcaacatgaatgggctagataaaaccattgttgatttgggtagacaacatttgaaaatgcatttttaagtatctttaattaactgtaatcctttttatggaatatgtaaaatgttgaatcagctgcttaacacagtgggaagtatcaaagactggaattaggagaggtgggttttatctttggttttggtcaagtcatttgatctctttgggtttcactccttcatttattcatttataattatttatatacttattccacaaacattcaacaagcttgcactatcatcaccccctcccagttttcctcttccatagactgacagtgtcaccaagagcctttgcagctcttgcatgcaccattgaatagtaaaagctgctttatgagggacatcacagaaaggagaatcctgaactacttttgaaggcttggaggaatacagtttggataatggaaaaaacgttgattcggacttagaaaaggcaggtacaaatcatgaggccagccagaggtctaggataccttgaactgtgcgtgaagactgagaagtaaccaaagttggaaaggagctaaaggagtgaaattgactaataagaggcctcatggtggaggcagtaaatgcgttccggagaagaacacagggcacacatgggggctgtggacagcctcagttttagctttaggtgaatctaactagattggtaaaatgactacagggaaaatggtgtaaaatgattttactatcataaaaacaaaaacaagaacctatgactaggttacttaatttgccttcacagtattttcacgtcacaataacatttgcagacaggtcattgctaaacatctgatactttgtgggattttcttttctaatgaaacagaataaggtaacattattactttttcacttccaacgtgtaactttaaccatatatcttttttcctcacagttttcttgtttttctctcttgttttgtgtgccctctacctgcctgaattcctcagctcccctcaggatgaaaaaactgagctgctccaataagcaccatgaaatattctccattattttaagtttgaaaatgccagagaaatgttaagtgaaattctccatactcctcttatacaatacatttgacctctagataccttaaaagcttcatcctccaatgcttttaattctaatccttgcagagacaaaattcattgcttgaattacaagagtgagtctcattaaggctaaaaaccagtgactcagatagcataatggattaatatgttgaccttgcaattttagagctttactttcaagtctgactgtgcagtcatttcaatagtcaattaataattggttaataccagcctatcagtgttttgagtctggtagttaggagatcattttggctagtaataccctgtaaagctttaaactgagtacaagagtatacttattaactcccaaagcctttcttaaatgatgaagataaaacaaacagggtttaatgaatttttgtgaatattgtaatcactaataattgaataattttgacagacactctaatgagcatcaacatcttgaaacttacgttatataaatatgatcatgctgtaatatacaaatacatatataaataatatatttctatatttcactagtgtagaaagactgtaaatataattaatcacatcttgagtaatgaagtatgatgctaactggattctcaaattccagtcttttggtagtcttatgctatcctttatggtgatatatacttttaggattattttaccccagataaaataaatgtgtatgtaactcagcagaacatctggaaatctaaagaattattacttttttgcccaaaacatatttgttaaaattactcctttcctatttatttatttatttatttatttatttatttatttattgtagatgccagatatacgaaacccagaaggaactcagtacagttcccatcctcagatggcagccatgagaccaaggggccagcctgcagacatcaggcagcagccaggaatgatgccacatggccagctgactaccattaaccagtcacagctaagtgctcaacttggtttgaatatgggaggaagcaatgttccccacaactcaccatctccacctggaagcaagtctgcaactccttcaccatccagttcagtgcatgaagatgaaggcgatgatacctctaaggtatgaataagttatttttaggacctatgggagactattcttaggcaccttctttgacctgtgctgggtacaagtttatatcatccatgcgagaaacattggagggagacacctgctttgttaatgaagcatgaggttacaaacatactggattaaaccacctgcttgtccaattacactttaaagcccctgagaaatcctttaaatatagatgtgttaagcgtaaaagttgtttgtgcccacagaaggttgggcctgtatattcaatgtaccattttaagaaggcagtatactggggtacaatgaaggtcgtgtgtgtgtgtgtgtgtgtgtgtgtgagagagagagagagagagagagagagacagagagagagaggagatgtatggtgatgatgttacatgaaacctttgtggccacctgacccaaccatttcatattgaggacgtggaaagtaagtgccagggatattagatgactcctttcctgggtgattcattgcataccttttgttaacgccttaccaatatagttgtttatttgtgtgtctgtcaccagcagagccattcttttaagttatctgaataggaagatgggttttatgtcagccaccttttcttctttttaccattgtgagaattttgtttttggaaaattaaactgtaaacatgctaccaaaagcagcgctgtgcaatcctgatatacatggttaactttctagtagcttcgctaaattttttcagtccagatagtgattcatcgatttatttagcctgatgacaaagataagattgctgcattgactatattttcctattgtttgtattcttgatgttctggcatttggagccttaatcctggaaattcagggctagctaatttttagagattgcagacgacactctgctagccccctttctataaacaagccaacaattcacagctgcaccccaaaacatctcctttaaaaactctcacatatgaagccagtattccctctaccctacatcgcccctaggctaagtgtcagacaactagggatcactccttacagcccatagcctgccaaagttattcaaactatccagtcctaggcttactcagcatgccagcctgccttgcctattcctgcccacaaaatccccagtaaaggctctgggcatgctctgtcttctccctctttctgtctcctggccaacctgggtacttccctaggtggccctgtgggctctgctgtgccttctctttccagggatctatgaatggaaacttcttcctcacaatcatcatttccatgttttctgtcttaccatacctgactgaaacaaatcccaagtacgttttagaacagctgcagaatctaacactgcccaagccaatccctccatccttactgtctctccctgttgtcagtgagtcagcctctcatgagttaggtgaaaaggcaggaagaaactaattgatattcataaataattgactgggttgctgaaagccttgcctttagctgaccatttccagggcaataattttcttcagaaaatacaggttattccaatggctccaggtactcattggctgttagattacacctaatggccaatgagtacctgaacccaaatgtgaacactaataatttgtttgtggacagtgatttagattttgattatgcatgaataattcaagtcaatttgctaaacacagatgatatgtactatattgtaaggcgaaaaaaattaatgttctgctcatagtaaagatcaatttttgtatctggattgtgtctttatcagtattcattcctgacatttcaggaaattaaatgcaaaattagtagcatcctctgacagtaaattgtataccggattattcctaattacaataacatttttcacagtcttccacttatatgagtagaagagtaggtagaaatctgaaattcatagaattaacattcatgggttctgccatttgctattaacctgttaggtccatattttgtaattttgctaaagcatgaatttacatgtctccatgctgatatgaaactttgccagtgggtatcctattcaatcattcaatatccacatcttgaaataatttataacgcttcattttagtggactgtgtaagcattgcatagtaaaactcatattctatagtgatagattattgaattatcaatgcaggaaagtttagggattgatttctaagactgcacccattaaaatgacttttttatctgcacaaacattcatacgaattcatgttaagtttaagtgtattttccatctcaagaaaagtaacccttcattccaattctatgcactgtttttcaccttgtctccaattcaaatcctcctactcatttatttgagttatattattatatttatttaagctagaaaaatcctctgatgaaaatgttaaagcattcttcattacagttaaggattaaactggattttttcctttatatgtgagtaggatttatgtggaatgttgtagtgcaacagctccagttaaatgtgaaatagcattaagtcaaaaagatcatttaaatcatttctaacaagtgaactaaacaagaatatttagttccacaccagaaaaagcttttaaagctttcctcttaacactttgtgctgtctttaagcaattatatattgattccagctcatctaattgaacaattaaatgaaataagtctgttttgacagacaggaatattgtaaatacatcagtaaaataaattatcaccttataaacactacccgcgattttgattgctaggaaactgtgttgacagccttaagtcataatgagacacagtaaagcatcaaagaaatacaaacttaggcagcttgtggttctaagcctgtaatcccgtatttgtaatataagagatactttaagacacataaagtatctgacattacaatcacatttttggcacagttttctctttaaggaaattgtgggtaagaatcacattatatatttttctatccttttactttctgcttttctgttgaaaatatccatgttttatctgagtgtctcttataaatttcgtgtagttaaatgagcttttactttaaaatgaaatctttactgcatttaccttactataaatatgaaaataggcttgtttttctaagtatgttactttctgtttatgccacaaatattttatgtttcttttttttcctcatcttctttaagattgctcttatttttctcattacataatttcccattttgagattagagattttatattctttctcttctttcagtagctgtccctggaatacagctatatagaggtctaaaatttaccaatatctttaccttttttcttagattactttaactacatacaccttccgttcaatttatattgggagctgttattgttgttcattctaattatagtttaattgaattctgtaactgaataaacctcatgaaacactattttaattattttatgaagttatttttcctttggatttattcacatatatatttctttcacctgacatctttttctttatgcctttaaaatgttctttcatgaaggtctgcagggaacatgcttaccttaaaaaacacatttgctaggtatagaattctagattggcagttattttctttcagcgttttgaagatattatattatttcactgaatccttgttttcactattgcttttgagaatttactgcctgactgtctttcctttgaaagtaacctgactttactctctgactgcttttgagatcttctcttgtctttggtgtcctgcagcttcatggtgatatgtgtgggtttctttgcatgcattccgattgtaatcatttctgtctatcagcattttggggaaattttcattccttatttttttcagatactgcctctatcccattcttgctcccttctcatgctgttattctcaggggatgaatattagactttctcctttccatgactctttttcatattttctacttccttgcccctatgtattacattctgatttaacttattttccagctcgtaattctcttttcagctatacctaatctgaaatggtctattgcaattttaatctcaaatattttatatttttggtttcatttggttccttctcaaatgagtttggacttctttctttagttgcttgctctttacccatgtatttaatctcttttattcttgtaagcatgttcaacatatttgttttataccctcttttgctaatttcaatacatgaagtattttgaagtcagaatatgttggttttaatagcttgtttcattttgctttttgtacttttgaaatgagaattaatatttatgaaaactttgtaagaattcttttagagcttgtttaaaggtggatttctctggggatgatttatatttgtttctgccacatattttgaaccattagaatcaagaaccacacttggcctgaatttttcagaccacccacatagagtatgttcaggctacaaatcttgcaaatgctggcttttgtttgtgaatgaacacaagagattttgttccactctgcatttgtaacaaggttccagagcagccattcttgcatgttctgggaggtcacatacaagggaatgttacttcacccttgcactgacagtctaatcttttacgtcttgatttaacaggaccactcccattacacatcttgcttttggtaaggcatggggtttgtcttctgtctattgcactcttaactcaaattcacacgaggttcaacaatatcttcagtatgaaagctgcctttaatacacgcgtcgtctctgagttcacttcgtttttgcctttaagagtttgttactaatttgctagttcatcaatgcatgtgctctgccacactagacagaagcaggaggtttttttctcaaagcaaataggataaatcactagagcagcaattaaataagcctttagagtaggagtttttatttaccactgctctgaagacaagaagactcctggaataaagtagaaatgagaaacagacaggtttctacaaatattaagtgaaatcaaacagtgttagaaccaaatgtcaggttactttatctaactagcaatgggacagaatacttaaaactgggacttggaagtctggtattgtcatcattgaactgtacttatattgtaactgttcactttatatagtataatgtgtatgatacttttaaagtatgtattagatcacagcaattaaactaatgtatgacccttatttattttaaaaaaaaagtattctattcgttaaggctgagcctaataaactagttcaggagaaaatgataaaatttagtcagccatttagtacctggttccaaatcatctttcctaaaatttattcaagtaaataattatgccaggatatagacataccctagatgactgagcatacttaattaattcatggaataaaaacagaatgagacttaacatagccgcctagcattttattcagcgggtccccacctcaacagcttgccttctttgtaagcctgtaaaagccctcaatccaaaagaataagaagtaaacatatttccctacatcagtgaatttagaaaagatcaagtggatctcctaaaattgataaatttaaccagtaggtgtataaaataacaaccaaccttttttctctttaaaaaatcactttaaagtgatttttctggacattagcccagacttcctatttcacataaggccgctgagtgcctttgctaaactcattcaaaaatcatactcagctatgtttggcagaatcaaagatccttaaaaatgaaattgctttacaaactatgacactgatacaatgccccacacttgtgaatcatttcaaaagtatagcacttcatatgcatttttctataattgatgttttgagtcatagagtgtatcgttattaaagataataataaacccaattgtaaaatgaaagaagtattacagccttgctgatttcacagtaactagatgacttactttccatgcttatttgaatttattctcataaggggattttagatggcatagtttagaaaagagagaatgaatttaagtagcaaaattttcactcactgaaacatcacaaaaagtgctgttatatgccctgtttctatggagaggagtttataatatttactttatatgataagagttataagtggagttctatgttgtttgttcagcctattatgcagatggtgcttgattaaaatctattttaaactacagcgattactgcaagatagtgtgcattaaacagctctcccagctccattaaaggctttgggaccgcggcagtttattttaaatatgcttatagacgtttctaacttctccagggacatttcaatatcagtgattctctttctttgatagtcttaactcctgtgctctggcttcttaagaaatactgttatctaagcaacaccattagcacatgcttttttaaagtgaaagattattgttttcttgtgataaataagttaaatacatctctataattaaccaataagacatgacaggggtgaattaccagaagccttcaggcacctctagggatttgagaaataaatctatgtcttacgagtaagttacatgaagcacgtgtatctgtgtaaagcttatgtgtaatatttatttataaataatatttatttaggtatttgtgcacttatgtattcgttagtgctttaactgatggtgaaatcagtgcgtgggtaatcagggcgacatttagggcctcagctcagccatgttttagttgctatgattttcatacaatttctatgtttgtttcaaattttctttgcctcataagtctaagcctctgcccactgctgtagaataccagagcagaaatgtataatgatccattgcatgtaaaacactgtaccgatgctatgaaggacgtgaagattaatgggacctgctccttactttcaatgtgcttgtcatcataaggaattcacatttgtgcattatatggtttcttccatattctaaagattatgatggaataaaatttaactctccagtcttagcaccctggtaactttacaaatactgtatgtactctagagcagtgtccagtacaaaatactgtgctgtctaatccagtgacttctagtcatgtgtgactgcttccatttaaatttaaccaattaaaattaaatttagaaattcaattgctcagttgtactagccacattacaagtggcctatagccatatgtggttagcagctacccttttagacacggcagagagcatatctatcgttctagaaaattttacgagacagtgctgctctagactttaaaagtcaagtactctcagaaagttaggatttaaaattataagcttccatccatctatgcaagaagtccggatccagacaatatccaaaattaaggtccagggacagattataaatccatttagctaatttttctaccacagtcatatctatcatcattgtgtttatcccaaatagtttgtggtcataagagccaagtatctttcaaagtgcatccgttactgacatgaaaatggatccaaattacagcagcatttctgtcttcaaggaggctttggacacaacaatgatcatgtgtttttcacacatgtgatgaagctacttccaaaagtaggccttacaaattcccagttcattacacagaatctaaaatggcagctcatttctgcatcctttccacacaagaaaaatgaaaaataaaaaataagatccccacagatcaggggacaatgcccagtgttcataagacaaacagctttatatttcatagagcaaagcccaagtacttgggtacatgagagatcaaactacaacaaggagtttccattccattctattgcatttataaagagcaaagatattatgaatattcactagtcctttatgcaggaacattgagcaatataataaacaattccctccaaagtacattttatctcataaaaaatggagatctttcattcatagtttttcccccatatgtaagtcttcagtggaagtcagggcattgtcttagattatagttcagttctacaagggcaattttataaatgttcagaatattatgttccaagaatctagctttggtgatctagtttagttattgaaggagaggcagtgaatcttgagtaatgaatattttatgtgtatcctttagattggtcttctcagatgccagttttcttgcatggcagaaaattcaaaccaaagttaacatgagtatttaaagggaaggcatagtgtgatgttgactgaaagcagatcaatatgctcttgtttttaggcacaacaaagacaaagatgatataatcttataagactggctggtagtctgctttaatgggggcaacaccatagctttagagtctagtgcctctcaggtactcaatcagatatacaatggaagccccagagttacactctataatgcataaatgatgtctcctgagccttgaaaatgtggaggcagaagtcatgaaatacttgcttctattaaacaaaactttgagcaacattgcatccagctagccctccaggacaaaccaggaaaataggtaaagccttcaggcaactaacaaaatggattggctgcgtggaattatttaggcttttctatagggttgctatccattgcctcaaaatgataactggtggttttcatatgattgagcctcttactggcagtaacaagttctcctgtttcttcaggacatccctaaaagtagggcctgttgtcaaatgcaagaggatgactgtcctcctacctgttatggcaaggaatcacacttccagtagatctaaagcccgtaccatactgtccaaataccaacttaaaaaggagataagcatgatgatcagtgtttcaaacacaattttggacaatagaggagggaaattgtcttagtccattttgtgccgctgtaacagaatacctgaaagtgggtaatttataaagaacagagatatatttcttacaattctagaggctcaagaggcccttggcgagagccttcttgctgtgtcatcccatggtagaaagcagaaggacaaagagcacatgtatgacagagaaagagagagagagaaaaagttgtcttttttctgtcttttttgttctatccaggaccccagcctattgaaggatggctggccacactgagggtctgtcttccccacgcagtctgctgactcaccccagtctgctgactcaccccagtctcctgactcaccccagtctcctctggaaaccaccctcacagacacacccagaagtaatatttcaccagttctctaggaattccttaatccaatcaacttgacacctaaaattaaccatcacaaaaactatttaaataatgtggggaaatcttttaataagagcatttaaattgcatgataggaaatttatctctatgattgacatttgattattttccagaaagattgatataatctgtaatcatggagatttcaatgtgtcagatcattaattttttaattaaaatttaaaatgagtctaggtaatattccatatgaataagcattcatttatttctgtactttgttcccaatttctctcaatcgttgatgaaatatgaggattactctttttgcagctttattgaggtataattgacaaataaaattgtatgtatttaaagtgtacaatgtgatgttttgatatatgtgtacgtcatgaaatgattaccacaataaactaattaacctatctgtcacctcacctagtcactttttttaaaatgagaacgcttaaaacctactctcttaacaaatttcaagtgtacaacacagtactaactatagtcattgtgctgtatgttagatccccagaacttattcatcttataactgaaagtctgtacccttgaccactctatctttaatattcttcattgtggaccttgttgactccttttgtctccttttaaataaatattttatgattgtgaatgtaagagtggccatgtttacaaaatattatcattttgcattaatatttttattactactataacaaacgttaagcatttactacgtatcagggaccatgatacgtgctagtgggcaaaaccaggcccaacccctgccttcatagtgcctacacacgaacaggagtagatctaacaaccacatacattattgtgtaattacaagcttgatacgtgctatgaatggaaatatacagagctaaataagcttgacttaagtttgaaatatctttgagacttgcaaatagagatgtcaaataacagttgtttctgtgtgtgcaaaactcaagggaaacatgaacttgaccaccatccacccacaaatagtaatggaaaccctgcttacatgtgagattacctaagtacactcacaagagaagggagtttactgcaaaacaaatcaggaatcgctaccaattaatggccaggtggaaaaggatgaccctaaaatgattctggaaacatcaagggccagtgaggtaggagtaaaactcagagagggtggtgtcagggaaccagtgggagagagggccctcacagtgagaatcaggtaagggggagactcaagcatcaagcatccactggattcagcagtgtggccagtggagatctaattgagagctaatcgacaggaaagcacacggaagtaggttgcagaggctgcatcaggccagcacagccaaccacttggaggagtttggttgtgaaaaggagaaaaatatggccataggtagccttggggcacagaaaaattttgcttgtttgttttgtctctcaagatatcaaaatgccagttggaagagttcagagggtgtgactgaggccagtctcccacccataggcatctgctttaatctgtgtagggtaagacttggacatcagggtattaaaagctgaccaggtgactctaatgtgcagccatgtttgaggagcaccattctaggtcatatatatgcctatgtgttttaatatagcattgttatgccagtttgtcgaatatcaagcaccagacatgctgagtctctgacagatttacatggtggccagtgacttcacaggatcacctctctgatccatctcagggaagttatcatctagtgttaatctacattagcttgtcaacttggttcacagcatcctgtccccctggggttctttgatctgcttcagtagacaatttcagaatgatattctttttaataggtttctcaataaagacaaagacaaagaaatcacttagcttttgcttatctcttttcggtgcttaggtatatctttcatactgattataaggtatcacatattaatattaaagtattttccatccacccattcagtgaattattttgaaagtttataccttgtcataattgatatttgaatacgcttttaaacttctacacatatataaatatataccatcttagtcattataaaatggcaccatacctggttttcactagaggaaacagaggcccggagaaattaatttaaccaaggtaacagctaaaaataataaaaagaaggcatgaagcgagttcctctgaaatcatatccacagacctctctgtacatcatgcttcatctccaatggtggcagttattttacacaaatatcccatctaggaatttgtctaaataagatacatattacattatatctgcagagagaaggcaactacaaccaccacaatagaaggtgagggtacagaagctgcattgacacttcgttagggggcaaggcatgtggaaattgaatccttcagatgcagccctattttgtattcatgtagactcatataattttagagccggaaagaaatcctatccaaaatgctttattttagaggtggatgaattgatatcacatctagttagtaacaaagataatattcaaatgcagccatcttaaatatgttcaatgtgttttttcccagttgtatcagaataacaattaaaattatcaaaatattcatactttaggaacatgggagaaaatagaatctactcttaaattgagtaaaaaccttttctagaactctctagaatctaatttctggaggtgcactctccgatatggtagccattagtcatatgtagctatttaaatttgaacaaagttaaaaatttagctcctgattaactctagccacatttcaaatgctcactagctttatatggttagtggctgccatatagaatagtgcaaatcgtagaacttttccatcattggagaaagttccattggacagcactgatctagggtctagaccataccattctttaaaccatgagcattgctgggttttcctggcagcattccgtagatctagggacaaagtcaaaagccatttgactttatttattgggcatgctgcccccgaggttttaaagccataattagaaagacaaggatggctgggcacggtggctaacacctgtaatcccagcactttgggaggccaaggcaggtggatcaccaggtctggagatcgagaccatcctggccaacatggtgaaaacccatctctactaaaatacaaaaaattagccaggtgtggtggcgcgcgtctgtagtcccagctgtcggggaggctgaggcaggggaattgcttgaactcgggaggcagaggttgcagtgagctgagatcacgccactgcactccagcctggcgacagagcaagactccatctcaaaaaaaaaaaaaaaaaaaaagacaaggataacttccttagaagaaaacaagttagattgttcatccaatagtgttactaccagagaaatctgctgttgacacagttacagtgtaagagaaaaagttaggaatgttaaggggttgtatttaatagtgtaataatataaaaagagccaacttttttcaaagctaggtgagtaaagttgggagtaggatgaatatgaagactacttgaaatatgcagtttcatctgggaaaaaaaaataacaaaacaatgtgtcccttagaaaagcctgtgtttgagtgatgtgaatgggtatgtgtctaagtctcaaaggaaaacaacgatatgtcttgtccccaaattgtctcagtccccctataattctattttgatttctctttcagatcaatggtggagagaagcggcctgcctctgatatggggaaaaaaccaaaaactcccaaaaagaagaagaagaaggatcccaatgagccccagaagcctgtgtctgcctatgcgttattctttcgtgatactcaggccgccatcaagggccaaaatccaaacgctacctttggcgaagtctctaaaattgtggcttcaatgtgggacggtttaggagaagagcaaaaacaggtaagggattcccagtggaatgggaatctacataagctgagattgtgcagtctgaagaaatggcctcccagggcttggggtaaattctttagatcccagaacagacgctgagaaggtgtccccatccgaaccagactttctgagacgttcacataatgttatgctcctttattactcctccataaatagcatgttgattcctttgtttcaaagtttatatagtttagttacttttggaagcacttttacatatctcagacaggattgccttattccttaatgttgccaatgtgaacataaagactgaaaaaaaagtcctaaaagtattttgaaaactgtccacacctcttttcagcacttactatttaccattttgtcatcaaaaccctctttgctctttgctaaatgaacctcaaattcaagggtttccgcccctagccattccttaaagaccgccaggggctgttattcaatcccccaaatgtatttacaccatatttttaggctgtgttaaatgggaccagatgcctggttttttccttctctcatgtattgccctggtgtgactgaggaccatgctcagggaaggccacgtgagataccacggacacagcataaatagctcagaaggtcttaaagaggattggagtcacagagtgagggttcagtgagaggatggagccaacctaagcaaagaagcaatgttgatcccacatttctaaaccaggaactagatggccatggtcaccatctaaaaatctcagcatcacaaagaaaaatttaaaagcattttcattaaaataagtgattgaaataactgtgtaggtgcagttttagccattgcagaatactgaattgcattaatgatgaactagtctcatattttattcttaattagagacaccaatctttcctcattatgtccaggaattatataaatacagaaaagcccacacttatttatgcatctagaaggatctatatattgtgtttatattatatattaacatctataaagtatatagtgtcttatagttttaaaagcacttttgcattatttatttgatttgttctactcaatactcatagatatacagggaaattattacccaaattttgcagattacaaaatggggccatataaattaaattcattcatttattcaacaaatatttgttgagcacttatgtgccaggcactgttctgggcactgaggatagaacagagaataagacaaacagacccccattgtgttgaataatttatctacagttacatgcctggtacctagaattaccatgaataaaacttgtcactcaacttacaatgcttttcctaacaaaccctatgaaattaatgatggggataatgacaaaaccagttgctaaggaaacatagaacttgctcttccaggtccctccattctctcttttctgtaagtcaaagctgtcttctagaatctgaaatctctacgtatttccctacgtccttttcaagattgccagcctgaaggagtgctgtcctaggaaagcacaggcctgccatatggagctctgtgttgcaagagttttctttaagaacaggaaacacaccaccaaaacgttctctgtacactcaattaaaatacccactcaccataagagggtagttgacattgtattatgggattctaatcgaaacctaacatattgttgcagaattttaaagctagtttctattctaacttgggtcagtttgctctcaccctgccaaacctgaggtgtggttcccaactgatgttggacaatcagggtgaattctacagtgacttgacttctccactcagcagagcctcactgaatgagaaactaagtgtattccaaccagcaatcccaaccccctccctgttcccttaatgtcaccttaatgcctccctgctccacccatgacgccacatatgaagacatagctcgctgtctcctccagtaagccctctgtgtgttcttgaatatgcacctggcttcagtaccataaactttgttgctttgtgagacaaaatttcctgaagaaagcatcccaaaagcaattcccttccctagggattgggtacagcaattcttgttcatctgaagacacatgattcccccgtgaaggctcagcccctcttccctacctaagacttagtgactgaactaggagtattgtttcaaggctcgtttgtgcctctttagtgtctactttgccaaactcttcatttctggaaacatcaatcgcctgctctgccactcaccttacttctcttatctgtcctctgaccccagttacattttcctaatcattttccatattcaagagcagtgatttctaaagagggaggtctgcaaaggcactccctagcccacgattggttctttacattgtcaatattaaaaaataaatccctgttctcatgtttctgatggaaaagaataatgttcttatgatgaaaatcagatagttcctcaaggcagtaaatatcaggctgcagatttcttcccgctaattctataacactaaggctttttatttttaatatagcaagaggagaatattaagatagcattttgcattcattttgtctaaccatcaaagttatttacagaccccaaaaatatgagattcactactctcaactgtcatgttaaaaagggaaatcactcccattttcccattctggcattcagaatcgaggctggtctccctaatgtggatataattacaattatgtgcaaggctttttaattgtatatatatgatggcaaatatttttctctttctcttttgtatgtttctcttttgtaggtttcatatgttgcctagtttagtaagtaacttgtaatgagtctacctttgggttgtctctcaatgaaaatagggtttgggggagcaaattcattttataaaggataaaattatataatagttgacttatataaatcatttggtatcataaagcagtttctcaatcaaaatccagttgccaaaacaattatgccaagattgagagaaataaatttttttatcttacaaaagtaaatgttttaaaatttgaacacttgtttaagagttaccaaaacaaggccttgggatgactaaaacagttttggtcactctaaaatgatttgtccccatgctgtatgctcctttgacttcacagaagttcaacataacctatcatgtgaacctaaaagatgatcttgcttaaccaagagagtgaggctgcagattatgcctaaaggtatggtgtaggacacacgttggatgcaggcctgtgccagaaccaagcagggagagggtcaaattaatgaaatcagacgctgcttacaaaagggagcacattgcaccggctgggccaccgctctgctgctccacagcagcccttctctagcagtttgctagagtcatcggcagagcaaacgtgcctgcctgaaatgcacatttgggcatccagaaaatttcagcaaaatatcccaaagtgttataacagtagattaccacctgttctctccctttatgttaactcattgtgccaacatactataatatctccgtttcaagcttaaattaattgtgttttgttctcatttaatattcaagttggggaacacacatactgctatgtatttttaaaagaacgttcctggagcagattcgaggcagactattaaaattcaaaattttggacaaatatgcatgttacagaaccaaccatgtgatgctgttggcattgtgtaggcagctggttccggtggaaggctaagatttcatgtgccacaattgttccaaaatcctgttgtcatcatagcccacaattatgaacagctacaaatataaacacaaactgggaaaaatggtcaaaattattgatgacttattgggggcctcagaaaattacaatatttaaggaaaaacggctattagtgagattacaattgcatgttttcttgacagccagagggaacatgactaatagagctgctgtgtgtttatatcacatgcttcctcattgtggagtataggcgggagtaagaagccactgcagaagggcagatctttattttcagaatccatggtgagtgagaaacaatatgtactttggtttctgtgaagaatctttcaaagaagagaaatcaaaaggaagctgaaagaagcgataaaaatcctcaaggaacacaaaacctcccttatgaatcattcctaccaaagccactgaacaaactccacatatcagagatctccccattttaatactttggaagatggtactgaatctggaatgggagcagaattgtgtttgggattccaaccgggggttttaaatgctaatgactcgtaagacaatggagagcccatttcagaagcatactaagttgtttaaaatgcaccagatggagaaggaaataaaacataagtattgctgtgatgttggtctctgctacttatctttcacggactggaacctgcagagaaagaaaaataagttaacaatatcacaccctttgtattaggatcctaggagtttgagcaaccctcagcatcttttttatgaggttccagctaaatttcctgtttacctccattatttctgaactctctgattctggtcattgtagtggaggacctgggttcacagtgacaatatagaacaaataaaaccctacaaaataaaagagctcgtcccgctttgaagcagaaagggttggtccaaagagctataaagtgttcttgggtcctttttagccacggcaagccggctcttaagtgaaaaaggaaagtcaccttaaatcagaaccagatgtaaattactaaatgaaccttaagttcctaattggagacacagtcgggctgtaagacatttagcaaattacaaacaaaatgttcttgtttacattacattaaatggctttaaagctgcagccaaagagctaaataaacatgctgttttgctaaaaatggagtggaaagcctattcagagtttagtgtattcaggagaaaccacagcccacggtacccagagtgtatttttgtaaatgctagccctgtcgtggaagaggagagtggatttacctagagatccagaacctaatgagcagatctcacttgcagggaaactgtttgaatactgttaacatatgccttctttcaggatgcataattcatatccaaggatattagccatagcagttcagctcaatagcaacacctcattattttattcctcagtatttattcctatgtttgacgcctcgtgaaattactgttaatgtgtttatataagggcagatctgacacaagtgggaagaatgtaatttcctactcattctttcctgctgctgtgtcctcttccctggtagaagtggcaagtgtaaatagttaatttgcttcaattatgagcctgtcctgctaaattagaagcagcagggatatgaagagccagaattatacttatgaggcagctgacaaatcctctgagcccacagaatcaaatcatttcctcctcattggtgctcagacacccactacataatgctgttggggtttctttttcccctttatcttctgataaaatttggatttttatgtcaacaatacttaaggttaactaaaatcctgtcgcactgtaacattcacacatgtgtttatcttggccattttcttataaacattaagcattttcccaattttttaaaaactaggagtgaaggatatgtaaaacagttgctcacttaaaaactgtagaatgtaagcaaagtccgtccatattcacacaaatttgaaactgagcaatgaaaattattatatgaaatggtgagcatacttgtaaaattcaggtatttatatatatattacatatattatatacatattacatatattatatatatattacatatattacatatattatatattacatatattatatatattacatatattatatatatccacatatacaattattggtatataaatgtgattcttacatgcctttatgggcataagcatttgttttacacatatacaaatattcatacgctcagagaccatggaagcagacgtttcatttgaaattttccatgatgttggcaggaaaataatttaaacataatactccttcaagtctgttgtgctttatctataattgaaaaacatgtttgggtggattgtatacctgtatatcagtccactgtttccattgatgtacattgtaatttagaacatgcagttcagtttcatccttagcacacatgctaatgctgattcatagaaggagaaacctgagaccatggattagatgctcaataaatatttcatgagcacctactatgttccaagcatgctggggcttcagcagtgaacaaaagagaccaggccttgcagttgtatgtcttgagagaagaatcaaaaggagttctcatggctaggacaaaccattgagcaaagaaagatggaacatttgacaccagactcattttattcacaccatggttttaccatatacctgttctaatatattaggtaaaataattacccattctagtctgttttcttatctgcaaaacggggattatcccatattcattatgccaatgcaacatttttattgaaagaattagaggtaatatatagagtgcatgatccgcaaaatgcacacaatggaggcgtaatttttaatgactttttgattttaattttataacatcggtgcctcacaccacagtaggcacatactgggcactcaatagattggtaagcataactgaacagcatcatactttccttagtgaccttcatttaataaatcaacagatatgtattttgtagccattttttcaggcaaggacctcggttcggattcttaccattccagaaacaggtcaaaccggtgttgctgagaccatttacgtgggtcagacagtcctcaaaaggaatccatagcaagatgtttgtcacattgtataatgttttcaatcctctgaataccactttgtgaaggccttggagcctaagaaaatgctgagcgagttatacaagatggacatttaaccattaagttaaatggactaagttctatataaaatatagatgcacttgctctaactgacctaaataacaacagccttgaaagaagctgaaaattttaaatttctaaaaaatattgcagggaattgtggttaaattctaaatccttatgcatttctaaggattttctataaatatgaaatagtagtgggaaaaacgacatttgaacttacccagaatgaagaatgcctttagtttttggatagaatccagaattggaagaattttacattttttcttcttattattgtaaagactgttaaaataaactatgactagagattaactaagggccagagcagaaaagaaggaaggaagaaggaattaaatggtatttataagattttgcttttctatatgagctggatggattgtttgtttagggaagaagcagaaagtaaaaggaaaatgacagattgtatgggaaattttttctgtttgagtttgtcatatcgttgatattgaactgctgatttcaattagggattataagcgtatgaaaacgtgtatatgctggtatttagagcatttcaaaaatgcctcagtgaatcactagatcatgtgacaggatttgggttctctagaattgctatttgatgactatctacgtatgttttagtttagccattatatatgttttagtttagccactgagatgcaatccttagatgggatatggtagctttcttggaataaaaaccacagcatataacttagttaggacaggatgaactcaaacgtgtttagatgagtgggggaaaatgataaatgatgtattatgatttttaaatcctcatctggccaactttgtactttatttcaaacagctgtggaccatttggaagccattttgtaactcaactaaatactaatatttactgtatgaatcacatacctttaaaatatttgtctttccctaagagtgagagaccatttctttcctaaactgaactttgacataaatcagacccatccttgtcagttagaaggtctgtgcacttgctcatggcagtggttgttcattgccaaatgccgtgctgggacatctttgctctctgcaagcagaggactttctttatctatcattagaggctttgaaatgtttttgagagatttttttttgataatttttaaacatctttttttaaaggatttcccctacttcacctgcatgtggaatttttatatatcattatcattcattcatagttgaggcctttcttcagacatttccattaaatatagaattcaagcaacatccttgtccaattttagaaggtaacatcagaaagacatacagagtgtacaaaatgggagccatcaggtagttctcaaagattgaggtgctaattactgttgaggagactacctcagattttaattctggtccaggctactcccctttcaacacaattacaggaatctaccttctgaaatgacccccctttgaattctccctctgaacatctgcagctattcaggaaagagtgtatccatcaatccatgtaatgtgacgtgatgagtttactcttttctaaagtggtatttaggcacttatgcgatgatcccacatagccaatcatcaatagccaatagggagccatttgtagaaaacaggggactctgcatgctagtcaggtatcccgtaacaacatcgattctggagggaaaccaggggcatctatgcagcctgaaacatgtggagttagccacctttcttccctggttgttaagcaacaaatttcaggaaagttaacactttgtgtgatgttaactgccaggagctcaacaaagggatagcatcgtagtcacactgttgctgtttcagtagaaaccaatgaaagaaaaatgatagatgccgtagtcagaccatctggcaatactgtcttatctgccacaacttagaaaatgccactgtgggcaatgctatgaaccaaagtgcattctatttgcctttgaaagcaaaacgcatcctagttagctgaatgggagtcacttggagtagcatattaataaaagcatgatagaaatgcttagggtatacaaaaatgcattaccataaaagacgtattgactaaatgtttgcttcaaagtcctgaataggatttctatctgtatgggagaaaaaccctcttgaaagttttgaggtattaaaagcaaatgtaaacattgtcagtttaaggtcattaattataaattatgtctttgagaagagctttaaggaaaaactataaacagaaatctgtctctcaaaaaaaaataaatcaatgaaaagcaggagagctgtttcatggctgcaccaaggcttacgatatacacagatcacactgttcaaaggcacttactcgactttagcatttatttgttttcacgtgtgaatttccaaaaaagaatttgaatttgacttccaataattaactcagtaaatttagaatactcctgtgcttgaaccaaaggatttcttggctttgtgcttaaaaaaaaaaaactctgaaatatagtttttaaagtttctttagtttcatacttaggatgatggcacattgattatatgataatattgtactaattcttaattccttattttacttggcttttattagaccaaaatgccaaatacagaagtcaaggctgaagccccccactttaggagaaaaattagcacattcatttcatacagtcctgttataattctgttgacaaggttagtcatttgtttaccttaagcaaaatgttctgctttaattaaaatattcatgaataaacaatatttctcacatctcgaatttcatagctggcgttgggctcagcaaaccacagtcagcatttgaaaccataaattgacccctgctgccaaatggcagatatttggtctttagacataatttatatttaactactctgactaattctgaagccacttttcaatactgatctgtgtgtctgtttttgagttcagcattacaaaatattagccaagccttatgccctgctgtaaaatccaaaatgtgggaaatttaaaatagctgtatcaatgaaaatacatttccatttacacagtgaaggatgaaaaatattttgatctttcaggctgatttcaaaagattgccaaaaaatatactctaaagccttgaaagaatcaacttaatggtagcagagagccatgtgtgttcactttgctaatctttcattttcaactctaatgactgctcactgtttaacttagcaatgtgacctttagcatacaagcaagtcatttttcagtacttttgctcaatttaggatgattttgcttttattttcaagatgattccctctcagaaatggaaagcttctgtaaactgaaattcatttcagaacacttttaccttttcaaaatgaggtgtccacagacccatgacatccagtgtttttcttggaaaggacgtgaccagagtggactgcagggcagggcatgcatgcaatccacagccacttgggcttcccattcctctcccaaacgtgtccttaatcaccatcactgtttcctgagtctttgaaaatagaacttcaaggctccaaatcttaactcagtgatgaacctgcactctcccttctgtttcctttgatttgcttattgaacatgatttgtcatctctaaattctgtctttgtttttgtatttagcgtggaacatatatatcaggatgtgaatgtgctgtggagttatctgcccattatataaatatgaatgccttgtttactcacatgtggtttccctgggaaccttcatcaatagtatctttgtaagccaactacctctacactcatatctacccagataaaacctttcatatgttttatgtaaaagtgtaaagttttactgttgctaactttttttttcttttctagtctattgccatacttcttaaaaatctgtttcagtaagaaaacacaatctttggggagatatatattattatattatataactataagtgtgtttgtgtgtgcagttatcattctatattgtacttctctgaaaacaaaagcaaatgcactttctaatttaagactctttgctgttgttgcaggtctataaaaagaaaaccgaggctgcgaagaaggagtacctgaagcaactcgcagcatacagagccagccttgtatccaaggtaacgtgcagttgtgtgatattgtgaaggattgtggccatctcggcgcagactttgatagtcacttaaaggcataaaagatcactttaacgattctgcacaatcttctttgttggaaaaaaaagtaaattacaaacaaagctatacgatatggaaatattcgttcagctccaaaagaccagagcagcatcccctgggccatttctaaaatattgtccacctgtggatgattggttttgtggattagtcacagtacattcttcaacctgagccaactttctacttctccatatccctttcttaaattgcctccaggcccccatgccattggcctttactgaggacatgccaactctaagttctagactcattacagcagcattaggaggtaagcaggacccaaaaatgtttataaatcacatcattttgtttgaaaataaaaacaccgcttaaaaatatttagtgatctagaatatcttaaacactagttcttcctgttataaatacccaagagttgactgattggtttcatgttattaaagatacaattcccgttatggaattcttcagaaggtaacttcagagaaatggactgagtctataagcattagacactgttatctcatgtcgcaaattggctgttactgcgttcactgtggtctggggctctggacttcatcccatttccccttaggaaagactttttttctcattcacaaatatccagactcattgtaactctaaagtaattatataaattatgttttattgaggaaaatacatactgaatatactgatgcagagaagaaaagagagcccaaagtacaaatgcataagaaatttcagtaaactatttgtctaatccagtcttatgttctacttctaaggtatggcactgtgagaaaactttagttagatataatttaccttaaaatttctagcttttttgtattatctcacactttctaatttatctaattccttctgaaactatttatattttctgttgataccaactcacatttctgcatgtattacatagaatgtgtataaaattataacctaaaaagtgtaaaatattagatcaatatagccattggattaaatagtcatgtggatattgttaacagataattatgccaaaaacatagcggggcttttaaaaagttaattctccttatttcatccaagatcagattctttttgaagattttaaatagagttttagtcagagcactttacacaggagcaaatcaatacatgaagtctcaatcccaatacaaagcacactagttaatgatatgcagattgccagaatgctgtgatactgactaagcctttactttcaaaacaagtgtcctcagatttgctcttagctgcaacttttcttactattcagtttcagagttgcaacccgcagtgtacggcaatttgtataaatgctgcgaattgccatttctacatttaaaaaaccaagcactttttttacagcttactctgacatttttcttctctttggcagtagaaattttgctggagctgttgaatatctatttatgtacaaccatctattgtgtgtatacaaattgaaggaaagttacaaacatcctctccaggttaaaaaaaatgaccctccaatgttgtatgtgagtggatatttgcattgtaactttctagacatcatcagaaaattttccagcctatcctgccataagatgtaatcacatatataaaaatctaattcttttccattttaattaggacaaggcaaataataaccagtcatatttaaacatattttttctacattataatttttttactatgttataaattatttccctattctaaaagatttaaaggggcaaacagaaaatgctacatgatatattccataattgtaactcccaggaaccaccatgtgccaaccaagctctattttttccccaccccccatttgtatattcatttgaccaatcttcctgggcttgtgctctgtgccaagcactatgccaggctcagagaatgctgtggagaacagggaaatcctttccttagacttgaagaactttctctttcgtcaagggaaatcgttagtgaaaacataaactaataaatgattgagatttgagaatccaagtattctggaggagataaagcaagagatctgcttaggtgatctgcaaagacctctttaaagaggtgacattggatctgggggttgaaggaagacaggagcttgtagaaccagagagccagaggaaagagctggccaggcagtgctacaataagtgtagagactcagggtggcaaaatgtttccttgaattgaaaaggtctgtgtggccagagctgagtgaatggagagagtgtggtttgagctgaagttggaaagatgggcaggagcccaatcctgaaggacttgcaggacatttgaaaggcactgggttcattctcagtacaaagggaagccacagaatgggttctggtaagggacagataccctgatgggacttacgtttttaaaggatcatcttacgtgcataagttcccttaatcctcaggccttatcccttgaagtaggcttgattatcaacatttcactgaagaggaaagacacctgcaggtagccactggccaaggctgacattgacctgcactgccctcagtcttctgctgggccatgctgctcatgagtcctctcaatgtgctctcccgcactcctaaaatacccagtgcctcagagtcatggcacagcattgacattcagcattgacattctctctgataaggtcatttttgttcatgaaaagctgtgttagccagagcacctcgtccattttcctaaattcttcctagctactttgacttactcatccagagctatatattttagtacctattttctaggcaaggcattcatttccccaaatatgactttgcatttctaggccaatagatcctttcactaatttgtggccatgtcatagtcacagtctgctccttcttccctcttcgcccctaggccatactctgcatccagagcagggctgcaggacacttgttctatgtcggacactgggctgggtgctgagagacaaacatgtatatagcagatccaagtggactgtttcatgatacttgaaaggcctgaagtgatcctttaaaattagctgcttcttacagaacatgatcaaaaataagagcaatcaatgacctttgactctacctgtgaaattgagtcacaggattgacaatgcttcagtgattacttcttccatttaaaaatactatataccagccaggcacggtggctcatgcatgtaatcccagcactttgggaggctgaggcaggcagatcacttgaggtcaggagttcaagaccagcctggccaatatggtgaaaccctgtctccactaaaattacaaaaattagctgagcatagtagtgagtgcctgtaatcccagatgttcaggaggctgaagcaggagaatcacttgaacccgtgaggtagaggttgcagtgagccaagattgtaccacctgccctccatcctgggcgacagagtaatactccatctcagaaaaataataaaaaataaaaaagtgctatataccatctaatccagcagattaattaacatgactccaagctagaataacgttgaactctgccaaaaataaaacgcttaatcctaggaaacaaatattctcgcttttgtaacttccaatggaaatcctggcccattcttaccaggatattgaattgtttccaatagtaacaaaaatatacatggcatccgtctacagagtagcttctgtgtgccttacactgtggtaggcattttacacgtgttcctatttcccatcacagcaaacctgcacagtaggaattagccccattttctagacagtctctaggcagagagagtaaatggcttgcccacagtggctgtggcagagtaggactcaaactgcccactgtcttgttgcagagctttaggcttttctctaccctcagtgattctcaaatgtttttaatctttcaaactggcacctcattttatcgaggtaacaacctcccataaaattccatgccagctcttacataggaaacagctaagagtaaagctgccctcacttaattgagggtggagtccagccgactgcccactctgctacccccactaccaacagaggctgagaccttcagaggaatctgggcctgcagaatgtttggaaagcactgctttctgccatgctattccagctgggtgggtacctcagctggttgtgtggagccagggacaaaactgcccggctctggtcactcctgctgtacaagcatatcagaattgcaggatacatctataggacataggatgctgcaaacacagtgctggtcagactccaaaataccttgttcaattttaggctctgtcatttaaagggggaagttggaaaaggtcataaaattggctggaaggccgaaagttagaaggtagtagcagaaaaagagaggattcaagattatgaaacccagaaaacaaagactcaaaggtgtttaagtccacattggcattagacatagggtggtgattattcatgcttaattttctctgactacagaataagaaaataggttccatttcaaattagattaatttaatctgaacaggggacattgctaaactcttgaattgttaaacaacttctttccatagagaaacttaaaagcagaagcaaatgttataaataaggattggaggcctctaaggcaacttcaacctctgcactttcatatggaatcacaggaagcctgttctaggacatctaaaaagtgccacctctatcatactgggagagtcctcagactgaggagtctgtagtctctggggcgggtggatctggattcgaatcccaggtttcccacttcctaactgcatatcttcatgcagttccttgtatgttctaagtctccatttactcaaatgttaaacagagaagataataggacctacatcttagggtttccatgaggataaaataagcaaatctatacaaattacatggttcacttgaggacattatgctaaattaaataagtcagtcacagaaagacatgtactgcatgattccacttataggaggtatctagaatagtcaatttcatagactcaaagagtggcacggtggttgccagggctgggagagggggaaatagggagtcaataatcaacaggcagaaagcattcctcaaaccagatgaattagctctggagatctgctgtacaacattggacctagagtcaacaatactggattgtacacttgaaaatttgtgaagatggtagatctcatgttaagtgttcttatcacaatacaattaaaatttttaaaattcaaaaatttaaaaaataaacagcatgactcagcatcctgaacataggaagcacttaataaatataagctatgagtattattattaattttatttttagtattagtaggtatagaaaggaggggggaaagatttgcatatcattgaaaatttagctggatgatattttcaatttgtctttatatcaaaggctactttgatataaggaaattttaaaagtgacattaaaaaggaaaattttgcatcatagatgcatttctttataaagatatgatctagatataaacaaaaatgcattcatctatagttttcttaattgaaatgatctttatgaaccctgcaaagaggtccaaggatatatgctattatggaggcttggccttcccatcttaagcaattttacacgctattgaaggtcatatggggttggactgtcaaataaagcttaaggaaatatagtttttccatagactcgggaattcctagacatggatctaaattattatgctgaaaacaatgtataactatagagcaatggaactagtttcattttaccacatagaccagaatttatattcccaaaatgagtgttgcattcaaagtagtcaccttgggaggctgcaaactcattttattattgctcccagagttcaaaaaatttttgaaactcctcttttagaactgtagtcaggaaaagtttatgagccacattagaaaatcaatcttgttacattgttttcacacctcattcttttccccaaacatcacccagatataacccgcagacttggcttcaagtgactattagctgtttccaaaaatcaaattcaccatcaaaagacaaagagttgtctgaggatatgtaaaacagtgtctcacaggctctgaagagaattccagtagggaagctcccaaatatcccaaataaaggcagcattattgaaataagtgtacaacttctcaggattgccaacctggaaggatatggcatttggataactatgttctggtttattaaataaaggcaatcagattcatgattttaaggtcataacatcaaatataagattttgtttctaccttaaggaatagttcatgaagtgctaaaatttataaaggacaaatggaaaccttttttttttttaacgtacagaacaggacaatattgaattaagtcaagaaagttctctgtttccatagtcagtagtaaagaagcacaatgcttagttcaattaaaggaaagtggatttgaaaaaaacagtttctttttatagaatgaggcaaacttacagataccatgccatggtgagctatggagacaaatattgagtctgaatttgcaaatgggatggatcattgtatgactgttaacgtaaaatttgcagctctgtaaacccagatcgtgatttaaagataataaaatctcatgcttcagggtataagttaatcacctgcatggagcagaaagaattttccttccagaaggagcaatgcacaattgagtaggtgcataaattttgtttaattttcaatgcattaagtatcggtcagtgctgaaaacaagaatcaaattagatggactattaatttgatttggttcagcaactcttatattgttccttccactgatttttatgcattgtatttatactttgctattttaaataacaatagctttgtcaatctttcatttttatagcacatatcatcccagaatggggaaatttatacactatgcagtattatcttcattatacaaagtaaatgggattgaagctaccttcagtaatcaacaatttggttagtaaaaggtatcttcaggcttatagagttgtatcctttatacattttgcatatgtcaaaggaactccctacagataatactcaaaatgtctctatggccacgacccccactttatggcttgtagaaaatatcttccagaatctgtcgtctaaatgcaaataggaaagagaacatactcagaaactaacagcaagaacacattccttctgtgaaagtgtgggattcaaaggttgattttcagttgtctacaagctaggaaacacatttgtcaggtgaccaacatgacactcattgctaaataaaagtggttaatgtgtttaaaagtggaaacaaatgcaaattacttagtatgtatgagaaaatagttctaatttctgaatgataggtatagaagtcttcatatgcaatataattgatcagcaaaattgtagccttgctttcacagttaaattgggaaaaaatgacagtaagagtacattatgatttctatgtattttcatttaatcacattatgaatttatggcagtttgccactgaaaatgaacttattctacctatcttccagaacaataaaataactctgtaattaatagatggtctattgtactagactgcttaataattaatgaaaagcgaagccagaagcaggtttttcctcatctaaatgagtggaccattacataaacatacaaattcccaaagtatgggtgagactgaactagctgccctgctactgccattcccccaagaccagtgaggcataaagggcagtgtatctaaccaaaggacagagcggaaagctgtaatttctcatcacttcaggaagggtttgggtcctgccgagagcagagaagagcatgaggaaggtcaatctaatactctgtggcttttccaagccttcagatccttcctcactccatgggaagaggaacggtgtgtctggtcaagagggcaagtcagcaagggcaatggtggctgcctggaggattgctcaagaatagtcattcactccttagaaaacataattgtgtttttatgtattttgcactatggtagatgcgtgggctacagaaattcaagtccctaccatcaaaaaaagatgcccttttggaggaatcaggacatctttgtgaaaagagactacaggaaaataacttatattggagcacctgccacgttcaggcacaaggctggatacgttatttctgttgtcacagtcaatgattagaaaataaagggaaaatatatataacttccccaaattctccctccctctatgttaaaaattatgtttcaagtgttgtctgaatcattatctttggaactctatttactttgagtttgccaatagttattctagtgattaaaagttactactctttcaaagtaggttgagggggactggtctttgtgtgctttgatatggaggacataaatgacaaataagtggctagatagagaaaatgttttgtgtttaattatccatgaaaaaagagagctttacaaggttggtaataaagtatctcaaattaggttgctatctgttcacttctgtaaatctgtacatctattccatctctacctctgcttatctatcatctctctatatgatggaccacatacaattatttaaatagtagaattcaggaaaattaaattcattgtttattttgaattcgatatttttatttctttagccaaaacttacctcattatctagtaatatgttatatatagaaattaaaaatgaaaacatttttacagttacacatattttctacttttgatcatacaagaatgtgagtgacttgtattatttttaaattaaaaacaacacctataaagcaaaaaataaagatgcaccaatatgtatccatttttataaatatgatttctttctggtatgaagtcaacacagtctgtgactaaatatgaaactagcccttctgcaataggctaaaaagagggaattcaaacataccgaacacttttccagattacttaaacacacagacttaacacataatctttctggcatatacggaataatttttgaggcatatgaattgcagtacatgttattctgatgtggaagtagtcactgtttacacaggctcgattaacccatttgaccttttccttgaattgttaactattttgcacatcaacaataagaatttttaaatggaagccaaaaaaaatctacttaaaacttgttttttttttttaatgaaaagcacctcttaggagctacatttaataaagcttctttgatctaaaacctccccttaaaatttttgcatgaacagtttttgatgtttttaatgttaatactgaagacagggagtctatatgtttgttcctatttcagaaagctgcatcaacagtgtgacacaggggaaaatgtcagaatgagaggactctccaaaggggctggaattatttcagtacaccttactttatactgtgcgtggagtattcagagtctcacaggaccccaggtttccatggtttggcatacttttacaggtgtcagatgtgtcctttctataatgacagaacgtggggctgatcgtccacccaccccagcctgtccccgtcaccccaggagtcagcagacatacacagcatcattcttactgtggttttcatgaaacttgactgcattattgaagacaaatgagttgtgttgctaaccgtaatgtaagctgcctggtgataatgaagctacccggcctgagtttcacgctgtcgtgcatgatgaacccgtttctctaagggcctgtcagtgggttgcccggtggtgcattgagcagaaggaccccgagagccctcatggcacagttctccctgcagtgtggaaagtagtaagaaactcactttgacttgaaagctgaataagcatgacattgagattgcagagtaaaagcatatatgcgtcctcaagaccttgttttgacaaagtgattttttttctccaatccattttatcacttttttccttccagttggttctacctgctacctttggttgttttatcagtctcttcctctcaggaaatgtaggaggtaggttcaggcccatgaggaattgccacagggttaattcttgattcttttcagcctttactgaaatgttcagttttaaaatcaattaaaatattattaggaaatgatcatatgaaggtgcggaaaaaattagggcaaaattatattaatttatgatggagtctaaaatttctaagagagattatttttatctacttcattatggaggacaattcatcaccaacttcattttaaaactcaggataagttctgcagttactttgaagagtatattaatgtagttttatatgacttcagaaaggtattttagaactctgttctcccatatccatttccatcaaccagctttgttttctttgtgcaaatatctaggccaagtctctttgagaatataaaaaaggaaaaattaaaaactaaacctataatctatagaagaactccagaactgatttgctttgaaagtaatcttcacgtgtgtttcccatttgggcattcacggcatctgccttctcccgtcccccaccctccacaaacccatcttgtcaccctcatttggataatgagaaaagtcaccgagttaaaaacatttaggcaaaggaacaaaatgtcattgcagattgttttcaatttcctaaaagggatagaagctgtcttctataaatcacattacaaataatggtgaagaaattcttagatcagagagtccgggatagtcatgggtatggattccagggaaggtgctttaataaactcacaaagcgtcataccttgaatcaacactcatgtatcagcctcccaactctgctcatttatttcctcaacagagctacagtgaacctgttgacgtgaagacatctcaacctcctcagctgatcaattcgaagccgtcggtgttccatgggcccagccaggcccactcggccctgtacctaagttcccactatcaccaacaaccgggaatgaatcctcacctaactgccatgcatcctagtctccccaggaacatagcccccaagccgaataaccaaatgccagtgactgtctctatagcaaacatggctgtgtcccctcctcctcccctccagatcagcccgcctcttcaccagcatctcaacatgcagcagcaccagccgctcaccatgcagcagccccttgggaaccagctccccatgcaggtccagtctgccttacactcacccaccatgcagcaagtaagtgcaatggctctggacttagagtgtgcacccctattctgaagtgtggtggtggaggtggggggagctgtttatccaggacaggattggggatatgtgttttctatccttctatttaagtcaagagagcactaaagatattcaacaaatatctgctttctgtaaaatgtaatttacaagtggtgagttcgtgtggcattatgccatcacaattgacagtcacttcttttcataatcactggtttctttcccatgatatccattttgcttcatgtttctaatcattcttcttgttttctgtttcttgagtaaagtacatttgttattttaagataccaagtgctgccgaatctctttggaatagagaattctacaactttttaaaaaatattgtttggagatgagaaagtcttgactggtatgcctcttgagtccaataaatgctgaaaaatgaaatcaggtccaacaccaaatctggtagaaccctgaaagtcctaagaactgaacattttaaccagagttttatttaaaaatggatatctggcttctgcataaattgaaaaacacaggctgtttggaagcctccctacccactccctgattattgaaaccatttgtgtgcaattttagcttaacttttctttgaaatcaaatattgcttttggattttggtgttattttaaaatttgaaaattaggctcaaacaatataaactaaactgaacagaaggcatcctgaaatcctaaaactattttttaaattttattttaaaaaataaaagcagctttgcgcagtggcagtatcatagccaataaagtttatctgagatgtgattattgccagttgaaagcttctcccactaccctgccatgacaacttgcagtataattgacactggcaatcttttatagtctctatggagactgaatataattttttaaaaaaataaataaaagtaaaaactacaaatcacattaaatgcaggtatcacttatatactccaattactctattgttctccaagctataaggatataaggcaaacacagatttcctatagaattgatgtctacctctctgtggaatttgaatctttagttggactgggatcgagatgaagcggaaggagaggcagaaaaagaaatcaaatatacatagtccccaattcattattattattactactattattattgacagaatttttgagagctcacagtaacaagcccaatgcttttaatacaccacctcttctttaattctcagaaaacttatagtgtgggtatgagcattatcttcatttagaggaagacactgaggcttggcagagttaagtcatgtgctcataaggtcagagctggaattcaaacccaggtctgttcaaaactcagaggctggattctaaaatgctaggcttgctgcatctcattcacagtcgttcttgtagactcttaactctttcatatgagaaaacctgtatctcctaagaattcaaaggatctttaaattctggttacttctcaaatcaaagtcgttatgaagaacaaagggatttatcttcttactgaagtctttcttggtccctaagccaaagatactgttaaagctatgatgattttcttatctgcatccaacagacagttgttgattcactggggaagaagagtacgtagaaagccacttcccaccaccctgccttgtcttaagaggcatatgaccaagttatattctgagggtcaaattcccactcttcccatcagacatcaacttcaattaaagggacatacttgggtatccatgcatcttaatgaaccagtagtgtttgtatgaagaattaatggtttggaggatgccacccttggttgggtaattggcccctgtttgagggtgctgcctagctaaggacccatgttttgcttacagtgctatagttgggggctgtttcttcctgaaggaaaaaaaccaaaagttcagtttcctcaccatgctgcgggctggagctgtgtgcagagatctttttttctgatttatcaatcagagatgattactttttctatttatgctaacacaaacaccttggatgatgtggccatgatcctgaatagttttcaaatatttcagatttacataagaccacatgtaaaaatccaagagatttgtctttccatatagaatcttaactgtataagaaaaaatagaacagattacattggacaagttattcatcatcctttaagtcagttctgttagtgtatcccaaaaagtatgcttgctgagatgggaagacctgattacaatttacccaaatggcataagcccaaaatggagattaaatcgctccaaagactacattgactaagaactcttttaacaatgccttgatcatggtaagtagtcaaaataattgttgagtagtgaacaaataaacaaacaaatgagcagtaaaagtgtttcactgttagaaggatttaaagatcaggtagtagaatttcaatttcaattccttggaagtttttaaaaatgtaattgattcgaaaaattttaattgaacccctaacatgtggtaggcactatctaggctctggaaattgagtgatgagtgagaacaagtcatgagacccctgccccgtggagttggcaggggagggatggcagtggtgatatgataaacaaataacgaaggtcccctgaaaaaaataaaactggaagacagaattccagactttcagggtgcatgcaggaaggacagagcctttagctaggatggacaaggaaggcccttctcaagggctggcacagtgacctgaaggatgagaagaggaagcacgctttaaatactggaaagtgggaagggtgtggaggacgttcccacagacagcagcagccaggaaaggggactctagctgggagagccaatctggggatgagcatggcctgtccaggagatcggaaggaggccagtggaaaggaggggaataaagagagaggtaggggcaaggtcagagtcaagggcagggaattggagtgggatcctgcaggtgaaggggactggtatccccagagaactgataatcctaaaatcaggatcaaaaagggagtccaccacccctccacattatcacttcatttattgccaccgccacagtctgttggggcccacatccgagtcatcagttagtcttcagcctgtagatgcagacctgagttgtggataaaatctgacctgattcatcattcaaaacacctttatgctgaagatgtttgcttcctcatgtgggagccatgtggacacatccaaacaccagacagagagagagaaagagagacagagagagaagaacgttaacagcaactgtatttttaaaatagtgtctcatattccaatattactttagctattttattatccttttgaaaatgaatgtatcctacaaaaatgattgtgtagtccaccaggaataatagtttcatttttttctagaataatgttttatacactgaaaccgtggacctgctttttttgtccagttttctttcttttcttctgctcatgagattgtcgaatgaggtcaagagaaaaaaatcattaatatctgtcaacttcctttataaccttaagaaaaaatctttgtatgatatcacacagacagattttcaatttccttgtgtaataaacagctgctttaggatttgggtgtaatttaaaggtttaaaaaaaatcacattgagattgatgaataaatcagttgtgaagacaaaaacattgatgcctgttgaaaatacctctccagacaggcaggaaatgaaattagttcccagtaaagtgtggatatgaggatcactgtttggttgtgctgcaggctttttcggacttgctctggtggcacaacaaaactgcgagggctgcagaaatctaattaaagagcaaatgtcccttctgacatcaaattaatctttatcatgtttcctatttttatttcaatctggcaccagaaaatgaaatttaaaattccaggcatgctacaaaacagttggtgatttttctcctgagtattaaaatgcaaaatattcagtcttgtttaattagactactaagcaaacattttttcaaaaagtgtgtgtcatcatgttgtttcatatttacaccaataatcaatatttactgagtgctacatttgacctcagcatctctttttatagtgttcagaggaatgtgtcatttgctaaattgaaagaaagtaaaataatgtgaaataatattacttcaggctttgcttgtatgtttctcggtccttgttttgatattagtgatcttaaaatagacattgaagttagctgaagtttaaatctttgaactttgtagctaacacataattttggttttgtaaactgaagtcactcatttaatcttaaactaataatgttttcttacaacctgagaactattttcattggatggggggaaaaaatggcggtttctgtggtctttgtgtggggaagggcagcgaaagggggtgggttggtctcgtgtggttgctgggtttatttgtttgtgcttgtgttttgctttttcatatgtttccacgctgtcaactaagtcaatatattctcgactacttcttttttgagacttttttccttttaggttacattttgtcaactgtgtaaaactccaatatggagaccaagcatggtagctcactcgtgtaatcccagcactttgggaggccacggtgggaggatcgctttaacccaggaattggaaatgagcctgggaaatatggcgaaactatgtctctacaacacatacacgcacaccaaaaaaaatttagcaaggcataatggcagcacctgtagtcccagctacttgggaggttgaggtggaaggatcgcttgagcccaggaggtcgagactgcagtgagccgagatggtgccattgcactccagcctgggtgacagagcaagagcctgtctcaaaaacaaaacaaaacaaaaatccaatatggagaactttacactaaaaagatagcagctggctacaatggctcatgcccataatcccagcactttgggagaccaaggtaagaggatcccttgagccccagagttcaagatcagcctgggcaacattgcaagtctccatctctacaataaataaataaataaataaataaatttaaattagccaggcatagtggcacacacctgtagttctagctacctggaaggccaaggcataagggttgcattagtctaggagtttgaggctgcagtgagctatgatcatgccactgcactccattctgggtgacagagcaagacccggtctctaacaacaacaaaaagataggaaatccctgacatttaatcatttatataccctgcacctttccaacagtagcatcaaacagtctgcaataaactttacttatgaaaaacatgatttattgagccactattatgggctaggccctgagaatacccagtaagtatttgaaacactctctgatctcaagatgcttacagcagccttgtgatgaggctgaataaaggaagccaagacaaggctcctctcaagagttttctcctgtccttcgcccagcatcgaactagacactagggaaatattttggaagatatttacagcttgaggaacaggtcatatctacacagacaaacttattttccgtaaacaagctgtgaatttcttttagtctgtgtgagatcaagtaaccaatctggttgaattgtccatttttcagtgatttgtctccagtcattcagagttttgtctttgtccacagcttgtgtgggaatcagtggtgatgttggcttgaagtctttatcatttgaataggaaataaacttaatatctaaaactgaataatgagaaatgagaatatttggtaataggtgccttcgagtctttacacgagggacactcaaacatgaataaaagtctaaggaggtatccctagttaaaaatcaatcctcctgtcatcctgctgagttctttaaaagtgaaaattcaacaatattatggcttcaaaagctttctccaagtaaatagagaatggtttgttttttaatctcttgatttcttagtggttaaaaatcatggatggaatctgctttggagacaaccatgagattaattaagttgcctttttggtcatttccagaaaaacttgcttatgttgatcttgaattcaccagagaagctaaaaataaatcttagtatagaatgctttttgtttaccagatatagctatacacttcagagattctgtccttgaatttttaatagcttcgctaggattaaaagtcaacacttcaccatgccagtgtattagaagaatcttcctgaagtctgattattgtttgccagttaatagacttttcaattaaaaaatatttgctctgtcgtacacttttccctccccgtgttttccaatggcaagtcgttttgaatctcttttccctgtattagtccaacaactgttaaaaagctttggttgaaattttttagctgagagagaaatacaaataaaagaagaagcagatggtccctttgtgactgaatgaagaaaaagaggtttgagaacaatatgtgaataggtgtagtctaataaaacactcagccacctgctgcctgaatccttcaaaaaagattctgttgcatattctggggattaactattaatgtatccttaggtttgatagaaaacataaactttgaggggtttaggccctcttctccctttgttttgattgagttggctcctctatatttgaaattgtttctcaattcaatttatctgctcaagggtataattaaaggttttctgactcatggctaaatgaaggaaaggtaagaagaatggacttgtgggcatttcttttctacctttgttttaaattttctgggctcttccgacaggcttgcccttgcagagacagaagcaagaggcctagtgtgtctgcaaagaatgaataaatatttaggtgcttttcttcttaaaatgcattttgatccttatttgcggacttgctttccctttcagggatttactcttcaacccgactatcagactattatcaatcctacatctacagctgcacaagttgtcacccaggcaatggagtatgtgcgttcggggtgcagaaatcctcccccacaaccggtggactggaataacgactactgcagtagtgggtaagcggccggtcatcgccacctggtggtggacagcgctcatagcatgcatatcgtccctagttgatcgttctcttgtttccaaaaacatgatccgggatagtttcacgttcatgaaggcagaagacaccagaaattgttaagcagtcttctagctcttccaagaataaatgcctttagctcacttctcacttcagatgtaggttaactaattgcagtttcccagtgaacagctcaagctggagcaaataattcaaagacatccatccccccattgtcacctgtagcacaggttgtcctgtaacaaggaactgtcttttttctcttcctacaggggcatgcagagggacaaagcactgtaccttacttgagaatctgaacacctcttctttccactgaggaattcagggaagtgttttcaccatggattgctttgtacagtcaaggcagttctccattttattagaaaatacaagttgctaagcacttaggaccatttgagcttgtgggtcacccactctggaagaaatagtcatgcttctttattatttttttaatcctttatggacattgtttttcttcttccctgaaggaaatttggaccattcagattttatgttggttttttgctgtgaagtgctgcgctctagtaactgccttagcaactgtagatgtctcggataaaagtcctggattttccattggttttcataatgggtgtttatatgaaactactaaagactttttaaatggcttgatgtagcagtcatagcaagtttgtaaatagcatctatgttacactctcctagagtataaaatgtgaatgtttttgtagctaaattgtaattgaaactggctcattccagtttattgatttcacaataggggttaaattggcaaacattcatatttttacttcatttttaaaacaactgactgatagttctatattttcaaaatatttgaaaataaaaagtattcccaagtgattttaatttaaaaacaaattggctttgtctcattgatcagacaaaaagaaactagtattaagggaagcgcaaacacatttattttgtactgcagaaaaattgcttttttgtatcactttttgtgtaatggttagtaaatgtcatttaagtccttttatgtataaaactgccaaatgcttacctggtattttattagatgcagaaacagattggaaacagctaaattacaacttttacatatggctctgtcttattgtttcttcatactgtgtctgtatttaatctttttttatggaacctgttgcgcctatttatgaaataataaatataggtgtttgtaagtaaatttgttagtatttgaaagaggtttctttgatgttttaacttttgctggcaaaaaaaaattcacgcttggtgtgaatactttattatttagtttttacagtaacatgaataaagccaaacctgcttttcatttagcagcaaattaaagtaaccagtccttatttctgcatttctttggttgatgcaaacaaaaaactattatatttaagaactttatttcttcatacgacataacagaattgccctccaagtcacacaagctccaagactaaacaaacagacaggtcctctgtcttaaaaaggttacttcttggttctcagctggttctagtcaattctgaaccaccaccccccgccccccgcaaaaaagtaaaagtcaaaccaaacttcctcaagctgcatgcttttcacaaaatccagaaagcatttaagaattgaactaggggctggaagaagtgaaagggaagcatctaaaaatgaaaggtgagtaaccagatagcaaaagaaaagggaaagccatccaaatttgaaagctgttgatagaaattgagattcttgctgtcttttgtgcctctacaagctactactcattccagaattcctgggtcttccaagaggattcttaaggtaccagagatttgctagggaaccaaaagtgcttgagaatctgcctgagggcttgcatagctttcacattaaaaaaagaaaaagctagcagatttactcctttttaggggatcatatcaagaaagttagtctggttggaaaccaagagaatggctgatgtctctttcttggaatatgtgaaataaatttagcagtttaactaaatacaaatatatgcattgtgtaatccactcagaattaaacagacaaaaggtatgcttgctttggaatgattttaggcattgtacaaccttgaatcacttgagcatgtaataactaataaataatgcagatccatgtgattattaaaatgactgtagctgagagctctaattttcctgtcttgaaactgtataagaactcatgtgattaagttcacagtttattgtttgtctgtttagtattttagaaatataccagcactactaattaactaatgtcttttatttattatattatgataaagtaaaaatttcacttgcattaagtctaaactgagaaggtaattactgggaggagaatgagcagctttgactttgacaggcggtttgtgcaggaaagcacagtgccgtgttgtttacagcttttctagagcagctgtgcgaccagggtagagagtgttgaaattcaataccaaatacagtaaaaacaaatgtaaataaaagaaaacacatcatcaataaaactgttattatgcgtg

SEQ ID NO: 590 - DNA, 26474 bp, Homo sapiens
gtgcggcgctgggactgcagctggcggagtgaattcctgggccagcgcgcatgcgtcggcaggtagcaacccagctctttatgaccaggtgagatgttggtgagcaggtaaaaaaggaggatttgcctaagcgattccagggagctggcccgaccgagccctccagcccatgcccggcggggaccagtcgccaggagcgcagagccgcgatgtccatacttgccaaaatgggggactggcaggtacggggggtttgccttggctggggttgaggtgggcaggggtggagtaggggagggggccggagcggggaggaggagaggaagcgccgtggcccagggcaggggagtcgtaggtgaggcgcgcctggcagcgcccaggagagctcccaggagacagcgaagacaggaaaaacgggcgcaggcagcgactgcggtgctgggcgcaaagcgcgcagcccgcggggcccggcgccggggaagtccggcgcacgctccacaggtggcctggtgggtcacttgtggtttgtgctgtggccgtttcccccacccccctcccacctcaagtagaaacttgggaggatgactaattcggaaggggggagggagaaggcctggggttgtggtgcgcggcggtgaaggttttcagcctgctgcgcctgcggcctcgccctagaccccagggttgagtgttggacaggttctggtgcacctgtctctcttggtacccccagatttcgggagatctaggatgtgtgaagaatggaaaggggtccagatggctgggtcgcggaggcagcgtgtttctgtaggagatacaaagtttgcccgaagtttagctagcaactcactccacttcctgaaatgggtttttgccgcctgggctacggatgagggagtgtgagaatggtgggtgaggaggcaggggggtggtgaatttgccaaaaccaacgcctgtggaacttggccctgctaggccgcggacaccacaaggcatccaaggcttggctcctgtccttcctgagccccggattccgaccctggccaaggaagcatttgtccagctctctccttccaacttccagacactttcccttcgggaaacagagcggctctggccaggatggtggcggtaaaaggctctgcctgtcgccgatttcatcatcagaaccgcgaggccctgttttcgccccaaccaagaggcctggtgagggtgagattctgtgtgcccaaaagcccaggggacaattcgaatctaatgccctgaacttccccccaaaaatctgaggccttgctactcctggtcgagttctttctcttgtttcagatttaggccattaaaagtaaagttctgagaagtgcagtcttcactaagctacctggagttggagaaagaaaggccttttgcgttctgtacttttttcccttggatttattacttttatcaagagtgagctcttttatattcttctccctagttaagcctcactaaatggtatttcatccgcaagtttagacaaacctcgtggtttaaggatgcaaatcccataccagagacaaatcccgggaatccacacctttcccttcctgaccctgtgggctaaaggcccttcctaactctcttatttggaggctgaagactgggggagtcctttcggagcagtctttgggttttctcctcaaattccagtgaatttcgctgcagaattcctaggccgtgagaaggtgcctgttgagtaggtttggcctgggactgggccttctgtgggttcgactaaggtttgaaagccgcgagactgccgcaggaggaggaaggagggagccgcgggcctggctcttgcgggctcacagttaggcaagtggctggaggcctggatctcgggtggggcgagcggatttggggcccggaggggccgaatctgatgggctgggcctgttgggctcccggctcccactgggcattgacaatcggagaaaagagagtcgttctggcccctcactgtctctttctctttgtgactctgtctctcacacaaatactccctcttccccgcgacgccctttttatgccccccacgtcaggcctggatctccgacctccaaccccaggcctggcgctgctgtcccggggttctggccccgccggagcattgacatgcaatgaagcgacttagcgtggtaatgacgctggcataaatgcagctcggctggctccagaggcgaccctggcgctcgcccgggcctttcatcagcgcctacaccgggggcggcagtccagagccggcaggtcccaatctgcacctcaatggcgccctcggcgggaatacaacaacagtttagcagccccagcgggtgcggagccggagatctgttgggcgcggggcagcggggaggtggaaacgggggttgaaatggggtggcagaggatggagggcggcctttccaagcccgcagagggcaagaaagcgaaacttggagttcccttaagcacaccgcggcgacgtctacggagtgtaaaaacccatgctctcaggcctagggtttggcctgctcaggctatggccgctgctgggagggtgtcggtgctcctggcagcccagatcctgacttcaaaccactgcactggcgacaggctgggacagccctgcagggtctagccctggaaagtcgaccattttctggacggagggcggcgccaagcctccagcccggttcagccgaggaattgtgctcagttcaggtagggcaagggaggcccagagcatggggagggcttcctgggtctgtaaggccccttgccagctccggcttctccctagctttttggagccttctgcctactctgctaggtttggggagtttgctgaggtgtttggagggagaattccccttctgcagccttgggtggaatggggagttctcccagctcctgccttccttccacctgtgagggaatgctccaatctgccacagttcccatccccttttaggaacgcccggtggaaatatgggaggcctggagattttcgagaaacaagcccagatgaatcaaaggtccttactagagcaactctgaggcgggacctagtgtagttaaggagtttgtacatatagcagagagaaaagacagaggtaactttcttttggaggacaaacgaggaagctcagccaggaaaattaattactctgtatttcctagtgtcacattaggtccttttcttttttttttttcttacttaaaaaaaaatcccaaaaccgaaagggataaaagccccagaggacccagcaggccccggtgaggagtccaaaagcccggactgaccagtctggacgagtaggtggctcccaggcctccaggttccgcggcagccgggctctgcctcgcgagcacgcccgcgttagtagcatcaccaaatcatgaaggaactctccctgctttaattaaaaaggggaatcttgggaaaactagagcagattaacacagctaaaagtcggttcccggtgatttattttgatgcacgcacgagacggtatctagacttgcaggcacacacacgtctgtttttaggctcaacttcagaagcgggtgtgcagttccataggagttctgtattcgtgtccacgttgcacccaggaaaccttagcctgaacaccaatttgaactgtcagttggccctagcttcacacaaacaggagaaaaattgtttaacccctggagctgtcaagtaacctcttcagggtacaacttttattttacacgctgcaattaagggattgcaaaccccagcagagccaccggagccgcttggcagaatctccaacctgggggaaagctcaaagccaataaaactcccaaggcgctgcggcccgagggggtggctgcctcgagcggaggcgatcccttgttgggaaaaaatcctggagtgacttcgccggtcttggtttggtggttatgtttaattgcgaaagggataatgatttctaataaaattgcacggggccaaaagggcagctcggatcgtggtagcagggttaagggagaagtgctagaagctgggccccaggcgtggcgcttggaccttgagcagtgccgggctttgcagaaggcatctctggagaaaaggaagcggagaaagaaaggaaggggaatgtggcggaattggggtaagagagggggtgttggggcagggcctcgcggcggagctcgaggaaggttttatcagttcgcaggctggagtgcgctctagaagcaagttcgcggcgtagagaggcctttatacctgtgtcggagcggccggcggcagattgtggtactggcgagcaattggactattgttgatatgctaatgaggcgattaggctgttggtaaagagctggaaaagggaaaagtttctaccattagagggagatctccgagcgcacacgggagctctttcccttctctcctcctcctcgcccttctcctcgccctcctcctcctcctcgccctcctcttcctcctcctcctccttgccctcctcctctccctcctccttctcctcctccacctcctctccctcctcctcctcctcctgcgctcaccgccggcagccagcactttgcgctcacccagagagtagctccacttgggtgcgagaccgagaggggcatatccgttcacgccgatccatgaaaatgctttggaaattgacggataatatcaagtacgaggactgcgaggtaagcgcgacgccggctcgatcatccgtgcggtcacaggctccgagcttgaccctccctctcctcctcctctccttgcaaccagctgcgaaacgcgggtgggacaaactttccccagcgcagcgcccgtccctcggattcgcccgaagaacgcgggggagaagctgcagagagaggacgtggatgctcccttctttggtttccctactttgaagctcgtgtcccactttactcccctttctgaccaattttggctgtgcctaagaatgggggaaaagaagaacatgggcttttgaagcaattgctggcaactgggcacttgcctgtgcactcctcgtgttatcttcatcgagattgagggcccaagtcaccaggaacagaaaggaaagagaaaactcttttctctcttgaacttcctctccgatctttaatattccttcttctttctattcattcattcattcattcattcattctttcttccccccacccccacttctaaagcggttcccttctcggctttagagacggcccccccacacttcgctgtgagctgggctgcatcttcctgtaagcgggttcaacttaagaccactgatcccagctgcggggctcgctccagatcctctgtgcttcacgaagttctaagtagcttctccctctgagctacaggatcgacgcaccccacgggggtgtgtgggggtggggtggggagatgtgctgcgccgagcctgctggccgctgggtgcgggagcaccagcttctgcaccagcccagaacgaccgtgggaatccttgcgcggctgcagaccacctctggtgccgcaagcccgctgggccgacagagcgcgccgctttggaacccattttaaaacgcagagtcccctgagctcgccttcttgaggcagcaagggagaccctagcgcgacctgtccacccgcaggaggcgctgggaacggttacaaccaacactgtaatgagcaatgagtccgagagaggggttggggtgtgtagggctggagattacctaaataaataggtggcagtcccaacttttgctgttttttttttttttcttttttggcatttgcagctgagaatgttaggcaggaggtgtgtgtgcaggcgcaggggcggagatcttgacttcactcgaaaccagaaattgggtttatgtgaacgatgtgtcacccgctccctcctcccttttctttctgaagattattttaaatcgttctcctttcaggccccccaccccggtagatggggacggggtgacatcccacgggtactggctcttccctgggggggtcctgtcgcgctagaggaggggcgcagggaccccacgtcagaccagtcgctttgttttcgaggctgggggcgagctttgcgggcaggtaggaatgaagccgaacccctcagtctcataggacaattcatactgtactggtctgggctttggccggaggcttgggcatttcactttcgcagaggccgaaacccagctccaggtgtgggcgccctcggcgggcggggtccgaacctccgtgcggctctaggtgccgactggatggggtgggtggctaggtgggggatgaacttgcacccctagagggatcctgtgggggcaagtgtgaatgcgtgtgtaagcgaggcaaaaaaagatgagagagagaggagaataaagtcaaagctgtttccacaactttggccgtggtgggcaagcgccggagcggggatttcgggtttcggagctggcttggggcagtctgattgtgccggggctctgtagggacacgcaggaggcgaggtgccgcttgttctgacaacctggcgggtagactggcaaaggcagcacgccgggagagctagtcgtgtcatctgggggggcgtcaggcgggagtggcccagccagtcggacgggtttttgccgggagccgcgagccggtgccagcggcgcccgggctgggccgcctagcgtctgtgcgcgccccggcccgcatcccggctcccgatccggaatccccggccccagagagccgagggcagagcgacggtggccggggagcgcacggtgcccctgtccgaggaaagctcaagaggaggccgaggagaggaccagtgcagcgagcgggccggtcccgggcagggcgccgggtcatggaggagccgcgcagcagcgggcagccgagtcccgagtcccagactcggctgcgaagcggcggagcccgcggccagacagggccgggaagcgcctgccgcgccgagagccccacgagcgcccggacgcggtcccaagcagctcctacccgctacgcacgacccccgctgcatcccgaggtctgccccagccttttaggtctgattgtcctcgctcgcttcctctccccttccccctcccccgcggcctccccctccgtgcgctccggctgggccccctccccctccctccctcccttcctccctccctctttccctcccttcctcctctcgggctctccctccttccctccctcccctctccccacccggggctcctctccctcgcccacactttctttctcacacacgcacgcagacacattctccctctctgcgctctctccttcggtctccctctctgcctctttctctttcacttttgcatgccctgcaaccttttaaaatgttgccccttccctgtgattcgccagacgccgcgccgcggccccccgcgcgctcgcccgctccctctctcgctcgctttttgtctctcgcgctccctctccccactccgatttgctacactgagactcccgtcaatggactgcattgagagccggctccggcgcgagttgcctctccgcttcacgctcgatttccaggcattcttcccttattaagtattcgtgtaatattaatagtcatgaatatctgctattaggaggctccaggaacgctgcccagcgcggttattagaagctcaagcgaagccgccgctaagaaaagagggggagacacggattaaggaacacgcacgcacccacacactcacacatactttttcctttttccttttttggggtttttcatttttaaagaactttgaatcataaccagtcgcggcaggatagagaccgtgggttcgaccagctgaaggcgccgcgcgaatcggtggttcaagttcggatggatccgagccgggctcccgcgctccggggagcgtcggcgccgtgactggagtcctgggtggcgcggggctctcggcgccttttgtgtggggcgcgctcgggcggcggggcagccgggcgctccaggcttgcttgtttttttccaccctgactcgttaccccagactcttcgcagatgttagttcacagtttttcagccatggtgagtcccatccccacccccgttgctgtttctttaggaattggattctggaaacctggtgccgtggagctgcccgaaacctcgggtttcacgcccagctttccttcaggacaccctctccatttgcatcccccaccccaccttccgcctttctctcgctcttttccatccctaaatcgagtgcattaccccctaccccagcccccgctcgacctctccgagcacgcagacctacctcgccgcggcttcccaaggcgtgtttctccccacgttcatcttgatttccttgagtcttcacttgtccccgagatgttctcaacatttgatgcttaaactgtctgcaggaaaagtgcagcgcggtgtgccccctaccctcgggacctgcggccgaaccgccgagggttcgcggtctctggaatcaactctcttcgcttgttttgcaagggaattgcaatagagaaacctaaagtcaggcgtttcttctgccctttggggctggggtggaaggggcggggggggggggccacagccccggggtgcacctctctcttttaaacccaataaggctgaatctttctattttaaaccttgacttgacgtccccctttccctatccaaaccataaatcgactctgtcgagaaaaaggctcctaacagaggaagcgaaaaagacagaccccgatcctgcagttaaaaccttctttaagctggtaatttaaacgtgtgtttttgttacagcccctctgcgaaatatgtttctatttaagtagtcatgaaacggtaacagtctttgaacgtttatgatttttttctctccaaataaatggaagagaataaacaataacgcagtggcagacaggttcaaatcgggggaaaagaaaaggccgcttctgctgtttagtatttaggaggaattttaattttgcttaagagagatttcacgctgcagtttaatgggctgtgttccaggagacccttttctatcttttcctctctttgaaagaaacccctaaatagtctcttgtgccccctccatatacagtttctctgcgttgttcggtctgtttcacttgagggtatttcctgaaaagaacttagagctgattttttcccggcggccagccaacgggaacgggcgatttcccacgcagacttgtcaagtggattttgtgtggatagttgtagctcgacgcctgattccttgttctttacctttcctctcgctctcttctaggaccgtcacgacggcaccagcaacgggacggcacggttgccccagctgggcactgtaggtcaatctccctacacgagcgccccgccgctgtcccacacccccaatgccgacttccagcccccatacttccccccaccctaccagcctatctacccccagtcgcaagatccttactcccacgtcaacgacccctacagcctgaaccccctgcacgcccagccgcagccgcagcacccaggctggcccggccagaggcagagccaggagtctgggctcctgcacacgcaccgggggctgcctcaccagctgtcgggcctggatcctcgcagggactacaggcggcacgaggacctcctgcacggcccacacgcgctcagctcaggactcggagacctctcgatccactccttacctcacgccatcgaggaggtcccggtaagaggccgcgcaaccagcgcgggagggaacacagccccctacttacctaccccagaaaggatacctggaacatacagtcggtgggcccgggttctccctagtatttccttataaaaacattttattcggaggcggagagtgagggacgttttgaggaaccacacaaagtagttgcgagttctaccccagaacaatggtttctggagctccctcaaacaatgcctgcattaccatttccaccaacacagataaatcagacgaatgtcaccattaacaatatcttcctctcgacgacagtaaactgtctcaattgctaaaagatctacttccatcgctgagtctggcgtggagatttctccctgtcctgggaatgatgttaaatgcaaccaaaagagctcattaaatgtcctcaaaatgtaaaaggaagtgtaaaagacacactaagatcattttaaccggattttataagcacaagtgaaacctaaaagttatgtgtacaccctatcctgattaaagaaaaactaagtagcaaatccaagcagagggacattaaaatgcagccttcttcttactaggggtgctaagtggtgacctcataaatcattagctaggttcccaacgcctatcagaacctgctacactccatattaaattaaatgtttcgagactattgggtaatacattatttgagttctaatttagttatcaataaatgcagtttaaaatgatttctaaataagcatggcattagcacatttactatttacaatgcaaaccaggctattgataatttgaaaatactttctggaattaaacttaaaccagtacctctgcttcaattctatatatttatggtttcctcacaaccctcctgaaatggaattagagcaagccaataattttattaaagctgtaaaggcttctgttaaagctgcttttctttggagaggaaatgtatctggatgtgatttttactaaaatgctatttcaaattactgcatcaaatattgcagcagtatgtccgttgacagtttaatgattactacattagattgtaaggaaaatggtcagatgaacttacctccttgcttggtgaatttaaaacattatttaagttccgtaggaaaatagaaaatttattacatctctcatttggcccagttagtcactgaaatttgttggttatgtttagcagcccttgcatggaaggcaggaaagtgggcacttgatccagtataaggtttagtgagcactgtatgtctgtatatgtgtgttcatacttacatgtttttagaaactgatacttaacagtgcatttttttggaagtgagaggagcactaatttatataagagcaatttaaacatgaactgggagttatgattattttagttccctttcccaaagcactctgaatcttttccttgcttgttctttgaaaatatttgaattgcaaaataatgttgcaagcttttggaactactgtgaatgagaattgctctactttgcaaaaatttcaaggtgaattcttaacacctgtatactcactctttgtggcaaaattggtcagtaggagaaactaactaaaagattaaacaaaaacaaggaaacccagttgctgtttttccctctccctcccccatcttttaagaaaaaaattctttcaaaggaatttgggtcaagaaaaaggttgttttcaattttttcccattgctgcaacagttaacctttagtaagtataactgctaaatatttaagaaaatcaaatcgatggtgaaaattatttaatcattaatatctcagtggggttttaaacttaacagtcttccctgtatggacaaggtctagaaataacacaaataaaagtattatgccacactacatttactttatgggtttagggtgcatgcataaagggatcatatttccccatatagttaaaacacaagaactgcagcagtagtcatttctgaacatttctcaatttaattatacttaaatccagaagcactttaggcaagttacaaatgagagcattgagtataataaaacctgtaataaagcaacttagtaccatccacccggaatcattgcgatcaggcacaattaacaggagcataaatccaagacagaatggaaaatgttcgaatcagtattattgttggacaaagactagagaaggaagcaatagttttttaaatggtaatgcctgtgtttggtaatgattgcaaaatcttctatctcagcagccctggtgctaatttgtaaacacagccagacattatattgcctgtcagtttctgcattagaaaacatgacttcattttactttctaatcacgttttgactctagtgcgcacacgtatacccatccatctgtaaaaaaaaaaaaaaaaaagaaaagaaaaagaaaaacaccccacactaacaacaaacctgctgttggacaacaggaaagcaagctcaaaggttttttggttttggtcattttcatattcctatcatacccaggcttaggcagtagtctttctaaaaatttatgtggagttttccataaaggtgtgtgtgtttgctctttattatactacctaaaccttttcttttccaacactctcctgttactcccgcccctgtcatttctattgtgtttccctggctttcgctgcctgaacactggaattgctaaagtcagaagccgctgaggcgccaatctaaagctaggtacatttctaaatgttgaactgactgagaatgattaggtgctccaacacttgatttaatttccaaagaaagttttattccccatctccaccccttttaaacatggattatttgctggaggaggagaaattggccatgggtgtgcagtgaaacctcttgagttgcaaagccccaaattccaataagccaagatgagatgtttatatataaatgtcattatacgggagggggaattttgattctacaccttcccctcctcccatcttgcagggaatattcatttccttttgttttgatgatacacttacatccatgtgtatccttttgttgcagcatgtagaagacccgggtattaacatcccagatcaaactgtaattaagaaaggtaagccatttccttctgcattccaagcatgtccttacaggcagagtgctatttaaaagaacttgcagagatgtgtttattttttccaaataggatttcctaaaggctcagaattagcaaatagataggcacagaacagcaatgcttaaataatcagccttcagtatgttggtaatgccaacaggctagctttgttctgactcatgatttgaccatttaatttagtttaatgatatttggacaaacacacaaaatgtacagtagttgaactgatttggaagtggcatttcaattttgaaacagtttgatagtttaatccattgcctggatgaaggttaagaagtgtataatgctaaaatagtacaaataatttaacattaatgtaagaacagatgataagaagcactctttagtagaggaaaaaaacattcatgttcttcaatttagtttcttgttagctgtttaagggtcttagaactttgtgaattaggttaacaaaattttagcttttggttaaaattagtatcttgaagatgggaggaatattagcatacttgttcagaggagaaattgttagaaaagtgtcaagtgatttgcatggatttgtaatctgtattgtgtttagtgagtagaaataaagtttactgaattaaatgctattcactcttggtagcagctttttttttggttatggtggcaatgttacatttcaggattctaggcaccaccagaggacgatgctatataaaactgttctcatttctaaccccaatcagtatattgttagctagtttaaagtttcatttttgcatctgtgaagtctttgtcacgtcaaattagatgtgcaagggataaatcttaagagatgctctttccaagtcgacatgataattggctcttttattagtaatctctcaagagttcgtttaactcctattgtctctattagcctccccagagctattaatgtcacaagtgatctatccaaaacctagagccccccacctccctatacctctagcatatccccattaaagaacgcataaggaacactgtgatgagattgtgtgcatatgatgtctccaaatggaattttaaaatacaatgcatactgtacttaaatggttgtgaatgcatctgaattacactggtgctgagaaacgtaatgcattagtatactttctgcaggtcttctattttttttttttctaacagtggtgagtccagcaataaagagcttatggttttaactaggaagtatatatacccactttcccaataaaggcgctttagcagaggactgttaagtatttacttaacaaaagggcacattgctagtattccactgtaggcctgttcttccctccccactccgcagttcaaaactggccttggaatggatctccaaaactgagacgttttcaaaattgaacataggaaagggcctatttatcaaaaagacgggacgtgtggtgtggacaacaaaatccaccacttcccagcgtggtgcctcaattaaaacgctcgtttacagggtgctttagccatctaaattgtcggctgattttaataatgggtctttgaagcagtttttccccgacactaaaaccccacccagcaaaacccctgaagtacaagtaacttgctctcggtttgcaaatgtaattccctcccctgcaccctgaacccgtggtcctggacctcatctggggcccactccgctcggatgctcagcgcctcaggggtcaccaatttcaccacccatctctagagagcacccttgacggcgaaggggaaagggtcaaggcagaaacgcaggccaggctggctgggggagggcagggccgcctcccggccgccgggtgaggtagggaagggctcgagcccgaggaagggaagtagcagagccacagaatttcagagccggacggaaaagcggggactgtggcccaaagcctgggatccggccctggccgggatgagggccggggtcgggcaggatttgggggtgatccacgacgcccaacacgcggcctcccctctgtctccgcaggccccgtgtccctgtccaagtccaacagcaatgccgtctccgccatccctattaacaaggacaacctcttcggcggcgtggtgaaccccaacgaagtcttctgttcagttccgggtcgcctctcgctcctcagctccacctcgaagtacaaggtcacggtggcggaagtgcagcggcggctctcaccacccgagtgtctcaacgcgtcgctgctgggcggagtgctccggaggtgaggcccggcacggccccgcccgccccgccccgcggccgggggaaccactgcgcttgcgccggggcggtggcggcgacgcaaacaggcctcgcgccgcggccctccctacgcgggaaaggaaagggggcggggagaagagcgtagagccaagtgggcgggatctgggggcgggggagcgggcgatgcggcgcgcgcctgcgctctccgctgctttcccgcgagcgagttctggtgcgcgcttcgttcgctgccgcgcgctcgcggagtcctccgctccgccctcctcctcgcgcaagcgcagctcgctccgccgcgggctcaatcccggccactgcagccgcggggcgccgtacagccaccttttccctcttcgcgcacaccttgcaagcccaggaaaagttcctctcaggctcctcgctttgccttacctctctgagtagggtctccgagggtaaccggtcgtgccttgtatagggttttaatagaatggcttttaactaaaggaagagaatggttgtcctcttgagtccgcacgccatgctttccggtcgctgtcatctccagacccccatactataggcgtttgcatatgatgatgattcccaatttactgaggccctgatgtgtgccaggctgcgtgcgagcatgtttacgtgcattgtgtgtagtcactaccaaggaatgcatctgttacatacatagccagggattcttacctcacccctgcgaggtttgagtgattcatttagtagataagattttataagggtcagcaaggtaaagcaccttcccttagggcagttttctccctgctgtgggcttcctacccctaggattccactgcacgttgtgagttgtggggcttgtgttgaacttacccggataatgtttcttctcttctttaataatactgagaacttcattgttttgactgttattcatttacttatgtgttgatagacccacagttcctttctagtggctatatcccgcacaaagcctataaagatcattttttggaagggtttaacatcaaccattctagtcttttcttcctcctgcacagtcattttgctttccctttgtagtctttcactgacacagatcttttccttgccctctgctttttccttcccttcccccatccccaatattggagactgtttacctaggggagtataatctaatccacacaattaaagagcacttgagtagggaataaaatctgaaattaattaatttgctgttttatttaaacaatttatcttaaccactttctgattatgggattctatttagacatctgtttagaactgcctccattgtctctgaaatcagtgaaacttttagggctgatatcagcttttgacatttccagttaggctggtgacatggcacgtaaacagttggcgaaacgaatttccctttggggctagagccagagcaagaaacgtgagagtgatgataactttggttactcggaacaacctaacagcatatcttgcaaagacagttttaaagaccccattgggattggtgtgattgtaacagcagagaaaatatacaggaatcagttgaactcaatacctcaaaccctagagatggggctgtgtttgtttgtggttcttctttagagagttgggaaatcaaaaccttccaacctgccacaagagttgcaataataactgaacgtagggggtgctttacagtttaacaggcgtttatctcctatgaacttctgtactattcctaggtttccctcctttaaatgtcttggggccaagcttctcagtttttgaaagcacattttaggaagctttcaaaatgattttaatgtggtgcagagcaacccaatgttttctaaatccctttctcgcatatatttgtgaaacagggcgaagtctaaaaatggaggaagatctttaagagaaaaactggacaaaataggattaaatctgcctgcagggagacgtaaagctgccaacgttaccctgctcacatcactagtagagggtaagcgaatccacttgctaactagaaggaacttccttcttggaaaatggataatatttagtggccagatgtttggtcgtattttatgtcagttgggcagtttcatctttgcagagaatatagccagatgtgaatggaattatttcatggcaaaaagaaacatttgcatgtactcctatacctccatccttcttccttcttttcctctaccataaagttacacctccccagcctaattctgagctaaacaacgcacaagtttaagaactgcacattctccaagtttgtctcctttaaagggctcagcagtaaataacttaagttattctgacatctgcgtttgagaaatgcgtgaccattacttcctgaattaatttgggaatctttgacctgcgtcctgatttaagaccatcctgaaagctcagggttatgtgccctttcaggtctttgttttccaaacatatgctcccttatctctttaattgtgcttttctcttggagaagaagaaaagtgagcaatttttgattctggatgatgtggatatggaaagataaatataagcattgcaaaaagtttctcctggtagctttaaacatacatacacccttccaaatgcctcaaaacaaaaagccaacccttatcctcactccctgctctagataactgccaccggaagccactcatattcctgctgcctctagattaagtttttctgatacaagattggcctaggttttggtgtactggaatgaatctatagctctcctgtgtttttctttgtgtcctattgtaaatatctcatgctaacagggaaaaaaaagttactttaattaccagacagattttaaaactagcatgtatatatatttaaagaagtcattttatttcattcacatcttgtatttgaggagatatattacaattgaatttaagttctggctttgtaaattattttttaaaatgtttaaaaccatatatttgaggaggaatcctatgaattctctttgttgatgatgtcagagattgatagtaatataactgtttagaaaatcagcaattgttcagtgccagaaactcaactacagtaccattacattaaaaatcataacagtccatagagaacccactattcatactccaaaagaattataagccaagaaaatggtagtggtggcttaaggtatagcgtggagttcgtctgggtttgggggttgagttctgtagcagggaggcagtttctggagaactgttattgtttgtgatccgctccattttatggaaacaagctctgcggagagggctttgatgctctaattggcgcatgcgttcttccggagctggagctaatggcaggaagccctgcagtaaaaaccaactggttcaggaaattaaaaccaaagattcgaaaatcaacaacacagacagactcagtggagtgaccctcaaatcctcttggttaatcggtttggatgaacagataatttatgtgatcaagttaaaatgtaacccctcagttgttcccttgcagaaaagctcaaagagtaattatgaatatcatttatgaatgtgttgataggtgtgaagttggaatacaagaagcattttaaaagagaatttggagaagtgtcatttagggtgggggatgggactggaggttggtggatgagattttcattttcaagtcttcttggccctctaggagaagtggtcatttttcctgataaatgcatccaccagatcctacagagaaggaaataaaatgcctgaaatgagaaaacaagtagtttgtgtttcctgcaacatctggggtgaagggaattagggagttgggagtggggaggaagttaggatccccactcttcattctctcgcactggctccctcctctcccctcttgccaggagaagctgtccacctagccagggactttgggtacgtgtgcgaaaccgaatttcctgccaaagcagtagctgaatttctcaaccgacaacattccgatcccaatgagcaagtgacaagaaaaaacatgctcctggctacaaagtaaggcatttacctctatggggtctctgtgtctcgttgtcaagagaaagagaaacaaaaatcgtttttgctcttccttctcccttgttttccttttgtgttaatcagctttgttgcagttataacaccatcttatatatagtctatgttaaggaagaaatacaggtgggattcttgggcgctcccatctttttcctctcatctgtcccatttactcatttttttttttttttaatgagtgtgtatgggagtgggttgtaggaggggtttgactgaagttaagggtggatttgtgactatgttgtttcagaaagaccagaatcaaatcctcaaaggggtaacaggcttacctatatcagtttttgtatcctatcaatatgttctccaagggcaaagattaaacagtggcctgcaaaatgtgcaagccagaagctgtcctagtttcaaccctaatctgttattccatttcttaccttcctttcacaaccccttctcgaaagtgacacacacacacacacacacagacagagagagagagagagagagagagacccacaccccacataagttttagcccacaggcgagaagtcaaatagatttcaaaatggcccaagttatattcccatcggtgcctgggctgaataggcttctccaggtgatgtgtgaaaagaaaatgactgttttgatgtgttttctggaaattaaaaggcttgtttggaagcccttaattatcaaagttgatgtcacaggagggcatggaagcagagggcagaagctgaggccttgggtgggaccctgtttctggcctggggacatcagctggccttggagaagggagccagcccaggctcctcattcatccccctccccagccccccaggccaggctgctgctgcccctggaaggccccagctagcccttgcttcccagattcagagacagagcttcctgagtgcaggcctcatctacctctgcgaaatttcaactttctctttccccaggcttcgtaagcacacccatctccacaatttccctgcagtatttttattttgagctatgtggggaaagaggaggaatgggaaatcgaaatgtctgtttcttcttcccaaacactactttgaattatctccaagtaacagggcttgtgtgggcccgttttgtttttttgttattcttgttttttaaaggcaaaataatcccaagtaaagttttgtctctctgtccacattgacctgaatttgatttgaaggtgaacgagtgtggacttcattctacaaactgctgctgaggtctctctagaggagcagggaagagggtctttatgacattttgaataggaaggctgatggctgcagcataatgttcgcaagatgctactgtttctgacttccggtctgcgtgactcctttctttctcttccaatgtgtgaaatggtttcctatgtctaggatgttttgtgtgagggagaaaggtgggaataaaagtttaccatatctgagaggaaagagagagagagtcatttgtgaaggtaggaagtaaagagagatggtttagtggtcactgaaaggtggctggatctcccaacatgtggccacactgtctgtctctggggtcttgggtcatgtcaggtaccggctggatcccggcagaggtagctgcagggagggaggttttctctttgctgctagtgctgcccatagtggagccttatgtctctctctctgctccacttgtgctgcagacagatatgcaaagagttcaccgacctgctggctcaggaccgatctcccctggggaactcacggcccaaccccatcctggagcccggcatccagagctgcttgacccacttcaacctcatctcccacggcttcggcagccccgcggtgtgtgccgcggtcacggccctgcagaactatctcaccgaggccctcaaggccatggacaaaatgtacctcagcaacaaccccaacagccacacggacaacaacgccaaaagcagtgacaaagaggagaagcacagaaagtgaggctctcctcccgccccgcccctcccacgcctcaccagccccccgcgcgcccaccctccggcgggtgacagctccgggatcagcaacccttcctgctgctgctactgctgctgctgctgccgccgccgccgccgccgctgcccttgggtccccccgagtctccgggactgccctctcgactgtcagtggggcagcctctccgactctgcacccgcctcgacctccccacccgctcccacacccctgtgccctcatgtggagcctaagagaacagaacaggccgtgaagccagcagagaaaagttctgccaagtttgtgaacccttttttttttaaacaaaacaacaaatcaacaacagcaacaacaacaacaaaaattaaaaacttttttctaaaaaaaaagtgaaaataaaaaaaattatatgcgcttcatgggactgagtcaccaccttcccttacatacttcagttcagattgtagccatacttaaaaaaaaaaaaaaagccaaaagatgatgacaacatttttatcagtattgtgaataaacttgaacacaaatacacgaagttccatgtcatgtcttcagttgtagaagtttttcctctttaaggtaaagcgaccaacttgaactttctctggcaacacgattcgcagttatataagggaatcagtgttcacgtctctgtatatatttatttatgtgtaatttaatgggaattgtaaatatggtgagtctgttttaagcctttttttttttatttatctgatcttgtttacctcttgtttagtgggttttgaatcttccctattagttcttcatgtggttcatggtactgatttagaaatccagtgtttgggggatttttttctctgggattcatgaatttagccctgttgtagcatgttaaaggtgacaaacagctggacaaatttttaaaaagtaaaataaaattttatctataattagtattattacatttagcttttcattgaaccgaaagaaaaaaagtgatattggaccctggaaagattttgaaacttgagtggtttgataacccttctatgtattgtagggagaaaaaaaaaagtttattttattccactgtcctcccttaaaagcatcatttgagcaataaatgaatattgtctttaaaccaagggttagggaattttcctctctctctctctctcctctctctttctgttcaaagaacttcaaacatttgggaccacctggtattctgtattttcactggccatattggaagcagttctagttgcattgtattgagttgtgctggcagtagtttccatgcctgtcaatgtatcatagtcctttgttgcccagataaataaatatttgatacgctttatgtcgatttttttttattcagtggctgtctttacccaggcgtatttttgttcttggcagtattttttattcagtatggttacagtaattgagtttaactctcccttggcaattgctccttgcaataagcagctgaacccattgtttccctcaagtataataaaaacttactttcaacttggagttcagagcagggtatcatttagatattccactgtgtctgtattcagacaaatgacacaataaaacccaatgtattcttttggataaaagattgtttgtactgctaaaggaatgacatactgtcttttccttactagaaacattaattttattattaaaaataaagttttattttatttatgttgatcctttaggttttcatttgtgttttggaaaccaaaatataaaatctccaggaccaaatgttaaggatgacaaggaagatggagaagaacagaagaaacttcccaccagcaggccccccgcctaacagcccccccccccgccccccataactgctttggaatttgtctcagaggataactgagatttaaattgttagttcattagcacaaaggaaataccgacttcaaccttcacttgcttgctcagggtagtcagcggctaagacgggcaaatgagctcagaccagctctagatttctggcgggagaaaaggaatagtggcagaaatatacatgtagcagggaaagagagggcaaattgtctcccatttattttcatattttatttagagatgaatttactactgtgctgttcttcagtagctctcgaggtagagaggggagtgggaaatgatgttgatccctggaatctttcctgcttgcccctaaatgccagcccaccccttcctatcaccacagggctcctcttagaaccttttagaaatacaaaacgttctctgaggtggggtggggaggatgggggagggctgtgaagcctgcctctccagacctctcctatctgtcttctacaataagaggactgtgtgctgagctctgagagaaggaaggacttcctgtgcataaagatggcgaatccagagcttttgtaaactgatttggaaattctttgctttggaagtgaagaggatttttaacaagcaaaaggaggtggttaactggaaggttgagaggaaaggccacagaacaagtgtctaggtagacagactggtaggatttcacatttgttcctgcgctctgacattccgaaggaccaaggaagcaaagcattagagagtgtccattttgcagccttttgctttctaatctccttatggaaggcagtgtaaaatcaatctcgacaaacgaacgcgagttggtggagtctgaattctattttccgaagccagagaattcataacaatggtgggtttaaaaaagaattcaaatggaaagtgtattctcagaacgcaacgcggcaattgttttttaaagcggttatttattatttcctagagagactggttaactgtaacgtagatgtaacaaaataatgaggcgaatgaaccctaactgtacatactcttgacagaaatgaaatgcacacagcattgtagcaggtgaagtgaagcattgtctatcagggctgtttttcttggctgcatctcagattgtgtgggggatcctaacctcaggcacaatagcattcataaacagccatacattgctgctctgcctccaatgacacataaatactcattttaaaacgaaaacaatcttattaaataccattcattcatatctggatttacagatgcttgttatgttggaaaacctgaacccaatataatccttgcatcctgagaaagacagaaaggaaatagtgggttagaacattacaaggtcataataaacaatggtttccaaatgcagagaattagttatttttattcggtaggtggacattttgaagatcatgatattgtcacccttttttttttaaacaaaatttttaaaaagttacatatatttttaagaaatgggaggattagagaggttatattaaaaataacttttattgggctaaccaaaggctcggtggattttggctttctctgtggtgaccaatgtatactttctaaaacacatggtgattagttgacaggacaggtgtttgtaaactaacaacagtgattttttttgactaaactaaattaggatacatagttgaattataaggatgcttgccaggctatgctaattaccacacccaatttttatggaaacacaatgctccttcgagtttggtagtcatcattaccccctctattctctaacaccctttaaaaattacaatcccatccattcctccccaaaatcgaatattaatacaatttgcgttcttgatggaactaccatcaggactgcaatgccccgcagctgaaataatatttaaaatagaagggatttgacatttgagaagtcagtggcttgaaatacccagttgtacttagctaattcagtccttaacctctggtttcaaataaatcaattacagtcgattccacttcagttcagaagtgcacagggttttagttaattgaatacattttattcacttgctaggaatattcatttatcaaaattccaaatttaatgtacatttctttacaactcaggttatgttagactgcacagtcagatcaaatttgccctggtttccccaaatcctgcttaacatatacattttaccaccctctgaaagagatgatgtctccccattccttttgtcagccaaaagtaaattcacaataattccatgtcaggcaggagagctactttctcccacaaagaaaaaaatcatctgtggtcatcagccttgcgttaagtttaaataggttaagaacaaagctggattaattaagttttttaaaagtatagacttgaaataaaaaaaattatgcatggtttccatgagagcttaactttgctgcagctgacaggtatgacagcattttgtggtcttaaagccacaggctccttttcttaaccctctctcttcctctgcttccccctttggcttttggagaagtacttgaataaatacccaattgttaactgaaagcagtacagttaaatgtgcccaaatgaagttgtgctttaaacagatattgatgtatgcagtgttttatatttattgtttgtagcatcctgctggcagcagtttactgtttggaaaggaaaggggttaattagcgtcattatcaatcactaatgcttgcctaacgtgtccaaagaataatcaagttagaggacggcgtgaagccaacagctgcttcatcccagttacagatctcctaagccactcagttatagggttgaggggtggagggaagtagagtggggaagaatcctcattgcttgggtaaaagggctgtaaaaatcgggtcaactcacaagagatctgagaggcagaaagtacaaaataaataaccagcgttttcactgtctacattacaggtgcagagatggcagcggttctgaggcaagagtactgaaatttgctttataatttacttgattatccaagttgtgcatttgaagaaacacatccatgtttccgtagtgcttagtgctatgggtgaaagaaatcttaaagtcaagcagagaagaaaaaaataaaacccacgcatacctcagaaaagcccaattcaactcctaacatcacccaaccaccccatcccagaagaatgaaaccatggagcacaacaggtaatatcagttttcacacctctgcatccccttttaggatgctccgggatatttttccttgtgaatttcagtgaacgattcttttctatattaaacttggtttactacctgagttgcacaggta

SEQ ID NO: 591 - DNA, 109798 bp, Homo sapiens
gaaccgacacgaggcttcacctgggaagcttcaagtctgcctacctgtgaaaggtcaggccccaacaccccttctgggaaatcctacaggtgaacttggggtcccggctcccggctaccgggagacactcgtgcaggttggcgtctgggttaggtgtgtccacgcaggggacattcgaaaggcaaggcggggtcgaggagaggggcccggggacaggcacccatgaagaaggaagggggtcatggggaggaaagcgacaggaagggagcagacggcttggggatgctggggcccggggaagctgtggtcgcgcaggaggagggtgggacacacgggacgcagggctggcgtccgcttcggccgaggaaaggaggggagagaggagcgctccgaggcagtggggacaaagaggaccggagcgggaaggggggcgaggtagggagaagaggggccccggagagggggcggccgcggcgggggtgatggggccggcggggcggggtgggcgctcccggaggcggtccgggccgaggagcgcaccggcggggcgggcggcgcgccagctgcccgcggtgggaggggcggagcggcggcggcgcggggaggggaccggcggctgaggcaggagggggagaaggaggggaggggccgggccccttgtctccgcggctcgtctcctcagtccgcccggggaggaggaggaggagcggggccagccgccgccgccgccgccgtcccagcctcgcccagcgcacctgaactcgcctcgccgacccgggccccagcgccgcgccccgcgcccccggcgcccggcccgcgcgcagcgctgcctcggtgccccggcggggcgcgtccccccggccgcctcccgctctcccgcggctcgcgtggccgcgcctttgtgtgcggcggccgcggctcccgagctcctcgggctctgggtcccggcgcccctccggccgcgagtcccacgcgccacccccgggcgccctcgacggtggatctagcggcggcgaggaggcgggtcccggccccggcgaaccccagtcccggcccccggccccgggcccagcttcggcatggatgtgaggttctaccccgcggcggccggggaccctgccagcctggacttcgcgcagtgcctggggtactacggctacagcaaggtgaccgggctgggccggtgggccggggggcgggggccacctccccatcctgggcgcgccccgcgctcgggctcaccgcctgctgcacttttctttggcctctttcctcccatgtctcttctacctttgagccttcgtctctgtccagctctccccgcttctctttctgccccatcccacgccgctttttgtcccccagccggcgctctcctcagcccctccgctccctcccacctccccgccagactctcctttgctgcccccaaaaagcgaagagagcccgaggactgaaagaagggctggcgtgtgattgtttgttgctgttattagtaaacacgatcgcagcccccctggactgagtgggggctacgcaggggtccctgatctcctggtccgatgatcttgccctcccccacccccagtccttcttacctcccccacctactccagagccggcctcggggccgcttacggacggaaaggaacaaacttttgagtatgcctggacaggggagtggggggaagtggtgggaccccgcaggtggcctttgctgccctttcgttagggcactttggacctcggaaccggggtgcccgcccctccccgcttagagtaagtggcttctttcctctcatttttttgggggggctaagttttgcatttcggggagatcgggattggagacctccacaccacaccctggggtcactccaccttctccacctccccctgcgccaacttcgaggaccgagcgttccaggtggcgaggtggacctcagaagggcagcgggcgtcgctcggagcagcgaggcgggcgagagtcgcagccctggtacccgggccgcgcggaattcccccccaccatccggtgtcctctgtcctccctgaagcccccagcgccgaatttgtcgaaaacatcaccctgagggcgagattcagagaaacagccgggctctgaatggcctgtgccttttgaatgtggttttctttccccttcctcctgctcctccctcctccctctctttttctttcaaatcgtagtttgtttgtgattgcttggataacaggaggaaataaggagcctgctgaaagaaaggtgctaaacaaaactaatgaataaataacaggaagaggaggaattgcatctagagtgaggaacagtttgctgtgccccgtggctgatggaggctcgtgttcctttctatttgtttatactgcgttcccaactctagtgctgaagtttgtaaaagaccattagggtctctcttgctcgccctcgcgtgtcatcatcgcccagctcagcgtctggcacagaggggcctcccaaaaaatatagatcgaggggactttattccgtgtgctttaaccctttggtggttggagcgttcctgctctccgaattctaagggctacgctaagcatttatagagaggcaagaaaaggccgatcgctggagccagagttaaggattagtttgtgtcctctgattttggatttactcaggttattaaatgctttaaaaagtcccccatgtatgctcagtaagggacttaggcagcctaattaagtatgtagtgtttctgagaatctacctaattgttccagtggggtattatttatctccttacaacttagcatgtggatgcaagccttgtataaactgggcatgctcttatttttggaagccattaccttgcctaatgtaactccttctttctctgatttaagatctgcaacactcgaatgacaccaaaatagaaacctattgtacaaatgcagtcactgcaatgcgtggcaaatctctgttcactgggatcccaagggtacttcaagggaccagaggaaattgggggtgttttgtgtgtgtctcttttttattttctgagaaaggctattttgagtctatttaagctcagaacatttatttcagggagggtatataaagcttgaaaacagacattatttattgagatgcttgttcagcttcaggagtgtggatacaagttggcttactgtcgtattttcttaatgcagctatttgcctgaaataacttgctttcttacttatttagcaatctgatcgtcatcagtgctctgtgtacccaagttatgaaagttagacatagcgcttaatattggtaggaatcaaattatacttattgtaagggatctttgtattgacttccttgcaagtaaaaatataactatctttaaactgagccacaatactatattttgctacttttattttcggaagtgaaaaacacaattttatttcccataattttcctttacagagaatatagtagaagaggaagtattaactttatgggtataaagcagcaagtgctaattaaaggtttatagcattttgtttcacagctaatttgtgtgtctgaagtggtgctgttcaatataggtttatactgaaaatgtaaaaactagcatataaagacatgcatttattttatttgaaaatactcacattattaattaatctctaaagacttaacttttgatgacatgtattatctttctggatgggaaatgatggatttcaaagaaagtatgtttcttccctctcttgttttaatgaccatctgggaaactttagaagaaacaccgaactcttggctctaggcttaacaagtgaaagttagcgcttatctttaaatttatttacaaaccgtgaataatagggtttcattcattactctctttaacaaatgaccagagtcctttgtatcaattatatgcatgtgtattatctttacattctgtgagtatatggatccttttcaaatgtcagtgctcatgaaagtgtactgtgtctgtggagaatggatgaaagagttttgtgggttcaaaagtcgttgcaagtaggagaataacttcaaataaaatatagccaggatcattaaaatcagttaataattcatgaaccagccactgatgtataaacttaaagtcatcactgtttcctaagggctaatttccattttaatttcaagtagaaagtcgactgtttgaacatttctttttctggtgtggttaacaaattaaaccctgtatattaagaaataaaaactcattatgttgctcaaatgatctggtgactctttgactatatatttgtaatttttctttcctgagttcaatttgtcttttcaccagtaagaaaacaatacacagaatatcaattagcaaatataatttagcactaatctgaaatccaacatactccaaaatccaaaactttttagagcactgatgtgacagtcaaaggaaatgctcattggaacatttcggatttcagatttttggattagggatgctgaactggtaagtataatgcaaatattccaaaatccaaagaacccctaaatctgaaacttctagatctaagcatttcagataagggatactcaacctgtagttgtcagaattctgccatcccaaaataagatactgtgtttaatgtgggtgtgaggtgaaatcatacagtgggttgttaacaaacttggactaaactccagttactagctatttctgcatatttttagggcttttccttttgaattatggctattgacctctcacccttacttagattagtgctatgttgtttttattctatcagtcccagactttgctttctaattattatgtgtattatttattgatcactttgattaattaagacattcttatattagtgctttgactccacctgattgggcttctgccttggctagcttgaagggcaaaagaaactgcagggtaatttgtcatttgtcaatcttcttggggatcatggttcaaattgagaacatattggggggaatttgattgaaactcttcttagattgagagattcctgtatcctatcacgacaggtcttcacgtaagatattgaagccacattgtgaaaaagaaataaggttttcctaagagccttaaactagggggcataaactcaattgtctcttgggacagcaagttagcctacatggagacagggtttgcggccaagtagagaacataccccatttaaagggatagccttcgtcagcattagtagagtgttgccatgccaacatttgggtccaatatctctatactttacaattcttttttcaagaggatgataatctgggtttttatgtgaattatcatgaattttaaatgttggaataaattaacaaaaaataattaaaatcattatgtgggaccctcaaaacttgcttgtgtgctgattcttgtacttcttgtcttaaattcatatgtagatgaggatccaaacataactttttaataagtcatttatggtttacatgcaactatgtggacagttctgctcccatgtccaactatgtagacagttcaatagaatggagtagagctgcgtaaagaaatttgtgacacctgtgaagaccagacttaccacagaatggttggcttcaggttggtacccagggcctttttagaaccttggcagctctaagcactattgatctgagctcccttccatgccccatcaaacattaaaatgcatccacatcctgcatttaatctaatgtgatatgataccatatctgagttgatatggatccgttgacttagtttacattttgtaaatatttagcttcacatctattagttgtaattttgtagttttctggtgatgtgtggccagtttatttttttctcacattttaaacattgttgtgggcccatgagaagcttgcagttctaagtgtgtggtgtatagtgactaatggataaaacagtcctgctgctcctaactagaggtccacaaactatttgaccactccagatgctgggctactgatgaagaccctgtgctcagtagagactagcatatagttagccaaagaaaattaattttagtcatttcaaatgaagtcaatgcatgtaggtggtcacagttttcaaagtatgtgtcgatatttcaaggaatctacttcatgtcacaaactcagctggatgtgaatccacttgaaaatttgtttaatctgcagagtattaaaaaaggcttggttgtctatatctaaaaaactttgcatataaatctggattccagcttttctttagacatctggcaacactgaaccaatatccttgtatggcaacatctgctcggtgtccttcagatgtgcctgtaccccatagttcatcacggcctgtttcacagcctgtctcatattcagacctttgtaatcctctcaggacctgaaggcttcaagtttgaagattttgattaagaggagaagaaactaaaggagcaacaaatgatgctcaaacccggaaaggttactgccaccagacaaattgcagatcaagtgcatctcatgctatgtacggtagtagctgagatggtaaaaaataatttgtgatcattttgtagggcagtgtttctcaaactttaccatgcacaagaaccacctgggagcttgttataacacaggcttttggactttacccttggagattctgattcatgggcccagggctgggctcccaggcaatgctaaggttgtgggtctgtagactacactttgagtagcacatcaagcagagggccttctaaggtcaagagtttgctctttctaagtttatcagttagagtgctttgggctgcagagaacagaaaactcaacaaatggtggcataaaccataaaagacacttgtttaccttcaaagaagtctttgggttggcagtgccaggttgttttggatggttcaatcatgtcttgaagagcccttctttgattttctttttattctgctatccttggagttttatcagtcttcccatggctacaagttggctgctgtagctctgggtgtcacatcgtcacatgaaaacacacaaaataagaagcaaggtgatggtggtgggagtggtcacaaatgagtactttctcttcctgtacatctcttggcaagaaggaaaagcttttccactagaccgtctcttttatcttattggtcagaaatgggttgcgtaccaaccctaggctactcactagcaaagaggaagattactttgatcagtttagaccaatccaatatcccttgaggctgggcattgctacgtgagcataattaattagtgttatgctctgttagcaaggaagaaggctgttggaaagtcaacggtgtctgcaactgagtgcattcgaggaatatatatatacacataaatattttttgagatggagtcttgctgtgtcacccaggcttgagtgcagtgaccatggcttattgtagtctcaatttcccaggctcaagagatgcacacatacctgtggtcccagctactcaggcctcctgagtagctgggaccacaggtgtgtgttcgctatgcttggctaactttttcattttattttttgcagagatagggtcttgctgtgtcaccagggttggtcttgaactcttggccgccagtgatcctcctgcctttgacctcccaaagtgctgagattacaggtgtgaaccactgcgcccagcctgaaaaattttaagtggaccggtggattggttagagttttacttttgtaaagattgatctgaccttttgagtagaatggtgtaggccccggcaagagtaggagagaccgggagtaggatgccatcacccagttgaggtaaggtatgggaaggatttgaatcaaggagatgtgaatttggatgcaaaagaaaagaaagcactaaacagaacctcccgactggaaggcagaaagaggaagcagaaacgattgagggtgtttgaatttggggcctggacgaatggtaagaccttgagtggaagcagagcggagagaggagaagctggttttgaggaaagataaccagatcaagctcattttggatatttcagtggtatattctcacagagtcatgcactggaactcaagagagagtttggggctgaacaaccaaagatggagtctttctgtttgtagtaaagcagatgaatgaaatgaatttgagtccttcaagaggaaggagacaggaaatgcaaggacaacatccttggacctgaggattggctggtgttgccaattcaacttcccagtcagtgaggcagtaatttaggaagtaacatgtgaaacagagaatttggaaatcctactgcactgttaaaaacaatgacataaacaaggaatgtgtgcttatgtgtgtgtttgcatgatgaaacatcctttctctcttaatagttatttggaaggaaacattcttgaatgtgtgaaacttgaagaatttggaaatcctactgcaccattaaaaacaatgacataaacaaggagtgtgtgtttatgtgtgtgtatgcatgatgaaacatcctttctctcttaatagctatttggaaggaaacattcttaaatggttattaagggggaatgatgcaaaatttgtgataacataatttaaaaccatattagccatttatgaatgaaaacatttatttttttggaagacacatttgttttggatttcatgaaatgttaatggtgtcataactattttagagaatctgttttgagtatggttaataagaaaggacaggatttttgttgagtatacttacaaactcaaatatattttgaaggtggaattagtgctctaaaaaaaaaagaaaaatcctgtttaaaaatataaggagtagaggcttttatttaaggtccgcatgagcttctcacaggttaatcttatccctttgaggtagatcgttttattttctttgtttcctaggtttgtatccttaatctcttcctcagggaggccatgttctcttaaatatgtttcatgcttgtgtaaaacatgccaggccctggaaaatggcccttcttgtatgattaacattctatctttaatcttaattcaattttgctttgtttgtaaaagaagaatttgaagatagacaaatgggctaatatgaagacacatttgagtttttactctaaattcatatttgaatgatatatactcattcttttgggggagtgaggttttaagctgggtccttctattccaaatgttgcaaatttaatgtagccttatctacattgactaaattgtttatgcagaagaattatgtcaaagatggtgataagagtgagttttaaaattcaatttattttaaatggatgtagtataactgtaccaaattgtgagattttttccagcaatttctacagctaatttgtaataagcaagggatttactgtagaataataaaaattctacagtttctttaaaaaatctcctaggtgtaggaagtagaagttcaaaatgctgacctgactagaaaacttttattaaatatgtatgattggttggaagttgatcttcttcaaaaggggatgagttaaatctagaaatatcaaacagttaataaaatatactcggtagatccatcgtgctgctccttgatgccaacttatctttaatgagagattcaacccttattatttgacttatttaaaaattctaataaaaatgtttaatggaaaagtggttaaaatgattgttttagtaaaaatgctttggttgcaagtgagaaaaagacttcagtcaaactgagttaaatagaaaagggattgtaagttttgtttcaggcatagctggatctagagtctcaagggatgctatcaagactttcttatattagctctgctttcatctgtttttttctttttctttcttttttttttttttttttttttatcatatcagccaggctgtactcaagtagtgggaagttgtccagcagcagctccaagttacattctcacagctcagcctcttcaagagggagagattctttcttgcatgtttcagcagcttttctggatcaagtctcattggatagacttgggtcccatgcccaggctcgtagccacgtaggcataccagtgggggagctggacactgtcatcttcttggaagccacaggagctaagagtatggagcagtggttctttggaggaaaaacaaagtgctgatgtcacaatgagagaatgtgggtgtaggataggaaagcaaagtccattgaaacggctaactggagtgaagcttgatgattttgaagatttctgaggatttccattgtctatgtttattattattctttgtggaaaccaaaatgagcctgtgcttatgtaatgtaaatatcataaatattgtttatattaggaacgcccttcttgttgaggctgagattggatgtggtctgccttcaagaaacctataggtcacctggatattctatggatatgagattttctctttccatggtgggagatgtggttggttgagaacaaactgtggagacactagaatgtctggtgaaagatcctaggttgtattgagtaggtactagtaaactgtgtatgtgtgtgtctcggtacatttgcatatgtatgtgtttacatacatatatgtgtgtataggtagagggtgacattttgaagtggggctaatgagaagatattttcaagacaatgtctgaacatgtttgaagaagagattagagagagagtgagagagctattgaatgatggattgggtggtcagttgctgttggaacgaacactgtagataaaggagagttagcccttaaatgaagccttggtaactatttctttgtgataataggaaagaaagggaagatggctgaagattcatatatatataaaatatgtaaatatgtgcacacatgtgtatatatacatatatatgtacacacacacacacacagacacacacaccactgcacttccagcctgggaaacacagcaagaccttgactcttaaaaatgtcaagagttaaggaaaagggccagtggattggactatgggaataagattctcagtggctgtatggatatagagtgagaaatatatcttgttctatatatacacatgtatatatatatatatatatatatatatatatatatatatatatatatatagtgtatatctatttcagtagaaaagatgttggggaagagaggagagagagagagaacaatatgtatgggcatgggaattgattgacaagcctgagatctatccctgtgtacttttcctacctcattttcttaccactcctcccctctaccctcgctttatgtgttttaacggtaccagccttcatcccatctttttgaacttgatattctctctgtctagagccctctccccaaatgtcttcacttggctggcctcttctcagcacctatgtctgagcccagatatcaccttcaagtatgtcctgaccattaaaaaaatctcaatttctaaaatatccttttccccatctctctaattaatatctctctaccttcataattttgttcatagcatgtaccctatttgaatttcttgattattcatttattcatctgctcttgttgatctctttccactgaaatgtaaacttcatgaggatagggggtgtatttactttgatgcacatggtacatctcacatttagagaagtgcctggcacataaaatgtggtaagaagtgaactagagatgaataaaaatactgttgagcagaagatctggttgtagtttagtatttgagtgaatatgtgttgacatagtatgggtcagacacttctaggcaataggaatgcagcagtgaagtcacttgtccattttcaaggagttggactacagttgtgatgatccctattagaagtgtttaagtttacattttatttttaattttttttatcagtatttgatgtgttggtggcaggaagagaacaatgattatgaagctgacttggtggtggattttgcctaggcagggatgagagaacaggagttgagggaaatgtggtattgaagtgactgcttttaatccaactattcaggccattgaagaaatggtcaaggaataggaggcccccataatagcaaagagggtacattagggttcaacttacatgtaatagaaaaaatcttgaacagcaacgtcttaaatgaagtagatactcatttcttgtttccctaaccaaatctagagggaagtagtccaaggctagtatggaggcttcttaaacactgaagagccaagctgcctctagctatcctgtgacccttatccttatggctcaaggttgacctctagtcaacctccatggtttgaccagcaagaaggacgaaggggattgaaggggatcaagggcaaacggaggtttccagaagctgccacatgccactttgcttatatctcactggctagccttcatcacatggccacacttgggtactcaggaaatgtactttatattgtggctggccatgtgcccagtgaaactctcaattactgtggaaggagtgagtggagaggaagggacaccaggtagttcagcaagtgtgctgtgtgtgagtgagcgatgggtgaggtctgagaaacccttcttgggtatctccaagtttgaaattttatgtatactctgtagtgttcttgtttttcctaaacttcaaagttttagtttttatgtgcttcttggatgatcctcttttggtgagagagacacactgtaataagatttatatcttttcaggcctttcttcagttttgggattttattttgggcacacttaaaatacccagtgatttatgttctttgcaagaaccacacatcattatgtcctaattttaattgattacctgcattttaggcccaaatttctcttcttttcaaaatttttcctgagtttttgtagtgccatttatcaagtcccaactcttggtaacaaaattttgaacactagttaatatttagttgacattttaaaaaccagttttttaaaaacatgatgtttttcctttttgatcaaacctagtttatttctcacttcttatatccctatatccactgagaatcttgttcccagagtccagtctactggccttttccattaactcttttttgttttttttaagagtcagggtcttgttgtgttgccccggctggagtgcagtggtgtgatcatagccactgcagcctcaaactcctgggttcaagcaaacctcctgatttagcttcctgagtagctaggactgcaagtgcacaccccatacccagctaatttttaatatttttgtagagatggggtctcactatgttgaccagactggtcttgaactcctggcctcaagtgatcctctcgccatggccctgcaaagagttggaattacagacatgagccactgcacctagccaacctttgactttgtatgtaaccttgactatgaggacttgtcagctatgcttgccactactacctaatctcctctgccccctttctttgctgttgtattttttgtgtcagccttagagtttcatttctcagctttgggataaactgtgtccattttccttactaaaaattaatgctgcctgactgtccctgggcctttgctgcggaatccttttcatctgtttgttctcttggtcattgtccacaatggatattccaagtctttcatactcttttgcagtcccagtcaaaccaacctaccctcattttagaggggacctccaatcttttacttatgaagaatttgatattatctgccttagatctctgatttgtcatcctcacccattcagggaccagatctttctttcttccaggcccagagagggcagcttctactctgggataaatccttccaacagtccttcctgcctgttgaatattctttgttctgcaaacagctcccatctttcctgtctcttgcctttctaccttcaaatgtgcccagatgtcttctgacttccactatagattttccagtcttcgctttgagtgccacctcacttgtaacaacttttgctgtcttctcatttgcatccacattattatatgctacatatttttatttacctctttttttctcttaaataaattaatgtgaaattaagactactgcaaatggaaaacctgattgctttccacacataaaagaaaatcctaaaaataaacacaaaaggggtgtaaacagtgtttttcaaatctcactggagaccttgcttgcctaaggctctgctctctgttgaactctgttgaaaagggagatttgcaagtgttagggaggtgtcgaagatggcttagtaccaaggcaagactttgtgttattttatctgggggattgaaagggaattcaaaacagaatgactttctcaagatgtcattaaatgctcttcagttccttgtctttgtacttcctagagcagagcttctcaaacttgaatggcacatggggatgtggataaaagacaggtagtgggtctggggtgggcctgagagtgggcattgctaacaaattcccaagtgatgctggcatggatggtcccagccacacttgtgattgtagggtcctagagaaaggaccattcacatttacacttttgtccaactctgttgacctcgtcttcaacatctctctgaatgattcttcaaacaagtaatctttacctagggttccatatctttcccacccaggccctccttaacactccatagaccacttctattccttgttacgttactgacactgtcttctcactcttctccagcgagctctgccttgacagatcaaacttcaatcattcatgcaaaaataccagtgccttctctaggcagattctctgctaagcccagtgctatacttccctgatgagtccttgacttctcctacccccacttttatcctctgtgtcccctgcccccatgttcctggttccctgatattatatacttgaatgtttctgattgccattgccctgttgtcttgtctacagctttcccccttcttcctaggaattgggaatatcctcctaaagcttgacctcttactgttttgccttcgtatgtttttcactttctaggcagacccgtgttgtctgtaccagttatctatcgcgagtgataaaccgcctctaaactttgtgacttcaaaaacacatattttgtttctgattctgcatgtcagcaatttaggttgggctcagaagggcagtgcttatcctattctgggtctcttatgtgtttgcagtcaactgcagattggcagggagggtttgcttcaggaggttggctggctgtccaccggggtccctcagttctctggcatgtatctttcacctccagcacgccagcctgggcttgttcatgatggcagtatttcggacagcaggaaagtacacaagaacccttgagtccaggcccagaaatggcacactgttccttctactacattctactggctaaagcaagtcactgggccagcccaggttctaggggagaggacgcagaatccatttcttgatgggaggagccacaaaattacattacagaagggcatggatagacagaggtgtggagaattgtggccatttttgcaatttaccccagggtctcaaatcctcatctctactgtgatctacatttctcatctcctgcatagtggctctctccaggctatgaccgcttccctgtctgccgtcagttcaaatccagcataagccagagggcaacctgtatccccactgccccccaaactcccctttgaatttctgtttttttcagtgccgtatttccaggtgcaaaacttcaaaattaatttagattacttggcttctttcattcccttagtccagggagtcttcatgtcttctttattatgcttctgataatctttttcttttctttcagccatcagtatcctagcccaggcctctctccctgcttgtcatcttttctcaccttcaatggaatctatgctttacttctggtttaatcttctaaaggatagcttagacagctaccattttccttctgaacacttccagtgtcttgcaatgtgttcgcagatttgccacattcatttctgctgtatctacctatcactgctattatttataattttttacattgacccactttttaatttgtatcaccattgcatatggcgaccctgtattgcttgcaatgtgtaaagattacccatacaataaatgcatagctattaaacttttaaaaagttttttatacaccacttaagttaatctaatatgaatagtagacactaggaacactggcctgcagggtaaattgctatgtcctcaacttgacattgaacaccctccgtatttagtatcaaacttaccaccttaagcaaaaataaaattccttggaaaacaggtggtgagttttcttaactgtttgagttctgctcagggtcactattgacagtcattgcagtggtaatagatcagcaccacaaactaggattgcctgcctttatatttttgcacctttcctggatatattcgttgtttttaaaatagctattgtccatgtgactcaaaacccattgtttataataaataactttcttggtggcataaaagccttgctctgtctgcattaataacttttcgaatatcctccccaatcctggctttggctaacgatttctaattgccagtggggtaaaataatatattacatgttcctctttttacatcttgtctcaatcctagattcctagaagacactgtagttttgactatacagcttaaatcatcggagcctttcttcatagtttaaacactgaaaacagtggagctttaaacaggtacaagatggcaggtgacagcattttccttcctccatgtttttcaaggctgcatgattattagggtgaagcttgtggaagtccaaggcagaaaccaagtaaaggaaaacgtagtcaagttaaaagctagtaagatgagtaagaagagtgataacagaagaccaagaagaatgcaatggatgggagtgatctagaagattcttatatcagggagaaagaccattcagttgtagagaggaaaaagagaagggtgtagttagaaaaaaaagaaaaaaaaaaaagaggggccaggcatggtggctcacgcctacattcccaacactttgggaggccgaggcagggcatatcacctgaggtcaggagttccagaccatcctggccaaccatgaccaacatggtgaaaccccgtctctactacaaatataaaaagtagccgggcgtggtggcaggcacctgtaatcccagctactcgggagattgaggccggagaattgcttgaacctgggaggcggaggttgcagtgggttgagatcatggcactgcactttagcctgggcaagagagtgagacactgtctcaaaaaaaaaaaaagtggggtggggggcagttcaaccctaagttaacagatacatttgatgacaggcaaaactcatggcctgattccagttgcacactaaaatttccattgtaacaccacacatacattagaattcaacttcctgggacgcttttcctgatgataaatgttgccaacatatgtaatggttttgacacaggatttttgtccttcttgaagtccctgctgcccagtttgtgttaataaaatctgttggaagaaataatatatctaaggagaatggcatgaagaagatgccttgcttccttccgttcatccagataacctaatttgataagagatttctgccagacttgtgagagagctgaatgctcacgatggcatattatgtggcaccccacttcacagttgccttcacaggccctctctgctttattgaattgcacactgattaaggcttcactttgtattgagaggattatgagtaatagtttcgtgaacatcattttttttaaaaagttctatttacaatgtatagctcattacacctcatggtgtctttttaaatgatgatttacagagaatcttcttaggttactatatcaagaagaactgaaaaaaatccacttcgctgtatcttactgggcattaatcttaccattcttgttctttctttgcattgatggccaagaagcttggagtcaaacaggaaacccatttagtagctgtctagggcagtaggatatgcattcctgtgtgctggccatctaggctttattattttctcaaatttactttttccttgctttgattcacctgttacttaccttttaaaaatcacatatgcttttaaaagtcacctcacttcctttgtagagaaaggcaggctatgaataaatacttaaagcacttataagtacaatgactatgtttgtatagtgtccaggctagtattcttatcgttctaaaagggaaatttccacatttaaaaaaaaataaagcctactatgtcaatattgtaaaactaaaaaacaagctcttatctcttcttcttttagtctttttataaaggtggatacaattctttatttacagtacttgctagaatttatttcttatgggatatttccccctagaattatagaatctactgaaatgatgaaaacaggaaaattagtatactctctgagactttaaattaatgtttgcactctcttatcattcaaaaagtattaattcctgaaagttgacctcctgacataatcagcattgatctagattttacccgaagactgtgctaaggttaacttggcactggggatccattggactggtggccaagttgttgtctggtccacatgtaaatcccatgatccctgagttagctccctagtggttgcaaagagtttctgcactcatgcagggcatttgtcctttgagaaagtggccattttagcttcaggaagcctgcccggtgcctagtgcctggtgccacatgagtcttgctcaaactgagaagcagttaacctcttataaaaccagccaccctcttagattgctttcaagtgtctcatggcaatacaaatgtacttcaccattgtcttggggtcactggtttgtttaatcagtctcttgaatattgggaaacttttggtaactttggaaagcagcctaattccttcccccttaggttggttctgcttatctaaggttagactcaagaggtctaataggtttcaatgactccacatatgaagcagttggccggctggcacggtgcgagagagagaggctagggaaccaggcagtctgcccggtttgaactggggttccaccatttattggccctgtgatctctggcatgttcctgagcctctcagcatcatcatttctgaaatggagatttcactctgctgggtgctggacagatggtggtgaaaaaaaaaacagatcaagtcttgcccacagcacacacttcctagggggttataaacccacctactccatagagttattgtatgtgattaatacagttaccttctagaggacactaataacatttgcaacatagggtcattgtaaatatgcactataactctctgtataccaagcatttcattaatgttaccattaccatcagtattattttaaaatattgttaacatcctaagatcgggtcagtttttaacatctggttaagttgctgaacatagactctgggagaagaatcctacttcagaatattttaacagaactatctggggtcaccagtagatgccctgctgttctttatttaatgtataacttaagcaggatttcttcatctcagcactgttgatgttttgggctaaatagttctttgttttggggaactttcctgtgtatcataggaggtttagcagcatccctggcctctacccactagatgccagcagcacccccagttgtgacaacaaaatatgtctttagatattgccgaacgtcccctggttcagagccactgagctagaagaatattttcgaaaactttctggttctgtcatttagaaagtgctaactgggatgaattattcctttgttacaaagggcatctatctaaatatagggcagttatttctctagggcctgatggagctaaaaggagcctccatcattgtgttccccagaatagctaagaaggccagcactcattctgaggagtaggtagtcaccagggaaggaggctcctggatcaggtaaaataatctacgcgtgtttcagcaccttgcagatgttttctttttccatctccctctttctgttagagaatacctctaggttagcaaaaagacttttcaaacttataaagctgtgtgatctggcggattgagaagagaagatctttgttcatttgagaaaatagttgtccttcaacaggggacttgcctgaattggggctcatctgtctctgggtgcttggactaagtcacaaagctatttaggaggaattgttaaagcaccaccaatgactggttctgtgcaacgatgatattaaaataataaataggagcaatatgtcgagggttttgatttcttgttccatttctcctaatattgtgggagcacactctggctcattattttgtgtgtttggttctagtatacctgctagctttttcttttcttttacttttttatttttttatttttaaatcttgagtcacatgaacctcaagctctgaagtctttttattcattcattcctcaaatatttatggaatggctactgtgtctggcatggagtgcacagagatttaagaagcagttttgtctttcctaactgtgatttccagacagtagtgaccgctgtgtttcgtttgttcgctgctatgtgtttagtgcccagcactgtgcctggtgtgtaggagaatctcaatacataactagttatgagattttatgctaacatttaatgttctttgcttaaagatttcataagctgattacacatttttggaacaattgacaggatgtcttaagaaagtctgtagcaatttgtttaaaagaacacattccaagaaaatgtattgttgtaggccagcttttcccaaacagaaaatcgcaaagactacctggttagagccttcccaagcagttgtcactgtgaccctcttctctctactacgcctggaattcccaaaggagaggggagtgctgaagacaacaatgtcccctctctggctctgatcaggggtttattgtcaggaaatcccccttttcagggacttcattgtctgtatcctctaaccagccctcccccaccacccccatcccctgccgaccaacgatttcaaggctttatggaaatgaaaagttgctcttcttcacaaaaaagattgggggagataaagtgattaacacttattttgttcaggaatccatccgagctaccatccttgaacactcatttggcttgttggaagggtaatctctttcagaaacattggacagaattgaccaattcattatgtatgtaagtctgcttaagaatgtttaattcagtgtgccctcatctcctggcttcgtaatctcctgccttggctattctgttctctttgagtttctgcaactcatttctccctgattattgaagctttcgctggacattccaggcaggcttggtcgaatcttgatgaatagatttatgagggaaaaaaataccatcctcttttatttggttattgatgaccagattgttctggggtaattaaacttgggaaactacaaatttaggcagaaaagtatgagaatacttaagccaatgggaatgtcagagaatatttcaaaggcagtgggaaattcttataaaaagtagctactttgggcaacatgggcagttcctgaacagccaattctggaagatctagattaaaacaaacaaacctttagttctttgtgggcatactaatatttgcactatttaaaaacggtaacaagtaatttaattatgggcacctttcaatgcgatgtattgcatatttttttcctaatcgttttccttttgggttcattaggcaggtttccattaaagtgcattatcactgctgctacccataacaaggaagagagggagtggacaaaatatgggaaaatgttggaatggtgtgcgtgtgtgtgtgtgtacgcaggcatgcacgcacttgcattttggcatgtgcactctctagaactcaaatggacttcccaatattggagaggagtagaggtgtgagatgagcccctctttttagttattgcctttgtagttcatgcccccactgtctttgatagcaaagatactttgggttgcagtgataaatccttgacattgctctggatttgaaattagcgtttgccctctgagtatagatggtaatgttactgactgcaggatgcatgctcttagcaagtgttcaagtacccaaagtaacatttgattatcttcttttgtatgtcctttattgtcttagtaatttaggtaggcactccggactccacataaggttttcttccattccctttccagtaggagagcttcaggaaaaaaggacagaggaaaagatagagaacccccctccccaaacttaattaaatggatctttagtatactcaaagaagatacatgaatagccctccacccacaaaatatcatcagcctttgcattcgtcagaaaggttctcaagtcattttatttactgtacctgattagattgcagtgtgatcagcacacacaaagcacgggattgtcaggacctgcaaatttattttttaaaaagcaacaaaacaatattctcttttttccctcaaatatcttgcctttcaggtttttgaaatcagaatagaacaaagtaggatttttttttttttaatttaataatgatcactctagctcaagagactttctggggaggttaccatcacagaagaagaacactggggtgggtgagccagggagggaaaacagcatcatgcataagtgtggagttgtgaaaaggcagaaaataggggttctcagaaaggagacccagagaggatggtcgaggccagattttgaaaggtcttgcctgtcgtgctgaagtttaggctttatcttctaggcacttttaagctcaatgtgcttcaagggccatgctgcgatttctttttggatggtggctgaaactggggtgagggatggactgggaagaggaagagagggaggagtggccgtgttcttgtaacaagagtgagtccctttcagccctctgtgggaaggggagggcactgaagagttcatttgctttatgtcttgttcagtgaatgctgaaatcttttcaatgctcattaagagactttgtaattgagtacacgtacccgtggtgattggaaatcatttgcatttactgctccatacatgtaaatcatagtaattttaggaagaaagaattgcaaacatctaaaaaattcatttgaattcatttctcaaattccatttttaatatatcattttctttcaggcagtctaaagtcttatcagaattattttttaaaactcaaatagaccacttttaggccctattggattcagtgagttattaaatttgacatcttccagggtttattttttctgatgccatagttcaagataatgtttttaatactacatgcagaattgtagagattcataatagcttatggcatcttaatgtccacagtgacattccactggtcatatccaactgtgataaacagctctatactccataaaagacgacagtcactaagtaaatgcagaaagatgcaaacagcccctcaatctcatgaataatgttacagatcctgaatgttaattttgaagaaaacacatgcttaaatttaaagtttatgtcttcaattcacagttcttttattcttccagggaaaaaaaatatcaagcagctatgctttaaatgaatctaatgaactgcaaagactgacattttcactataaaagtcacaattcatttaatgagtagttaaatattgatgctatattcaaatacaggcagaataaaaatggcacaatggatttcaaaataggaattcagggttcttttatggtgaaaatttcatgaactgaaaaaaaaagtctcgttcatcaggatgtcttcataaacacaaatattccagtgaaatagagtattagtttgcagtatataaatccccataaataaactgaggtaagtcttcccttttgctgtttggttccctgtcagtctttattcccacaggactcattgatgttaaacgtggttcctgtcttcaatgagaggggatgctgaaattatagaaggtggggaatctagtttccttggactgacctccttgaataacaagtcaaaacaactagatgtcgatggctatttgagaaaaataagtaagctaggtccctgtgactcctctgcttggagctctccaatggctccctgattcattcagaggaaagcctggtcttaactcagtggtggacattatttccttgacctcatcaaggcctgtctgacttccctcccaccacataccccgctcttcttgatcacttggaaacccctggcacacgcccacctcaaggcccaggtcctgttttcctctgccccaaataccgttgcatcagatatttgcatggctcaattgttcattctcttcaagtctttcctcagatgtcccttttctcagggaggactttgatgggcacctcattgctttccctgatactctccgtcctcctgccttgcttccgttttctccaggcacttactaccattcaacattccctctgccttatttattcattgtctctctcctccatgctagaacataacctggcgaaggcagagatttctgtctcttttgttcgttgcttcatctccagtgtccaggactgtgcctgctatagaggaggccttcatccatgaagtgcttgaatagcacatgataaacgtgaaggaaagtgtgttttgaggcaaaagtgggattcgcaaaaaacaaaaaacaaacaaacaaaaaaatgcttctcatggtacttggaaacagggaccagataggagagacacttggattgtagacttgggaaccatctgcacagatagggtgaccattttttcccaggtttcctgggactctccctgttgttgcatgaaagaccagtgtcttgggaactcccttgctttcccagtgggacagctgtcaccctgtcctgcacacagaggacacacttagaggccttagagtttgcagaaggacagggctcacaaacccctgtgtcataggtgtgaggaagatggtacatgactgcaactgaactgcccatttgtgtgagactgcaagagacgagacttcttcaaaggaggtggttgctcctccactctgcctgccagtagctctagggaatcctagagtagtgttgtctgaggtcctgatttttcaaggggaaccagaaattttgatttctgtgatattttaacatttttaaatgttagcactatttggaaactgtctaaagtctgcatctggcctgtggcctgacatttggctgtctctgctgaagttccacacttccactttattaggagacaaagcctatgaacctcattctgagcatcaaatgaagcttgtagttattaattgtctttattatttggagaaaatactattatttagctgtaagtaaaggttttatgtagcttacatggaatactattgatatttgtgcagtattttcaggaactattctaagtactctatctgtattaataaatttaatcctccacgactctataaggtaagtactattaatgtcccagttaacagaaacggaaatggaagcatggctgaaattaaataacttgttcaaagtctcaggtgaggaggtgattgatctgggattccttcaaatcaacaggcaggttccagagactgtgctcgttacccacaggcttttcaaacttcactgagcatgagagtcacctgaacgccttgttagaatccatgttgccgctccacacccagagtttctgattcagtaggtctggggtagggcccaagaatttgcatttctaacaagttgctaggtgatgctgatgctgccttcctgggatcacagtttgagttctactgctcagaaccatccaaaggcctctgaagggacccaggatcatcggagagatcatacttgcatccactgaagctgtgtacgcacagttgatcactgcactcatatttaggtactctagtggtaacagtgtcatcggcacagatggccatgcacaaaggcaaaacatatttaaggggcataaagtaaaatgggctttatgtaaaatgaagcacttcctggacccctgtggtcttataccactgaactttttttttttccagctgaatactacaacccttgtatgtttccaaatatctggcagagaaggtagaactggccagggacatgagcaaacatggtgtgctggttggcataggatagatggaagctaggcaggtggtactgggcttctaccattggtaggctgtagcttgatttttagctacaaggatatgtttttaaaccatattgaattacatagaaagcatttccattttcctttcaggctttcttattacatcagtgagaaaatctcagtttggtgcgaatatgtctttaacacctaatacttgctaatctcttttttagcagagagattgagacacattataggggaagagagagagagggagagacggaggagatcatacaggacccagttacaacccttctgtagctttggtttgctagaattaaatagattattttgtatttattgtatttattttgatagttatgtgctatttatagaaaggaataccagttttccatgtatgaaataaagtgtccttttgttaacaaaaaagcatattaatttttatgcaaatgcatgaattaaagaaaaataaaggctcacaatactataccttagccataattccaaattctaaatgctctgaaaaacaaattaaaaaaaatgtttagggttacacatttgcatcaaaacttgacctgaattcacatgaaacttttttttcctgtatttatctttatgtgaatattcagacattttgctacaaaaatgtccacatgtttgactatggggtgctgcctcagaccactagaggtattatgtaataagggaatatgcaccatattactttcctaatcttgaaaactttcaactgtaaaatacatctggccctaaggttttggataaggaagagtgtggacctgctttaaatggcaaaatgcatgaaagtgatatacaaataactgaaatttggcagacactgatctaggaagaagagctgacattgaacatgagtctattaacacgagcagaacaaacataacacctaatagggcttcccagcttttgcttgttgtaaacagctggcagtggttacatctatatttgttaagaggcagagcactgtattttgtgtaagataaggtgctagtcttggccaggctgccaagcctgggcttttaaaataaaagttttaaagaaaaattatagcataataaattacacaattttattggaaaactgaaggtgttcaaccaatgctagtttttaaatatatttagaaatactatttcaggaaattttaactacactcattagtcttatggatctgatttttatgtttggattttatatacccatatttcataaaattagatatatgggacatgtcatatctgcatccatacttcagtttccttcagccattggggcattgtatttgtagctcatctactactatttcttctccttcttcttcttcttttttttttttttttgtttttgagacagagtcttgctctgtcacgcaggctggagtgcagtggtgtgaccagtgctcactgtgctcaccgcagccttgacctcccaggctcaagcaatcctcccacctcaacctcttgagtagctgggactgtggatgcgtgccaccctgctcatctaattttttaattttttttttgtagagataagctctcaatacattgcccaagttggtcttgaactcccaggcccaagagctcctgctgtgttggcctcccaaagtgctgggattacaggtgtgagcgactgcgcccagcccattctactacttcttgcttggtaagaagtgatgtcttctcagtgtgacaaatagctgattgcccaaccatgttgttttttttttcgtctgctcagctaggatgcatttctctcactgaaccccatccagcagaggacagaagagtcagaagagggtagagaggatttagatactcatagaagatgtagtggaggatgaagtgccaacctcgctcgggagccaggcgcattgaggagagacttcattacctgataactacctatctgaaagtaagacctaatcttctggtgaggtttctaatggatctggacaggctaaccagatagtgtcttttatcagtttgtctgatgaatgcactaacccttacatttctagtttaagaataagatgaaagtggttgggaataatgaggtgtagattcaaatataacatgcatgagtgaatgtcagtttcagtggctttaaacaatttgtggcccccgcagtatttgtagataactgaagacggattagcccatccatctgtctggtgcatttagcgctagaacaggttggttctacatgcctcgcatgataccatttccctttgatcttcctggcaatagttgtcttgtgagtcgtccttactatgaggaaggatttcctgatacctgacattttgctacctgtatcttctaacagcctctaaatccaggctcattaatcattgccattggtgtttacactcaagtgtagattttggttggaaaaaattgaaatgatttgctcaaccacaggatattaatgattattgaaatacgattcaaatcagaaacatatccagctacagaagagaatgggaaagcagttcattgatcatcaggcttgtaatctgtgaaaactatatccagcaaagtggttgttctttttatttatattactcaaatgaacattaaactcaacaattccaaattactatgaggtattcttcatctctgttccatacagtgttgcattttatcaagataatgtagatatttaagaaatacattgctgacaattcttgtaaatattagaattctgtatgagaatattgatattaaagctgtactaggatggataccattagcaacaatatagagaagacgttttattaaatactaatttcatatgttatttaacaagtagccggctttgaacgcattaatctctctttttaattcaaggttgatggtctgggtcttacatattgtatccctgaataggccattcaataactatgcaaaatatctatttctcccatgggtatttgtgctttgatatattctgatccttattaaatttaaacaggatcaaatttatacagctctggcagagatttattaaaatacactgaatgggcagcttgtgggagtgcagtgtactgtaataacatatgccttttaccagagaatagtaattattgagaatcaaataaatctgtaggaggttaagtatatacggaaaagatatcaatttcagttcttcaaaactggcctgaaatattattaggagatgtgttactgtgcaaaataatgaatctcatctttttagactctaaatatttagcaatatttgaaaaatgcagatcttatgcgggatgtttcaaattccaaaaggggagggggtggttcaacattatcagaagtgttacatgtatttagtatactccatctgtagaggcacctgtttttcactttgccctactttttattagataaaattgaaagcacttatattatcctgttggtaaaatatactttgtttttagaagcaaaaatctgtgtctctttcggtcagaggtttgggagagagatcagagatggactaaatagaaacgtttttgatacttttaaactggtttatattttaaaagtattattttgttcttaatttggtgttttcctccatactttcagagtgaccttggtgtgtttaatctgatcagattgcaatagttccaatggattggtcttctgggtggggcatcactgcagagggcagctaggatttttaatactcaatgtgtaggtaagatgcatgtagtctacctattctttcagagctctcatgactctgatattttatccttcataaattatttaattatgttataatcatcattagtgcttttctcttctcctacttatagacacccttgagggtgggctggggcaccaccaagaagagagccatctgtatgacaagagaatactttgccccaacaaaccatcctggcttcccaataccttcttttccttccagtatttgaatctctttctctgcctaatcctttctagtatagaggcagaggcacaggtggaggtggcgcacccttctttcctggtcaaagttgtatgaatgtcaagtgaaggctctgggaaccacgggaatctttgagtggtggtatctagaggaagtgaattaggaagtgaattaggatactctctgaaattcccccaattcttaaattcgattgaatgttggtaaatgatagttatggcagggggcaggaaatctgtttctgccatgtattatggtagctcccctaatttttgtactcatttcttaacatattgtgtatgtgtgtagattttataggagaatcactgtttatgcatactttatagtgttttcttgggtcatggttaatatttgagtgtccatgatgttctaggtaagtctctgtaggaattatttttaggtgtcatggtataacagagttttggtttttttggtcggggagtcagatatgttacatacaataaaatctgccaattttaaatgtgctattggtaagttttgacaaacatgtacagttgtgaacaaccaccacataataaatatagaacatttccatcaccacaagtttccttgtacccctttgcagttaatcccctacccccagccactgatctgctcttctgttcacatgatgtgtatgatatgcatattcatttatatcaactaagttaaaccaataagtacataaatgtttagatatatcatattgataaacctttatgggtagcatatatctgatttttttcaatctttcattccattttgctcacatgaagtcattatcagtagaataaggaaatgtcagaaatctggagtttgagcaaaaaatgtatattttagtgaaaaagatttttaaatgcctccaattattggctacttagaaagtaagtatacttggctctgttgccaacttttctccttcattgctgctgatgaatgagacagatttttctaaatgcatgtaactgatgaatccagttccctttctcttgcaattaaaagttttcatttatgtgtctatctgtatattgggaaatctttgtaatttttcttttatagtgcttgttagatctataggacaatatagacctagtttctgaaatttgaaaatggataaaaaatattaaatgcaatgatttttaaaatctaatgtcttaatgttaatctttgattgattttcttaggtattaatattcattaccatttggataactgtgaaatttgaaagtgattttacaataccaacactttggaccagatgaactccaatattccttcagttctgtaatatgtgattgattctttgaggatttttttaaaacaagtatatgtgtgtgtatttgatttatatgtacagattcagatacacacacacacacacacacaagcacacatttcaaatgggaaagaaaagagaaaaaagtaattgtgctgtttatattttcaagttagcatttcagaagattgattataaagataaaataatttgtacactttttggatgttgattaatgctagtgcaaatagtggagaaaatagaaagctaatatagtttgctatagatatccttaaaaggaaaaaggaagtaaagaaacgaaaagaaggaatttagcttatgccattcttctgttttacctgcttctaatttagagtaacatgatcactggcttcataaattcaaagctcttaaatcgtttgcagtaacaagagcatgttccagtgttctcagaacttttgtttgcacctggtgttacacttgatcactgaataattgagtgataatgactgttatttttaaactaaagcgtaacatcaggagaggatggtaaacacaaaccgcccagcttcccaaagctggtagggaaaatatttctaagtgtcaaagcatgatagaattgttgaaagtacatgcagccagctatgtaacctcagaaaataagacatggaatgatttgttctgcagcttaaaaattatactttttagtttcatggagatggaaagttcaaacaaagaaaaactagtagaatttgaacaccatgagctagggttaggaaaccatactatctggccaaacagttattcaggaccaaggacaaggccataggcatgcctctccccacttaattttttcttttttctttctttttctttttctttttttttttttaacattcatagctatacttttaagttattcatttgcttaatttattcactcagaaattaaattacatattgagtatcaaataggtaatgtgacaaaacaagacagactcgagctctgttttcatgggacttatattctcttgggtcctttttttttttttttttttttttttttgagatggagtctcgctctgtggtccaggatggagtgcagtggctgtcatcttggctcactgcaacctccacctcccgggttcatgccattctcctgcctcaacctcccaagtagctgggactacaggtgcctgccaccatgcccggctgattttttatattggtggtagagacgaggtttcaccatgttaaccaggatggtcttgatctcctgatctcgtgatccacccgccttggcctcccaaagtgctgggattacaggcctaagccaccgcacctggccctgggtccttttatagttagctgttatattctgtttttcttcttctggggctctgctcttccttcaaggtaattcctgtctcccacataaatagctcttcttagattcttgacctactgatcttcttccaatatactcatcctcccatagccttcacaagcctttcggctctattgaacttgccaaaatgttcttatctcagcttttacagccatacagagaaaacaatacctatttttctcatttcttaaatggcttcttttcagtgtgttatatgaatggtttagtggttaggcatcagttgggctcaaaactcataatgtgaagttaaatttgtaagcattggcttatgattcatggttgacatgatattcagaatacaagggaagaagggcaatattgaaacaaaaaagtgtctatttaggccccaataatttggaatttgttaaacttgtatgtttgggtggccgtctgataagtggagcaacatggatgtggagcctagtaagccaggatttgactccattatttagctccatgtctttgtttacagtattctgattcccttagaaataaggagatagtaatacctacctcaagttcattgccaggcctaatgcatataaaacgtcaagaaaaatatatgtaaatctcttgctctcccttttctgcagtggtcaatgacttttaatgaatgaaacccagaatacttctttctgtacaaatatttagagtttaacttttccaagccaaggtttctgtcaaatagaaacatactttcaaattatgctagacatcttgatctttccattatggttgagaaacttttatataaatggtttaatacaggcctcccattattatttcttgaacttctaattgaagaataacatatataaaatgcacaaatcataagtctacagttttaaattcacaatcactaggtatttttatttttaatgagtcaaataagcagtgaacatccccttattttaaaagtttgacattttagacttttcagttttagattggcctatctcaattgtaagtcactctgcttttattcagtagaggtttagctttagatctcaagggggagcaacacagaaaaatcaggtcacttttactttggaaagcaaactaacatttactcagcccttataggattgtaggtacgctgttaggaactatgcatatattatcccatgttaactataggagactttaggttttagtgtattttcaatttccatctcatctagatttctataattttaattcatgcctttacccttgtaacagttccagttgcatgaatatttgggaagcagaggcctagtcttagagatttctgtccattgaatacacaaagaggaaatgattatcatctttgtgatgaatataccatacatctccagttataacccaaatgtttctataacacagaagtaacattgtattacctgttgtttggaagatgatgccattaattgtgatagctctcagagggcatgagaagcattgaaccagttgccttttctacagcctatgcccttaatattgttctttgagtaaggttgtgatttattcagccttttgtgttggtgcctggacttcttttttcttaagctccccaaagagtcagttgctgtttgtttgcattatagctcttctttccttgtgttccaccgcagtggtatgcaacgtgacattatgtacttacatgtattttggcattggaaaaagaaatctgatcagcttttggatgtgaagaaaggtattatttattgttttcgcttacgttactcacaccgtgttctctagctctttccttcccctgcaagctcacatcttaacacttcttggcattcactttgtttaagccttcttttcttcttcttctttttttttaataacatgccagccacattcctaactcagagcttttccattgattctttcttctgcaaggaattctttccccagctctttgtaatgccagctccttgtcatttgtgtctcagctcaaaaatgtcacctcttctgagaagcctttcaaaagtatgctacccaccaagtcattttaagtgacatagtcttattttacttccttcatctaatattcttatttattgccatccacctttgcctgtccccagtcaccaagggcatggactttggcctcttttgtcactaactgcatcttaagcacatagaacgtgcctggcatgggatcatgaatatggcacttgttgcatgaatggatgtattgagcagcaactatgctctgagtaaatagaaaacagaggttcatgttggttggattatctctggagtcaagttctgggtaatagagcattttgggttggaatcattttgaacattcaatctgtcagcttcctagtttttcctttgaaacctcctggtacttggtcaactatttctggggcaaattttcatccctttgattcaggtaaaacaaaatccctttgattcaggtaaaacaaaatccatttgagccaatatttatgtgtctttaccagaatatgtcctgattttgagatagggtcataaaaagtaccttgctatcttcatgggcaaactatcttaaagatggacctgcaaatacagttgaacaaacataaaccacagggagagttcctcagacttaccctgggaggcagatatggcaggattgatcattcttaaagttgaggaataggcaacgtggtgcttgaacgtggaatttctgattccaagttctcttgccctctgtgttctgctcgttccctcaggagttctgaatgtgtccatttaggcatttcccatactgctttaagtattctttgaaattataaaggcaaacatgactttacattaaatattttttctccatgcactaaactttcaagtcattagaatataggctaacggttctcaaactacttgttttctgactcactcttcaaactattgctgccatctttcatggtatattcctacttttctggaactatttgggttagaattctctgcattcattctgtcctacaaacacacaaaaagaaaaatgctgattctttcctcataaagaagcacatacttcacaggagaaagagagtatcctaatctttaaatacttcaccatctatttttaggacatcttatagtcactcttctttggtattatgatacaaatgtgttttcagtaggccttaccttttcttctcctgccccgagatggagtcttgctctgttgtccagagctggagtgcaatggcacaatcttggcccactgcaacctccgcctcccaggtttaagcaattttcctgcctcagcctcccgagtagctgggattacaggcgcttgccaccacagccagctaatttttgtatttttagtagagacagggtttcaccatgttggccaggctggtctctaactcctgacctcgtgatccacccttctcggcctcccaaagtgctgggattacaggcatgagtcaccgtgcccagccagccttactgtttctctttgagtatcctggactctcagcttttatgggatgcacttgttctaattaattaaaattcatattgtcatgtcgatgctcagatggtcacagcatgacctgcgggagtccctttaaatgtcctctttggtccccttagcattacccccaggcattcttgaaagcactgttgttttctgggaaccacaagttccagtggatcttgattttctcatgacccaatacatggagtcagctattctctgaggagctctgattcctttgatagagcatagtggcatccaaaatttaggtgctctgcatgatatcaagctgttccattcaaatgcttctggaaggtagaaatgattccccagttagttcattttagggagagagccagaagacaaattttctttttcttcttcttcttcttctttttttttttttttttttttgagacagggtccttctctgtctgtttcccaggctggagtgcagtggtcccatctcggctcactgcaacctccacctcccaggttcaagcggttctcctgcctcagcgccccaagcagctgggactgcaggcatgtaccaccatgcccagctaatttttgtatttttagtagagatgggatttcaccatgttggccaggctggtctcaaacttctgacctcaagtgatctgcctgccttggcctcccaaagtgctgggattacaggcgtgagccaccgcagttggccaagacaaattttctttaaggtcatgagtttaaacagctatttccaatttaaatccagcattactaaatccatttttattttgttctaatgtaaatttttagtatctatttctgctcaacatacttactctagatttgtaagaccctggtcccaaatattactttgattcatttctctaatcattatgtcttgtctatcactttattttaatcactttattgacaaacaaatattttgagattattcatgcctagtctaagagaaaggggaaaaaaacaaaacaccttgccttttatcttgtaagtagtggcatttttttttttttttttaacagcaaggcttatatcattgttctttcccttggaaatgcaacagatattttttgaggtatcagaggcgagggcagatttccagggaatgaaagaatagagctgatcttgtacttagaaaccccctcctcattattaccagcagcaaatatctctggtttctggtaggggcaggactgaggggccttttagactcatctcttgaataccatgacttgccattattgtaccggcctgagaaccactgctctcggtcttagactttgaacttgataattcaaatctaaaggttaattacattaatgaaactactaatatcaatcattatgtttaataagttggtatgctgtaagcctgtttgttttaaccaatacctagcaatgaatgtgtttatatgtatttaaacattatgcctgtttgtgtgtgcacatgtacatacataagcatacacattaggccacattgcatcatctggaggaattgtgagtgggcgtgtgtgattggcaagtgtgaaattgaatttaatatgagattctctgtcttaggtaaaatatttgaaagaacgtggatagagaaaagctgtctagctttggaaaaaatggcttatgtgttttgggagcaagaggtctgaatgttaaaatttcatttaaatggcaaaacacttttagaactatgctgaagaatttggttttagtgggaaaactttaatttgcctataacatgaagtacaagttattaattgcaccaaagataacatgctaattaaaaggttcatgcataattgtcagaggttaacagtgcacactgacagacttggaatagaaactaattatattatgttctctaaaaggagtatttttacccatgaatgtaagataccttattatagcactgttttttcttaggttggaaaaaaatcttttagatgttctttgtaatgaggctgcaatgataagcattcaaacaatgatgaagctatatataaatagctttatttgaaacatgagcttccagtatagttataattccaaataagcatttatttgtatttgcaacttagaagaaagacactcaaagtagaaacttcctaaaatttatcttcctggggtaataaataataaatgaataataaagcaaccaggatttctggaaatagtctaatgttcctttttgagatactttatgaataacaatcatcttttgattggcagtatgctagagatttgggcttgtacacttttttattgcattttatacctctgaattgttttatatctataatacataatatatagctatacatgtgaatttaaattatgagcatgtttaaataatagtaataaaatgatcacctatttgtctaacatccaactttgttgaaagttatcaataattttgaagttctctctgtgcgcttctcagttgcaactccctcccttcctgcccccagagatagtcactttcctgaattttacatttattattcccttgttttttctttatataaaattttaccatacatctctttatcccctaataatatattgcttagttgtacatattcctggtttctttataagtggaatgatgttatatattttattttctgacttgcttttccccgcttcaatattagttttgtaatattcttctaagtggatgcaggtgtctttcttttggtttgccactgtacagtattccatggtctgagtatactccctctggacatttgattttttaccagtgctttgctatcatgggcgggtcctgcaaacacccttgtgtatgcacgctgttgcacatgtgcaagaattgttctcatgtctttacttgggagaggaactcatgggttttagggaatgctcttgacttggcaacgttgaattattttccagaatggttgtatgaatttaatacttacacccagaatgtatctgcattatacatttcctccaaatcagccttcataataatgtcttcagatatttgtatgtttaattgactctccaattaaacaaaggaaacattttcttatacaatggaaacttacaggtgtcctgctatgatagcgtatttctttgcttacagtgcttagtcaaaactgctcgatattttggatcaaatattaaacatcttcagtaagaaacctcaagctcatttataatattgttatagttgtgcaaacatcacagcttaaattgtaatatagttcagtcatctgatttaccttcactccttcctgggaattctgttgcctaacatgatttgaagccattatttactttcaaataatgtaatctagaaattctaaaaaagaaagaaaaactagtattaggcttagtaaaatgtaattaagatcatagacacactgtaaaaattatctgatgtatttcacttctcagtatctgacttctggattacctggtatcttggattattcatggtattcctttgctctattaatatgaaaataattgattatgtatctttttttaaaaaaggtttttgaagcaatattgcttatttgtgacttattttgcttaccaagctgtgtgcatacaattgagtatgttgaagtaaagatttcagttacctcctttaaggtttgccttcctatacgtaatcacagaagcactcctgatgacaaagaaggcagagaacttatattctttaagtcacgtagcctgcagcagttctttaaagcctctagtttcattttttaatgcaaagatgtttttgtgtgtgtggagatggggtctcactctcactgtgtttctcagtcctgtcttggacttctgacctcaagcaattctgccttggcctaccaaaatggtgggattacaggcatgagccactaccctctggcattaacaattttgataatttcttttacacaggatctccttgtttgctgtgatacaaaacagccccctcctttattttgtcatggctccctttctatccccattctttgaatcaattgttaatctgagacacgatccagttcattctgtaactctggaaacttctaagatgtaggtcttaggtgtacatgtaccccagttgagaagtgaagtgccgaacattttaacattacatgtgaactctatgggtctcttcactttcagagtccatcactgttttgttgtcagctttgaactgtttgagcagaattcagatttctatgggcaactctaatcagggtttccagctacttaaatccattaaccttcaagataaccttttttgggaatttgacacaaacaatactacataataaatactagtgcttcttagatgcagtggatgttggacattctaaggagagtcagagctctaattaggagattgttaacatgtgattcaatcatgtttttaaatctttaatgtaattataggtgatatctcattgttggaggcctctccaataattccccaccccagcataagtgtcctcttatctgcacccttcctgtagcctctaaagagtctgaatcactttataaacctgaccaataagcttgtggttatgaacaatttatggtagggggctggcttccatgactctgtgggttctattcctgtctagaaaccccccttctttaaaagaagggccaagaatccaggaggttcttgggttgtgcatgccagttctttcatagagtctccaatctgtctccaatccaatctgatacattgcttggtgggttgggttgagatgaagacattggttgactctgtgttgatttctcacctttgagagatggtttaccttctcgttctatcctctttcttcaccttggacttgcttccatcagttgggggaaaatgctcctttttatctgtcttttgatagctagacctttggacatgtgtataaagagtatgagcattttgctgtgtttcaggcatcagcctagtgaggcttaaacctgagaggtgctttgtgcattggttttagtgtgagaagacttttaattgcagtgctcccaaaatattggatgtgtataaaatagccttagcatttaacacgacggctcttgtcctacaatgattgcagttttcaccaggaatgtcagttcagggctaagttcataaaattcatcattgaattttcagataggtttagataaaaattaagactttccgagaaattcttttctttttttgagacagggtcttgctctgtcacccaggctggagtgcagtggtgtgatcatggctcactacagccgccatctcttgggctcaatcaatcctcccacctcagcctcctgggtagctgggactacaggcatgtgccaccatgcccagctgatttttatattttttgtaggacggggtctccctatgttgcccaggctggtcttgaactgctgggcttaagtgatctgcctgcctcgatctcccaaagtgctgggatcacagacatgagctactgtacccagccttctagagattcctaattcttattgtgacataaaattattaattagttgaatgtgattttgacattttgtagtttttggaacttggggcttatccatgaggccattctctggaagccaaagcagttagtgatttttgtggcaaaatccagtcacgagcttcatgaaaacccaatctagtgatattgcctagcatcatctgtaattattcctatgcttccgaattgtcaatcagtttgtttaatgcttagtttggtgactctggcattcagagtttattatagctaaagaaacaagcaaacaagtaatcccgctgaagaaatggattaaccagatgattatttttattggaatgagaagttaacaaaattagagctattggtggcacaaattaatcactatgtgattcgatttgattgcgttgattcttaactgcattgatgactaacaagagagtagtgaaatgagaaggttcagggaatcctagccaggccttttccttcctatgcagttctctctttaacggatcttcctatcttgcttctttaaaagaccctcttcttggccgggtgcggtggttcacgcctgtaatcccagcactttgtggggccaagatgagcagagcatttgaggtcaggagttcaagaccagcctggccaacatggtgaaacccgtctctactaaaaatacaaaaattagccgggcgtggtggcgcgggcctgaaatcccagctacttgggtggctgaggcaggagaatcgcttgaacccgggaggcagaggttgcagtgagccaagatcatgccactgcactccagcctgggcaacagagcaagactctatctcaaacaaacaaacaaacaaacaaacaaaaagaccctcttctttaaatatatctccagtgactgccattccattggacttctttcatctccactcaccacttcctgagatcgagtcccttgccttgccttgccttgcctttctgtctcattgatcctttacttgtccatcccataagcccctaaaagcctccgttaccccatccatgaaacaaacgccatttcttccatcctttaagtctcatctctgctttgaaatgtcacgtgagctggagggtgggcatgactgtggtctctaactaatgtgtgtatgtgggaagttgtgtgcacatagacatttctcatttctcttcattttagagtgtgaacttcttttttttttttttttttgagacggagtctcgctctatcacctaggctggagtgcagtgacacgatctcggctcactgcaagctccgcctcctgggttcacgccattctcctgcctcagcctcctgagtagctggaacgacaggtgcccaccaccacgcctggctaatttttttgtatttttagtagagacggggtttcaccgtcttagccaggatggtctcgatctcctgacctagtgatccgcctgcctcagccacccaaagtgctgggattataggtgtgagccaccgcgcctggccttttagagtgtgaacttcttatgggaaaatacttggctttgttatcctctcccaacacagaaattgttgctcaactaggaacggctggcatatgctaccctcatattaaattttgctaaaagaaactacttaatccctggattatgatgtcctattatttattaaatatctcatctcatgctgtagtgaatatgaaagtgatgattcttttggagaacaaataccagagtatgacaattggattttacaaacaatgataaagcggacttcggaatgatgtatttatttaatgtatttatttaaattatcgacatgaggtacatagattatatgatacatttattcttggaagtattattttataacattgaaactgattaatttacaacatgtatgttgttaccataaacacattctttggttcaaataaagtcttaaaataacagctctttaaaaaaaatttattgcttatttttggaagttggagaataacaagttctatagaattttccctggaaaacctgtcagtacagcttaaatattaattatggttctgattgcctttcctttttgtaaagcattaaaaaactcaggttatactttagcttggaaaccaaggtaaaattttgccattgccctccctcctttcatttgctcattcattcacatccttatgctggcgttatgctgggtgtttttatagtatcattaatgataagctagaagaaagttgatagcaattgctataataaggtaggtacagggttatccataactatgctaagtgctgtatgcatgttcacttgtgtggtccttgcagtgagtgaccctatgaggtgagggctgtcagcatcttaattttacaagtgaggaaactaacacctagagatggcaggtcagtttcccaaagtcacacagcagtcctggaacccagtcctatttgacttcatagcccaaggcttgctctttattctgtattttaatacttcccaaatcactttcataaaaacataattttcatgatggaaagaccctaaaaaacatcatcttttaaaaaaaggtagatactaataataatttaaaccaagtttcagcaaattaccacccatgggccagttgcctgtttttattaataaaatgttattggaacacagtcatactcatttgtttatgtattgtctgtcttctgtggttgctttcctgcttttcgtgtagttgcaacaggggtgatatagtttgtatagttgcagtgtgtctgtggatgacccatagagcttaaaagcttgactatctggtactttaagaaaaaagttttttgaccccaatttaaagtacattgcattgtcattgttaggattattctagcaaaccaatgctatacttaatgcaagaagcaatattatttggtagtgttttaaaatttctagaaactgcattacctgggttcattgctctttaggatatcatggaattcttatgttggtgtcaaaaatttgtaatattaaaaaatacttcctctgctttctcagttttgttaaaaattgtatttcagagaactttctggcattcttcattttgatgacaaagtaatttatttggttgaacttcaatgctaatattttctttaagaccttactgctttttattaaaaatggcaacctggatcaatggtaattttccttttttgctattgaattagtttctcaatctgtgctttttttgttgaatatggatttttagattttgaccgaaaattatttccctttcttgaagacccattcttgtaggtttgacttgcataatatttatttctgcttgtcttgctggaaactggctttctggctaacatatgaggacagacattttagaaatggaaactaaacttgaagcatggaaaagtgtggcttttttccatccatgttagattttcctcctatttttcattttgaaatcttgttcctgaatggccatagcttttatttttgtgttcctggtgctgcatacagcctggcaaatagtaggcactcaggaagtgcttagctgtttgtcttacagtgcctacaggcttggaaggaacttttaggaaagaatggagttgcagtgtgtcagaaaactgtgtattactaagccacctgggaaatcgcggccactttttccctcattggcatggctcaagttttacttgcggaggcagggaggtatttaaagtacaggaaactgtgttaccctccttctctattctgttgctgccttcctgcaggtaattgggaatggtgagaagggtccatcttagcccaccccaggagggaaggcagaaggaactttacttgttgacatggttgtctcttacagaccattctcgatagggaggcttcttaaaaggaatctgtttacattagtgggttaaggcagtactttcactagtataatccacatagctcagggagtgagcattaaggttggagaagaaaatattagtaattctctctctgtttttttttttgtttgtttgtttgtttgtttttgagatagagtcttgctttgtcacccaggctggagtgcagtggcgcggtgtcgactcactgaaacctccgcctcctgggttcaagcgattctcctgcttcagcctccctagtagctgggatcaccaccatgcccggctaatttttgtatttttagtagacagggtttcaccatgttggccaggctggtctcgaactcctggcctcaggtgatccgcccgcctcagcctcccaaagtgctgggattacaggcatgagccaccacgctcagccatctctatatttttattcatcatttttaattataatttttggtatgttctgaaatacacataatacatcaggatggtggtaactgtgtatatagtttatgaataaataaacaaacctgcatatgttgcaattgggtgcccatgttattaaagagacagtatagtggctcagagtgtagacttggaggcctgtttgtctgcatcatcatcatgtaggcttggccaaagtcctgtttgttcctctgtagaatgggtacagtgattgtacctgtatcataggctgttgtgaggaattaatgagttaacatatggaaagtgctttaaactgtacttggcacatggcaagttatatgtaagtgttaattggtattatttatatgaaaatctttagtagaggtgtctagtaaaaaataattggagactacttatttagcacttaagacttcagactcacacagttgttagttcaagtccagactttcttgtgtgtaactgtggacaagttagctataaatgggcatggtaataatagtagcatattttactgacttaggcacacatatttttcacattttaacatgtctgtagttagattatatcttataatcaatggtgtcttagattttatgaaatatgatagtttctactttctaaggttgtgaggaagaaataagacgataaatgggaagtggttagcataatgcctagaatatagatggtgtttaataaatgttaactgttataattaagatatattggcatatgcattattctaagagggaaatgagaatgcaaaatgcagtgacaatagttggaaggtcttgatcagcctttgatatctagtaggattatagattttcacctttacaactcttggaatacttctgtggtacccagcttgggaaatatggccaccttttaatattctccaaaaaccctgtgaaacactgccatgtgatattattgcttcatatgatcgaatgccgattaactggtacccatagtcctcaattaacaaggtattttttgattagaagtctgtgccaggagttaaggcctaggctaagatgatgtgcatgggttgtacctgttttatttacatactctttggtttttgctccaatcatagtgctgcatcctctaataacctaaatgtttaaaacacatgagaaggaagcatacagatatagagtaacatttgatgcgatgtgacttcctttacagactaaacattaatacgtttttaagaatctcttaaatatagcagaatctcttctgtttggaggagaaaaccatgataagcattttcatttccagtatcagagctccctgtctctgcagagatggaaaacttctggccaacataaacatatctcttgttacattggatcagaagcagaaatttgtagttgtcactttgtagccagcgacccttgtgttcaggccaaagattggtgcttgtcatggttttctgctcttctcagattgtacactctcagaacctgatggagaagtgacttggaaagagcttttataaagagctttgcatcctttccttgtacctagggtggctggaaagttgttcagcagcttctgtgttcaccctctgcctgcctaggcaggtatgtgtttgaagccatagggaaaacatattttcagctcagtagaaccatggcgtccaggtgagagtatgctggggtgggtcttagatctttccggactcctgtggaggacactggtttagaaataatcacaactggttttagcatccttgttatttagggtgagagccatgtctaaaaaaagtcctttgacctcaggcaattttgtttcttgtggattcgtagaatcaatctggttctaagaatctgattcctgaagtgatagattcttcatactttccctagcatcatctcatttatgttttgtttgtttgtttgtcttgtatttattttatgaatcagtgaatcttgccttaatactatactcaaacacagctttagttaacgttttgagtatctggaacacttgccacgaagaaaaacaaaagaaaacctcttgaataatttgcaaggactgggttttgcatgtcgtttcgaagtaaatgctgcctggcttcatttgagcagctgtctgcattgctaaggctctggtgtggagcacctaattcccttctgttgcttactggctttctaatttttcccctgtgatcatagttataaaacctaatttccagggggtcttgtgaatcatattagtagctttgtgttataatagcaattttatattgcattggtattcattttcactattacggaataatcaaatcagcacctctcttattatgccgttgaaatagaaaataatgggactgtaatgtaaaactgctaatgtgatgaaactcgctcattgtgttagggtaagaatgttctcctttcttgttccagctcacttgaaactgtgattgaggaaggaaatggaaagcatttctacatctgtgataaggccccgcgtacatccttcatttgaatacgtaattgtctttcgatggcgcagggtgtgcttgttcgcacactcggaggccttccctgccaccgtggcgatgcacggggaagcaggatatgcacggaccagttttatcctgtggtttcccttttaatcatgagttacactgaatgtctctttgtttccagaggacttgtttgcaccctttcttgctcatggaggccttcttctggccttttttaaaacttgaagggcacattttgactacgttgttagaaaatacagcctcccccccccaaccccacaaaggttcagatttgacagggatgttgggaggcaggtcaagtgactgcctaatgaagatgaatgaagaaaattgctggtaccaggatcatgcgggggctcccagcccagtttgctgcaagtgtgatggaatctcatcgcttcatttatcagtgtcatatttgggctaaaagtgagcagtattgttctcatttttcccagatggataggtcaactttaatatttattgctcttatataacatttgtttgatgtatttccattagctaggcaataatagaaaagcggtggagagaaacataaaacagttcccttcctattcagttgaaatacagtgtacactaatgtataactacggcttgaagtgccattgattttctccccttttggttgatgacatgattgtatatattaaagattcccatgaaaataatggagaggcagcgtgaatgtcatatacattgagagcagctggcggggtagaaattgtgttgtctttttatttttgtgatttggtcacataattggtgaatgtctcttggccgtatattaaattcttagcccaaaatcatattttagaatggggagtaatgtgcagtagatcgcatcatcctctgggttctacggtgaatctcaataaagctagaattttcttcccattatagagcaaattgttttcagttgctgaataatgttgattttttctttatatctttgcgggtgaaaaataccttgttatgaaaagtattttcccctatgttttgaatatattaaagatatggccctaaacattaaaaaaaacacaactggctctgtaaggacatctagctcctgagatattagttgatgatcacattttgcagtaatctgaacattgggctattattttgtactgtggaataaacctagctctttgtgaggtaggtgttgtcttaagtgcaaagcaaacatcctagccatatgtttctataatttaaattaatttggtacagtcatactgttaatctttagtgacttgttgattggcattttgcagacatatttctggaaggctcccaataccattttctgcagcctttctggcagtagcagagagcaacatttccacaaattggaatcttgtacagcactgggaagcaagccaagatttaaattagacaataacctctgctctgtatatagcttctattcttcagctgtaggcagagtgatttgtttaatacagtcagccctgtagcatataatagactgatatatgagtcactccttggcaatgtgtttcttaaatttatatagattgaacaactggttggtaatgtacttagttacagttgtacaaacaataactattagcagggctgaaacaggcctagaaaggctgcactgggctggtgtttgtgaggatcccgaagtattgctgattttcagaataattcccctttgaggctaagggagactctatttcataaacatgagtgtgcttttttagcaaagtagcaataaaagttttatgttacagttttctgtttctcattttctatttgcttaaaattgaattggggaacctaatttccttcaaaaattaaacttaacatccgtctacattaggggcaagataatttgattgcaggggttttgtttttgtttttaaacacttgctttttttttttaacaaataaataacataggtataaatatgtattttctgtttttttttccccaggttagactgccgtgggcactaactgttcatgggttgaaagaaatctttctgagcaacaaagatcttttcttaagggaaaagcttgtgctccaagttcagttcatgtttatttaaaagattaaaatcattagaccagatctcacttttttgtccaaaagaaaattgattttgcttcccataaaagtgggatctgaaagaggatattcaggaatacgcaaatagaggcaatgtcgaaatctgtttgtgcagctgaacaaagcaattctgtttttaccgctgaacatttacttagccttggtgtgaaaatttctgaacagaattgtcacctgtctttagaaagtacttcttttgtaaggcaaagaggatcattttgatctgaaatgttttaatgctttttctttttaaacttctgccaactggagcatttataaaataacgtaccctgtaaatattgaacaatacaaagacatctttcataacagtttatagtatgttgcgtgtgctcagtggaagccaggcagcagttagtggcaaatgatatgccaatcaaaaattattactgcaagtataacctggtataatgcagtatcttatctggaagtgtcaacttgatataagccaactctttgtcttttaaagttaagctcttgtttgccctcagttaattctgtctcccaaaggctcatttgaattgcataaaggataatctgcttgacagttttatacatttaagcaatcttgattatatggtattttacatgttttttaagctcccagttactattttatttggcttttaagtctttagttaggaaagaatgagagaaactgataggtagaatttgatactctttctgtgaacagcatttagtaaaactgatatagcacctctttttattgccccatggttcatgatggtaatatttgataattgttgatgatggggtggaggtgagagtaaattcttgtgagaataaacggaagaaaatgtagtagccaaatttcattatactgaaatagagatttatagatgatcttttcctccctctcaaccatgacttaatttggagaatttctagatgaattttgggtgaaattttaggatcaagtgcctagtggaagaatttggaggttgtatatgtgttaactgtactctggaaaggcatgagttgtgtgttaacaccgtggtggtagttaagagcataccatctggtattatacagactggcttcaaattctgcgtacaccacatgtgcatgtgctgtgtgattttaaaacaagacactaaacctctctgagagtctgcacctataaccagaggagaaagtaatactcccccaatagggttatgatcaaggtgaaatgtgctgaaatgccaataaatgctactgttattaaggtctgccttcccccacactttaggcctggtgagatttgaaaaagttggtccagagtggtagctttagtacttaccttcctttcactagcaaattatttgataatcattagtggagagtcacatggctgttctctatatcctgggacgaaatgaatttaattttgaagagaatataaggcatcagggaattgcattttggggaattaggaagctcttctgtttccaaaagcacgttctgggctcccaactcctttcaaagttttattatgatgtcttaaaggtaaaaggggttttgttacattgctttgtcaattgatgggcaacaattctgcaagtttagcaccagtattatcttgttttaaagataaggaaatgagaatgtagagaaggaccttataaagaacgtacctaaccccagcaagtggatgggatttgaaccgatgccgctttcacccacagcaggtagtaagcctgtttcaggagagtcacttctccatggaagatctcccctacctgtatggtactgagaattgtggtgtaaacaagccaattactagccatttgacataaactcatacctactggcctatgccacaggtagatggtttgtcaccaaagagcaaacaaactgaaaaaaacctctctcctctagaatcatataatcagattggtgaaataattttgcatctgatgtaagagtgctgagtcaatatttattgatggagaggctgaatgggcgatgtaaccaaatgcaagcgaatgtagtagaaacatcctcaaaatgttgagaggatgatcttgagtggaagtttttgttagagagatggatttaatcagagacttgaaggacaagaggggcacagagtaatctaacaaatgtagaactactgagatagccttaaaggatatggaaagtagaaataaataaataggatatggtggctcagttagaatatcgtaacagctgttaacacataaacccaccatgtataatgaggtaaatgtaatagaggtgtatttcctgttcaagtattaagttcaaggttgttctggtaggcagtggaggagggacccaggccggtggaggccttgccatcttgttttaggttttaacacccagttggggtggaacgggacatagagaaggtggagaagccacacctgctcagctgctttggccccaaagtgagacacatccttctgctcacattgcactagtaagagctaaattgcctgccccccaacccgcatcaaaatgcaagggagttggaaacagcccataatgatttatgatggtaagaggagcatgactcttagaaaataattagcctagctgccacatatgacaagcagatttgtttgtcagtattagaagattctttggggagttggaagaagagataataaaattattattacagttgtgggtgaaagggttataggggagttttggattatcagtcagaaaatatctgttctcctaagatatgaaattcaagcctttcaatattggtgaagataaatgtttaaagagcatgtgcccacagggagaattatcaacagtggaaaagcatctgaagtattgacattgaatataaggagtgtggcagtgactgaagaactgtctgggtaattatgtgcttaaatgggtaggagtttgggaaataattaccacctttcctccaaatgaaaagggagactttgtaggaaaggtgggatttcaagaggtggaagcaaagactgtttagatgagaagccttgttctttaaactaggcggtgtttttaagatgattctgtgatggagtaggataaaaataagaagatatggaggacattttctggtgagaaaaaaggggctagggagaacaaacgagaatatttaggtttgtccaatatttataagcaatcttctccctttattcttgccagtaagtaattctcttcagatgatatttggcataaaatgtaccttattgctttgcatcaccttgtagtttatatatacatttattttttaacctctcctgggaattcaccattgccactttcattttatggtccaatttatggatacgctgaactcgattaaaaattgcactctcactttcccaaagagctggattctgagaggaagagggctgatatgtatgtggttatacgatgtgtgtgtaggtgtggctatgcatataggtatatgcgtgtccaaggtgaaagagttctcagtgttaccttacatgtctttctcacttgcaccttattctgtgaaagttccttgaaatactgctattgagatcctgttcccgttgccccagttataagtcaccgattccaggtgcctatttcttttgtaggactgtatagtcttttgcaggtatgaatattgactaagcacagggaagcttggttctgtccacttgctctgtgttcagtgaaagtacaaagtacatgtttgtttcacttgtaagtataaagggaaaaacccacctgttttgccttcagaaaaagtcttttgatctgactgttctcagaacgaaagctggagtgaactttttttttttttttgcagttgggttttctgatctaccttgtgcctctcatgaaaacacaattgggagttgaaagaatctactggtgaggaaaaaaaggaaggggcttttcatcatcctgcaaattagaagcaaagatagggtcttttttttcttttcttgtcatatctgataacacctggtaacatgtggagccctaactcagctgggaaaatgaagagtaacttaattttgattggccatctgtcttaggtctcagattcagtatatgaaaatttagtttctcatgaacattctacctgaaaggaaaaaattaaggaatatatatatatatatatatatatatatatttatatacaactaatatagtgttgtgttattggtcatttttcaaactaatatataatattatatatatatcatatattatatatataaattggtcatcatataatatataaatattggtcatttttcaaactaatatatatataatattcatgatgataatatttgataattgttgatgatgggatggaggtgagagtaaattctagtgagaataaatggaagaaaatgtaatatccaaatttcattatactgaaatagagatttatagatgatcttttcctccctctcaaccattatatatttatattgtataatatataatataaatatatataatatataatataaatatatatattagtttgaaaaatgaccaataacacagcactattaaaaagtttcccaaatattgacaaagtaattatgatgttagaattcattgtacagacccattttgagaaatagatttcacttacaaagacaggaacaactgaagaggaatgcttcagagtcagcctttgttgtgtcaaggggcctagtaaagctgttcagattggagtcctgcaaaagctcaatgcttcctactgctcctggcaatgtggtgtgtagccccgagcgcagcttcatctgtggccgtggtactttctttcatgagaggcaagaaaccatcagaaaaattagaacggaatattgaaacatactggcgtgtcatcttctcatctttgatgtgaaacccaaccaaaggaattctgcttcagttcccctctctaaggatggagataacactgtgaatgacctcagggggtcatttcttcatctatgcagaaaatacatatttagcatcaacagtgttccacatagtgtatccaatactgagaacaaaagagggagcaaaaagagatgtaattcctttgtgacatttccagtccatgggtaggacaagcagatcagtccaataattacccaaagacatgtaaaattgcaactctgatgatcaaacaaggttatacataccagcacatacttagcactcaatacatgtgagctcttgttagaaatattacacaataagtccttttctgctgacaaatctaaatgaaataaaacattactcccatttatttaacacagatttgaggagctgctgtgagtcttcagctgtgtggtaagattacatgtctactgggggcgctcacagcttaattaggaagaaagacaaagaaaccaatcatagtccagtgtgaaagggcttcagtgtaggggcaggaggaagaagagctcaccccattggatgttaacagaaaaggatccttctatgaaagggactggaagaaccaagaagaagagaaggattatgagagtagaggtgatgaggttggcaatggaggagaggagcagaaggaatagaagggaatgaggctatataaacaaagtgatgttgatttgtaaatggctttttccttcaatgaggaaaagagttttaattaggctgtgggtaactgtggaagtattttaaccctgacagtgacatgtatgatcagacttccatattggaagactaaccctattgaaaaccaattaggtaaattacgctttagccatgccttggcatactgtgttaaaaatcacatcttaggccaggtgtggtagcttacaactgtcatcctggcattttgggaggctgaggtgggtggatcgcttgagcccagaagtttgagaccagcctgggcaacatagagaaaccttgtctctacaaaaaataaaaaattagctgggtgtgatggtgtgcacctgtagtcccagctactcaggaggctgaggtgggaggattggttgagtccaggaagctaaggctgcagtaagccatgttcatgccactgcactccagcctgggtgacagagcaagaccctgtattaaaaaaaaaaaaaaaaaaaaattacatcctagaaggaaggtctcagtgaagaaaatgattacagaatacttttcaatttaaaaaatatactaaatatactttttggttcccccttgtgaagtgttcatcttgagagtggggtgagaaatgccttttgtgttagtcctcaggctttccagtattttccattattttaaacaatgcaatataaatgacaaatggaaataaagatgtattagtccattctcacactgctataaagaactacatgaggctgggtaatttatgaagaaaagaggtttaattgactcacagttccacaggcttaacaggaagcatgactgggaggcctcaggaaacttacaatcatggcagaaggcggaagggaagcaaggaccttcttcacatagtggcaggagagagggagagagtgaagggggaagtgccacacacttttacaccatcagatttcctgagaactcactcactatcatgagaacagcaagcgggaaatcttcccccatgatccagtcacctcctaccttggcatactgcgttaaaaaatcacatcatatgctgggcgcggtagcttacacctgtcatcaattcaacgtgagatttgggcagggacacaaatccaaaccatatcaaagggtaactccaggtgcagtgtggaggatgggtttgaagggaggaaattggcatctgaagattggttaggattgctggtaccattagaaagatatgcagtgatgtgaaagatgttggtgtggttggtgtagttgaatgaccacatgtggaggataagagagaatcaaaggtcgtggctttggaaaggaaatttaatagagtgattgatttctgggtgggagcatatctgagattggtaaagataagctctgtatttgatttgttgaatataagttggtagtaagtcatccaaggcaatattcagaaggagtaagaaatttgcaactcagtatagtgaaagatattcaaactggagagtgttcgtggttgatgcattgggacatgatgaattgttagaggatgtgttaagaagaagctgagaacctttccaggggataagaccactggcttagagtgactgtttccaaatgaaaataactctttccagagggtgatagctgaaaatgtcagaggagaaaaagtaatcatttgagacctagatactacgggggacatgtccatgggctttggagattagaagtccacagtagacttaatgatcacagcgcattaaatagaggaagacaaattgtaggaggcttaaaggtgaagggggacagatcacaatgtggagatggacacatagttagtgggtttaggggagggaggtacaagattaatttgagaggggctcagcagtgtttgctcccctaactctaagggtgaatgggactggaacattttgctaggaagaaacagtggagtgggaaaagatgaagaatcaaatgagaggtaaattgacagagccaaaccaaaccatggtggagtgggattcagaacacagatggaagaatatgttttgctgggcaaaggaaaaaaaagggatgatttgaagttctggtttggggtgatagttgcaaaagaactgcatacctcatggcctctgtttacccattgagggacaaagtccattagttgacaagtgggtgaggtttggtgctgaaagcttggcagagctgctgtggggaaatgggataggaaaagttacaggtgctgagtgcttggagaggctctgctgagtcagaaacctaacaataaaaaagctcatgcctattgggagagagacatttttgatgcttatgtctccaaggtatattaatcgtgtgtgtatctgtatgtctctctctgtgtgtatatctattccataatgagagctcagtacacatttgttgaataaatgagtcaatcatagatttgaggacaatttttttggtctacttcctagaacccaagtaaatataatgccaagatttgagtctttttcttgagtctgctttacttttttaacttttgttttccttctctatacttggtattgcctcttccactaaaaagaaagtttgtgcaagaagaaaaaattgcatccaaacacttcttgtgtcttttctatggataaagcattagaattgcagaaaagtcatggcaacaagatggtcattgcccttagaagcttccactgtagtgggcatgggggtggtgggatggagcagaggaagaattaaccattatcaacacaagctgtgtcataaaaagagatagaaaggaagagctctggacattccagagaaggaggtcagtaaatctggtagcttgagctgagcaaagttcctgcagtaggtgaggtggtttacacgggacactgatgaaagcatggaatttcagcagggggccactggctaggggcagggtgttttggaatggaggtggcaagaagagtttccaatggaagagaaagcctgaagttgggaaaatatggaatgtggtcaagaaataaaatatacataccaggatacataggcagagacatccatatgcagaaagcacagtgagttagttactcattgtcaagttttggcacttggaagtttccctttggcttacttaagataactgataggacctcagatgaaaggggaaaggattcaatatgggtcagtttcatttttttagacatatcagaattgtgggggaaaatttgcttttccctcttagtcattaaatatttgattccaaaaatcacagacttaaattcacattgctccacagacacaactgtcagtttcaaagggtcccaacatcaacatttatcaaaaccaaattatgttgaacaatggtttcaagttttgtcagaaatttctttaaattcccagttaatatttcatgtattaactttaactgcaaaccctcatctgattctcttgtttttaagaccttattgaaaagatacaggacaacagtagtttggggcttatacattttgttgtcctagagacaaaaacaatcctttaatcctgtttcttttagtagatgtcactttcttatgaacacattcagatactttcccctacttaaatgacgtgggtatataaaattggggatggaagtgtttctcgagcaatacatgtgtgtttagttttgaactgaccctcctttagagctgttagttcttgaagtgaaagcaatctacattactttctgatatatgacactccctagtagtgaaagggtattgaggaagcttatttttcttcattttgccaccattcatgatgaagggatgtctttttctttttctctttcttttttttttttccatctgactcagctgctctggtggttgttatggagaggattgtgggattagggggtgagcttggcgccatgcatggtcactaccagaagccaacagttttcgagttgtacaactgttgtcatcccatggtgaacaaggccttctcactaatcccaaaagatgcatcttctgctttattataagaaaatagtttttgtccatttgttccaaggatttccatttatgtaccattttggactctttatctacacagggataatttatatgctaggggcataatgcttattatttttccccttagaacaaagcaagatcatatggtggatggtcaccactttttttcttttaaaaattaattaattaattaaagatgtagaggctcgctttgttgctcaggctggagtgcagtggtacaatcatatcttaatacactctcaacttccagggctcaagtgatacccccgtctcagcctccagagtagctgggactacaggcgcgcactaccacactctgctaatttaaaatacattttttgtaaagacaggggtctcaatatgttgcccaggctggtctcgaactccagggctcagctgattctcctgcctaggtctcccaaagtgctgggattacaggcatgaggcactgcacccagcccacaatttctttatatctataattcttccttggccatagcaggccctcttactctcagccacttttccattctcccaccaaaactggagttgagtatttgaattttttttgatatggttctgtgtaggtacatgcatgttcgtcctgttttcacaactcctggagggcagctggtgccatccctcccttatacttcttctctgtgcttttgataaataccaaagtgtctttgatgtcattgaacccaacagatctatttcagcctcattgtacttcaagcttttgcagcattcaacattattaatcactttctctttagtgaagtcttctcttgatgtcagggatcccacccttgctaggcttcccttccacatcccttgctgccctttctcaggctcctttttgggatccgtgtcttggtcatcagacactggtgttcttcagggttctcctctaggcctcttctcatctcccttgggatgttctcccttcccagtctcactacggggggcctcattcattgaacaccagcacccatgtgtctcacaaagagtctcacatgaaaaggtcactgtattccagacttttctggtaaatgacagacatctcttggcacctcaaccccaacaatgtttaaaatgcacccgtgctttggcccactgctggaagactgattctgttcagcttcccctgtgttgatgaatggcattgccacatatccagttatgccagccccaaacctagaagcttccttgatggctcttctccctcacccctctcaattcatcatcaagtccagggaaaacactccaaaggaagttcctgggatccatccatgactcaactttccccatctttgctctcttctctccattaccatctggggtcatgctctcatcatctctcatctggtctgaggcacaattttcctaactgatctgccagtgctcactcttatttattctccatctatatgcttccttttttgttaattttattttattttagattcagggggtacatgtgcatgtttgttacatgggtatattcatgggtatattgcaacccaactggtcgggttggtcttctaatgtacctgttacccaaatagtgaacattgtacctgataggtaattctgcaaccttcatcaccccccaacgtccttttggagtccccagtgtctgccatttccattttttatgtccatgtgtacccattatttagctctcacttttaagtgacaatatgtggtatttggttttctgtttctgagttaagtttacttaggataatggcctccagctctatctatgttgctgcaaagaacatgatttcattctttttttatgactccatagtattccatgggagatatgtatatatatatatatatatatatatacacacacacatacacacacacacatgtatatacacacacacatatacacacacactacatatacacacgcatatatacatacatgtatatatacacacacatatacacacatatgtatacacacacatatatacatacatgtgtatatatatacacacacatacatgtatatatgtgtgtgtttgtgtgtgtgtatatatatatatatatttatctgacattttctttatccagttagctgcttatatgtacttaggttggttccatgactttgctattgtgaatagtgctgcaatgaacataacaagtatagatgtcatttttatgtcatgatttctttttctttgggtagatacccagttctgggattgctgggttgaatggtagctctatttttagttctttgagaaacctccatactgtttttcatagagattgaactaatttccattcccatcaatagctgtatccttcatggcataattcacaggagaagtctcacattcattcattttttcacttatatctgtagttatttgactgttatcttatttctctgcactgggctagatgctccatgaaggcatagattttttttttctaatgttttttcactaccttagcaaactttctggcacataggagttaatcagaatatatttgttgtaagaatgagtaaatgaatcaacagtaaaacttgattattgctgtttgttattttcagaatttatgtttatttacatgcttcatgccgatggagattaatgaaatccttcttgagcagtttcattataaataaatatatactttttttctgattgcagaactagtaggtcctaatgttaaaacacctggaaagcatagaaaagcaaaagaataaaagaattctgtcaaactggatatggttttgaatcatgtttttctgttataccatgactattttcctttgtcattcaaactgcttcagaattgtttaaaattaaattgacaaatttgagacacaaaacctttctagaatatttatctttgatgaatgaaaactcttggaaagactttgtttaaagaaatttccctaaagtattggagtccataaggtatgatgaactttaggctccttttaaaatatattacattttgtttagggtcaaaaatgttttctgcttcagtaactactgccagtttatgtaaccccatgttattatctagatattccatcattccaatttctcaaggctagtatgaggattccttggttagtattttttacaaagcaacattgtatatagttccagttaaccacattaagtgctaacttcaggttctaccactaggaattaaatatttctttgttaaggttacttttcttgtattaaaaatactgccctgtggctcctctcatgcctgtaatcccagcacttcgggaggctgaggtgggaggatcactgaggtcaggagtttgagaccagcctgaccaacatggtgaaaccctgtctctaataaaaatacaaaaattagccgggtgtggtggcaggcacctgtaatccaagctactcgggaggctgaggcaggagaatgacttgaacccaggaggcagaggttgaagtgagccgtgatcgcgccactgcactccagcctgggcgacagagcaagactctgtctcaaaaaaaaaaaaaaaaaaaaaaccaaactgccctgtctaatagaggaagcaactttaccattttacccaacggtgaatgggtaggcaacatgtaggtttcatctcagctcatttcacaaaggcacacgaagggagattataactgtacagtgctggaatgagttacgcccgtggtgttttcccagctctccccttctaggcaatgcaagagtcaagaactttgacttaatataatgtattttctgttttctctggagggtttatttttccttggggaattctgatcccttgtgtctagagctttcctttgatatgcacccttttattttcagttgtgcattaagatattcagtgtcaccactttacaatcttattaaagtcattaaaacatggaagtgaaacagtgtgggtgatgtgcgtcgttgttgaaggcgtggttttcctgggaggttttcttgggagggcatatttttggtctggagtatttagcacagtggaaaagggagtggcttatggctagtgccagatggacatccctcatggaatctgttacttatcccaggggccctattatacggggtttattttcaatattaatcttgatatgaaggcagctgcagttcttaaaaaaaaatcatacctctaacttatttttattatggccaaagaaatttatagattggctttatagatggattctactattcccctcagttattaaccagcactgtggaatgtgtagtaatttttcctgtgtgccatatatatttttccactagtagcgatgagaaaaataattcttttttgttaggaataaatggagtcagtgtgtatggtaatatgtacacttcgtataagagttgctgtgaataaggtgctaacattttactttaaaggtaagtagtgtgtcccccctccctttttttagcttctcaacaagaattttctctccaaatatgctgcatgtttaactgtggcatattcagagggttaataaatatttagatagtatatgtagtgtctttagcttaaaatgcaccctaactgatattcttttgtggttgttttaagaacttttacatctgtttttcctcccttttggtcacttttgcatttacaacttgatataatttgcctaaatacagttgagtcactcttttagaatttgatttttgctgaagtgagtaaaatttaatatatgatttaagaagagctacttacaaattgctgtataatcacatctttttaaatgtttgtaaggaaatgttaaggtaatcttaaatgtattagtatgcagtgactgtttgggatcccaagaataaaatgcctccattatttaggaatacttaaattcatggttattttatataaaatgctaaaataagttgtagctgaacgcccgattgaaatttacatcttgactgaattccattatttgtcttcaagatgaaagccagcaacccctactttgaagggattttattttatggttatgtttaagaaaccattagccacatactcaaactaatgaaaatataggtttagcaaaaacccttcttttaaaataaatataagatataaaatcttaagttacagattttggaatagttggttgggaggaatgtgatttctgtccttcctgccctaagacctcgtcggaagtgggatttagagtctcatgtgagctctttcctagtaaaagattttagataaacacaactggtaaaatacagagaactaatgatagctatatgatcacccatctggtaaaaagttgtccctacagaattccggcaatcataaaatcacagaaaaatgtatgtaatcaagatattcttgcagtgtgagcaaaagctctctgccactatgcagtaaaacattagccctgacatgtttctaaagccagactggtaccagtggtttcatagattcccataatttcttatcagctatcttagacttgctcttaaacaatgataaatgtgaattaagagacattaatagacctcagatgtaatcttgtttggcttaagtgattatatgttatatatgcttatgaacttcttatcattgatgatttgtgagttaagtaggctttaggtatttggtttatcaaatatgattaagactggaaaataaacacattcagtcccttataatacttaaggaagaatttataggtttattgatcttttaaaaatgttagccttaaaagaacacgttaaactatttctgtttcttggcttattctcagcaggaacaaaaaaagcaactgggtgtttatataaatggaaaacttcattgctgagaacctactagttgatatatatttgaaacacatttaagagaatctttaattgcagtcagtaatcttatagatatatccaaaggcaacacaatgccctcttgaagaaacaacacattgtatttggatagtgtagaagcaatgattctgtaatatttattgtaaaatacctcatctcgaatttatgtttaatgtatggattgatctatatcagagtttctcagtctctgttgatgctttggatagggcaggtctttgttgtgggaggccgccccgtgaattgtaggatgtttagtgacaccctggcctttatcccctggatgccagaagtcatgacaataaaaaaaaaaaactctcttcagacattatcaaaggtcccctgaggaataaaattgccccggcagagaatcactgatgtttatacctgtctgtttataactgtttatggctttatctgcatctgtgcattagcacattagtttttggcacctgaacatgattatggtttaagagcattatattttatactttagaaatcaaagaatggaagatagtataggaagtcattgatgttttggtggaattcacactaactcataattaaagggatttattgaaattagagagcacatgtttttactattggttagtgaaagtttggttactgaactaagggagttttgtaattcgttaaaaggttttcatttaaaaatactgaggaacattttatttaatttgttgttccttttttacatttgaagtttcatatggttgtgcaagaagtgatgcccaggagacttactcggggtgtccagtgtaaatatgtcatgtcattagaggcctgaaagtttgttttcagcagaaagtctctaaggtccttcattggattgcagcaagaactacgaagtctggcagtacaaggaaaataactcagattttatcttacatgactttttatttctattttgttttaaggcttgacagtactttggcaaccataataacagtggttcacctgaatttgatgtgggctgcatcatgtgcacagaaaaataaatggcttagtaacaagtgtctttaaccacattgaagctgccaagtgcaagcctccctggggttgatcctgaggccattgcattatcaattgagaacctatcgtgtgcctggccctggtgttgcaatggccaatgaggcattgcctctgcccccaaggactgtagcagggagacagacactgaaatgggatcattttaacacagtttagagcaatgcacaggttgccttggagcttaaaggaggagaatccagtccagctaggggaggggaaggtggtgccaaggaagccttttccaaagagttgttttctgagcatccttgaagatgatacccactgtgtgcatcagtagaactgcttattatgaacgaattcacactaaagtgcccatggcagatgagagctaagttgttattcctcccagcgatattgggatttataacaggtcacaaccctttctaaacccaagagaggatactgctagtaatagaagcttgcatgtcatatctttccatggagaaggggtcttttcaattctagcaacatcagagaaagtaaccaccttttccatctggactaatggattctctcagctgtcacttcagtgattctcacaaaaaccataacagactaagcacatctcttttgtaagttgctgtcattttataagagatgcccagtagtttgccaaatacaagagaagacacgcagaatagacattattcttaccttctgaaaattatgcctcaaattttatcttcagctgtcatggtctgatcttccttctcctttgtgcttagtttcttctctacctgcaaacattcgcaagtctccttttattcataagcatattcaagctaagcctcccctaagcacagtgtatacttgcaggctcctatatcagccttgtctctgtccttcctgcctagaatgcatacatcttcatttcttggtatgcaaggctcactttgatgacattaggtaggcctttgcccaagtagttttatctaccaaagtgcttttgtcttacaggtgagatcctacacatccttcaagaccccactccagtggctcctcttgtttgaaaacttatgctgactttcaagggggagtacttcaaatacctcctccacgtagtacctgtcatgaggagtcatatatgtcttttctattagagctgttcttgggtagaaactgggtcttattcacatttttagcctaatatttaccattgtatcttttatattgtaggcacttaataaatgttatacagaatgtttcaatgacccattcattttccccagatcattgaacttctgtcttcccaggcttctcacttccaactctgacatttatcaagtgcctctctgtatgacatcctttcttgggagtttgtgttgtctcccttcttcttgcaaagcccagtcccatatagttctatgctttcctccttagaagtgaggaaacagaagttcagagaggtaacatgaagcaacttacctgatgatacccagcttgtaagtggtagagctgggctatgaatttggatgtttctggctcactcattcacttatgcattcaacagaaacatactgagcagctcctgtgggccagatactcttccaaggaaacagcattgaactagacaaatggactgtctattctagaacggagagaaatagtgaatggacaaataaatccagtacattagtcagtgatgagtgactttgtatctctgatgagatataaaggaagagaatgggcaagagacaaggagggcacatggaggtccttttagctaagctgacctgggaggactccctgaggagtgaacattgagcagaaacctgcgtaaagtagggatagaagggagagtggcccaggcaagaacagcaagtgcaatgagtggcccagagaaagaactgaggaccaggcagtgcagtgtttctggagcttagtgggtggcagctgctctcttaggagggagtttggagaaggagccagcacccagatgatatagggacttgtagcccatggcaaggagtttgaattttactctaagtgtctttgggaagccattggatttctctaaatagtaaaattctcttgcactgtcatataagctatagcagtttgtaaaacagatatgcttggtctcttttggtttcttcaaaactcattgaaatgtcacctggccattagtatagatacaaaaggtggctttaagcctggcatggtggcacattcctgtaatccaagtgacttgggagacttaagtgggaggatcatttgagcctaggagtttgaggccacagtgagctatggtagcaccattgcactccatcctgggcaacagagcaagactctgtctcttaaaaaaattaaacatttctgaaaaagaaaaggtgacgttataatacttacccatttaatcctcaaaacccctgtgatgtggcaaatactgttcttatccctgttttattgatgggaaaattgaaacacatggagagtaaacagcttgtacacaatgacccctagcaagcttgtacacaatgacccctagcaagtagttcagctggaagctgaacttgttcttaaggcaagtaagacagcttgcctgccatcccacaactagtttggtgctaggattggaattcaaagttagtctgactcctgtaaagcgctttctgaattttgttctccctactgttgcctctgcccggtctagacactttcaacctcctgccagccttgaagtgttcttcactggtctccttggcaccagcctttcttaatactactcttgtgcatctcacactattgataagttcgggtgtgggctttacatctctctctctctgcctccttcctctaacaaaatcctttgtggacactcttatttaatatatttcaaaatatttaggttagccttcaaggcccaccagagcctggctttctaccatctcctccagctttcttccttttcttctgtagccaaattgctctctgctttgttctttgaacacagcctgtgtacaagtaggtctgaagcttcactcactccctcctttttgcctgggactctccctctgtctgccttctttcttggttaaagacttgttcctaactattgggtactatactcagtacctagatgatgggatcattcatatcccaaacctcagcatcatgcaatatacccatgtaacaaacatgtacatctactccctgaatctaaaataaaaggtgaaattatatattgaaaaaagacttgttcctctgaaaggccattcctttttgactcctcctcctagatttgcaagccacttgtcactgagttggcccttagcttgatatatttttttgtctcatcacccaaactgagttttcaccccttaaaatcaacagtcatatcttctacttctctgcatctgcagagaagtagataatatattccactaaatatatcctattaagtagcatttaatagggactcagttaagtgttggtaaggctttcaggcagaagggagggagacaaactggaattaacacaaaagatgtagtcacttcacaacatatgtgttaccattggatttttttgtgggtgtgtattcgaagagaaccagagatcagaggccttctcttcctgttctccgaatattggtgatgattggttgcttggccaatctcaaagatggccccatttttgctaaaaaaaaaagcaagaaaaaacttcccaaaacaaaacaaaaaagcccccttaattctggaaccttagtatccacttctacttatatttgttttcctgatattaaacaagtgcagttgggtttgagagggtgtttttcttttttgccacttttaactagtccagatggttatgcgattcacagactcaaatgtgtccagatcatgaaaatcccaaggcctccgtgtttgagcagagtccatatgtttaggcattgttgttacttgtgtgggtccacagaacttgttgaagaatccaacaatggaacttgtgttcctgcttgatccaagtttggatgttcccatcctttctcctggtgatatgggtagaaggggctggatggtcacttcacaaatggttgcatgtccctatcatccaggaaagtgagaggagattgtaaatatgcgtgccaagccttcattgctatcaacaaaacagcctgtgctctatcagcatttctgtgagatgtgtagaaatgtttattttaaaaaaaggaatttccatattagtctaaaatgaactaggctagtcgttctcaaatattagagtgctttggagttccttcaaagctggttaaaaatacatgtattagggtcccaccgcctagagattctgctacagtaaatccagagtggggagcgggtaatgcgcatttttaacagccatctggttgttctgcagtccttagcacaacacttggagaaaccctgacctataatataaagcagtttttttagaagaggaaattttaaattagaaaaaaaaattagctgtcaaatctaacacttgaatccttgcccccattgactttatgctgttggttctctcttctctcagcattttgcctgcaggctagaatctgtgttgttcattgcagtttgtgctcagccacggaaggcacctatccctagcacccaacccccatccacctagggctctataaaaaggttagtgcattttctagaataaagcctttttctaggtagatagttctggggttcaaaatgggactttattataacacagaagccttaatgttaccatatttttcccatagatgtagtttggggagtgactagtggtgttggctgctggacatcttattttcacttggatttcaagttctgtgtctggatgggcttggacagcagttctgagtatcattattttgcacccagaaattcatttgtgcctattgaacacctactatttaccaaacactcttcttcttactgggacatcagtgtaaaaggcagacaaaacattcttatctttattgaatttatattctagtgggaggagaaaggcagtaatgatattgttggatgttgaaaactattcatggaaaaagtagacttggggaagagggatagagagtgttggaggtggaggagggtagtcagagagaaggtgacatctgagaaaagactccaaaggcagggagtgaacgaaccctgggaacatttacagggacaatagtccagacagaagaaacagccagtgcaaaggccctggggtgggaacatgtctggggtggtgaaggaacaataggaagccagtaggctagaggagtgtgagaaaggggaaggacgatggccaaaaggtaagaagaaatggggcaattgtaaggattgggcatctcccttgaatgaatcggaagccattggagagttttgagcagaagagtgacatggtctgagttagatttactgcctccctcccttccttccctccttccttagttcttttcttccttccctccgtctcttactttctctttcttttcctctgtccctctctccctcccttctttcttcctttccttcattttctttctttcctctttcttctttttttttttgagacagggtctcactttgtcaccctggctagagtgcagtggcagagtcatagcttattgcagcctcaaactcctgggctcaagcaatcctcccatctcagcctcctgtgtagctgaaactacaggcatgtgccaacatgcctataattttttttttagtagagatggggtctcactatgttgcccaggctaaacttagattttcgaaaggcctctttgtctctgtgttgaggatagtctgttgggaagtatggtagaaccagagggacttgctgggaaggtagttgcagaggtccaggaggaaatggatggcttcggcctgggtggatcccaaaaggcaggcacacatggtccattttgggtacagttggaaagataagccaacagaatctcctgatgattggatgaaggaagggagacagagagagaggatttaagaatgatatttggccggagtcaccaaaagtgagtcatttccccatcaaagactgtgggtggagcaggctttgaggagaagatgaggaattcagttttggacataggtctaagatgtttactgacatccaattggaagggctgtagaccgttggatgtacgagtgtggtgctcaggggatcctcatctaggagttttagcatgtggacgtgtgtgtgtgtgattatatgtatgtgcgtgtaaatctatataattgtatgtacataattagcagaattgtgtgcatatatgcttgtgtgtatacataactatatatgattatatatagattcctatattatacctcatagcctgttgtttgcaatgttttgtttctaaagtattgttgaacctccaacctttggtgtagatggtctttagtcacaaagtcatgctttgccttctaatgtggtgctccagacccatccacgataatcatcagtattcatcatcatccgccatattggcttgttttcactcctttgggctttgtgtcttgaaacagattactaatgctgaaaatggttgaaccttgatgatctctcctaagttctcttccagggggtagttaaccgagccttcacgtgcgtgtggactttgcagtccggcctctgccagcatgtgaccgtgcgtggcacacttgatccatcatggcacagttcatttgtgtaagtgacttgacagatgtccatagtgaggcatcaagttggatggtgtctgctaataaatctaatgggggaaaaagaaaagagaattcgaaggattatcttttttttttttaggattaagtttgtgccatttagctgtttgagaccctgtagttaatgctgctttattagaagcctatacaattcttcacatgggtgtcaaaataatttcagtgaaaatgatgttgtgtggacgcatcaagctgaagtattcgtcttgtgattacagatgggtttttgtctgggctgttccactttcttccggccgctttgctggactagctagacttaacaatccacattaatttactttggcacttcacatggtcaaataggccacagacacgatggtccttaataaatttctaaaaaatcctgcggtgctcctttttaattgacatccttcacaaattgtatttgcccaagctataattactcatcaagcagcaaaagcaaatctacctccaagtacaatgaggatgttctttttgaaattattaagatacagaagttcaatgcagagtaatttagttctgctttataatgatatctttggggactctatctttggggatcacatctattagagcctatcagcatggaaaaggacctattaccaccagtgtgcctcataaatgccaaatacccctgattcccagtgaccatttatgtgtctttaaaacagttggaattgcctgatttctttaataatgtttgtatatgacctttagaacaattaactactttacctgatattcatttagtttatttggaatattttgtcttgactcttgaaattgcatagaaggccccatatatggttgagtaggggatctttgaggggacatcagtggagggttataatctagaaagtttagaaatagaccaagttaaggtgacttagaatgaataattaaaaattcttatttagttgattcatattaataaaacaaatacattttaccatggtgtaaaattaggatattagctttcctaagaaagattcagggaaaataaaataatattgtcaataaagggcttagaacaagccttcccaaactgtgatttcacagggtattgcaggggaaacagaagcaagtgatccacagcatgttgtttgtttgtttcctgtctccccctttaagaaaaatgtaagcttcatccaagtagaaaattcgtcatcttttccataatattgcctccagtgcctagcacagccccttgtacataataggcacataaatatttgttggatgaaggaactgtgggccttctcagagcctttaactttatagcgagcatcgtgactcatcaaagggaagtcagcctttcccaaccttactggaccatggaaccatttcttgaggagcattttactagacttgagtacctctgggaaattctaactttgagtaaaatagataaaaaagtaaaactgaattgatcactgagtgaaatactcaagcttttgcagataccggaatgtaaatgatagagatcatgaggtagggaggaggctagacttccgtggttgaatctataaccttcggcaagttacttgagccctagaagcctcagtctactgatccataaaatagggatgataattatcttactgggtgttgggaaaatagattatgattagtcccagtttggaaaactaaatgaaataaagtatgtagagggtgtcactgggctaaatacttattcctatcatcttttaaaaagtaagtgaaaatgactccagttaggatgggcgattaggaggcattgaagtttatgtgtgatcaacctttctccctctctcccttcaacaaatactagagtgcttataatattccagacattgttagttctgggagagatgtcagtgaacacagttaaggccccttccccatggacctatggggttttgtactataatgtgtttactgatgtcactgcctcttagaacataaagtaaatttaattgtacacaattcacttaaagttaattgttctgaggtcattatattagagacctgccccaaaggagcactttttctctcagaatcagatctgttcttacaccaaatgactaaagcaggattcataggtcacattttaaaataaaacaaataagatcaagctagcattactaggtaaggtaatcaaatgaaaataccaccctttcattctgattagtttaaccaccatggtagggtagccagatttaccaaataaaaatacacagcacccagttaaatttgaatctcagataaataaagaatagttcttttattataagtataccccaaatagtgcatgggatatacttatactaaagcaaatttgctgtttattcaataaatttaactgggtgtcctgtatattatctaactaccttgccacactgaactagggtcccaggtacctatgcaggagaaagacaattgcctgcaacaagtcaatatttaaagccccctttgtagaggggctgttttacccaatacagaatagaaacctttagttctatttgaagtgatttataactgttcccgcctgatcagcaagtgtttccaaattaaaagccattaattaaggccttctatagatacaaaagatatgcaaggagtgctttgtaatgctagctcagtacttcaggtaagagcgtttcaaattacctggaccactggagccacctgcttgactaaacgctgcgtggcctgctctgctcatcagtgtgcactgcggtgccagtgttgttactgatttttctcatttctccagggcaaatactaattaatggatacaattcacagctgattagctgtagtttcttcagtaattacattcgcatactaactgttcagaagaggatttctaacccagttcttatttcactctaagcttaatttgttttttgaattgtttaggcctttagtttaatagccattttatttttctttgttgttttaggtgctattagataataagtaagtttaatcttaaaaaaaatactctgtgataatgagctgtttgctttaaatggatttctaattccccaacaaaacctacatttaaataacgttgaggttgtgatatatgttgttaggcggtttggggggccaggactggtgcacggaatactcatctcgagcccaggttctcataaatatccaaaaggaacatttgcatggagacctgagattttaactctagcatcattcattcatcaaaaatttcatgatagaaaataaaatacttaaaatactttttcttgcatgtatttaacattgtagaaaaacaagggaaaatatgtgtgtgagtgtgtgtgtgcccatgtgcagccatgcacatgtttctgatatcacatgccttcagagaaaccagataaaggtctttcttaagcgccaattcatctttcagaaatccttataaagatatttacctaaatgaagctgagtgctcagtgagagcttgtcggatgactcattgtatgtgcatttcggtgtgttggctgttgtgggatactctggaaccattagagtcttttgtataaatcctgcttagttcttggatccctgacatgataaagtgtagcatgtcaatcctgcttctgggtgtaagtccttcagagtcagagattgagagccccccagaaataagtgttagtttattgaggaagaggattatatgagtcttccatatctatgtatctctctccatattctatttattctcaatatttatctgtgtatttatctatgtacctacccatttatctccatccatccatctctcactctccttgggaaaattctatctttaaataattactagctttatttatattagagaatagatatacacatttcaccctttggagatcaaacctatgttttatttgatgcattcaaggaaggaaataatacactttataaaaaggacattcttttaccagttaaaaatcatgaaaataatatagctctagattattatactcacagagcctttccatattaccagactgataatggaatgtttaaagcaacaaaatgtgccgatttagaccatttgaacctgaaaatacatttctgccaaaatccaagttttacgttttgataacaggtccctagaggtaaagagcttaagtctgaaatgctgatacggtcttatttgtgatgatatgaatggcccattgtgttagcgaatgaaataaaaattgatgtgttcatgagatcccgcttatttttaaacctctttgcacttaatgttacattgagagattaaatatcactgttttcagcaactctgatggatatagatatcgctttaagctctgtttggagattttaaaaatattctttagtcttacaatttatattcatgccacaccccattcactagaaaatagaatttgagtcctgggaattgaattttattccctttaattcatattttaacctacccacacttgtgacatctgttcttgaaaactaagctataaaatccttacatgcttttaaaatgtgtcaaggtgattttcttggaaactcttttccctctcacctctcacaaatgccaggtcaataagcaacacacactggtgaccagttggcttaatgtttgtaatcctttcccttcacagttagtcttgatgagaaacaaaactattttatagaattattgagttagcttaactctgtgctttattttctgagggaaccagctgacagtatagccttgaaacctttgtcatgttttgcatttgggctgataaaactctcttttatttagcaacaccagcattctttccaaatcacagccagaatgctttattatgccgcatattaacgtaaaacaatctgttttctttcagtttggaaataataataactatatgaatatggctgaggcgaacaatgcgttcttcgctgccagtgaggtaggtgactgtcttaatgtgtttgttcctgttttttgtgttattgagataatttaataggcttgaagggaaaaacaaagtatcaaatttatctctctcttatgtggcacaaggtaactactttggaggagaaaagagaaaagcttattggaaaagaaaacctgataagtcttttatcacttgtctgtagactgttactaatgttagtaacttcatacgaatcttttgattaaaaaataatgcaaacaaaaagtaaatatataagaatgtatgttaaaacacacacacacacatatacagtgttggtatctaagcagataagtggttatttttttagataccaggctagaagtgacttttaatggaaaatagtttaacttcacatatatctagggataattaagtgtcattaagttgtcatggtttgggaaactatgtgacagaagagtattatagtttcctggggcttggggtgatgtgaaatgagtgttgtaatttgttgctagatccccacagcccagtacagtgcctggcagtagtaggtgctcaataaatatttatagaatgaatgaatgagtggctggcatgctccaagacttggtcacagctggggaaactgggtgatggaatcaaaatgcagcacctcattgtctctgggtctgtcttcagtttacgggtgcagatgaaacaagcatcatcttcttgctgctctttttactgcatttcctattattgattttgggctgctgtttggtctcattggcctgccctccagaaaaacctcaatcttgattagataaaacatggtttcctaaaaatggtagactgtgtgagatttaagattttagaacaagaacaaacagaagtgaaattggcccaaatggaacatttcctcttgtggttcatgtaatataaagtcctcattttccagatacattcaaatacaggaaactgaactagcttgaccccagagaatgaaaataataatggcttcataaatgatcttggtaaagggaggcaagtgttatgaaagaaattaactttgagaaattattagaataaacgggggatcaagaattaaagctattcctagattaatcatttttatagtgaccatcatctctctaaccaagaagacagtttagataagggaatattgtttggcactggctgctgtgttgtttgtggtaatgaacacaaaccccatctgtaaggacgacatgatgtttcattctgtaggatttttttttccctacatttgaatcaaacattgatgaaagctctactgccagcagctgttcagagacaatttaattccagctgtgataattcaccgtgtcagacattggctgttatatgttgatacaacagttctccagatttgcatttttatcaaaaggaacaaatgttttgaacatttcagtacagatggtatttaaccatgtacatactactttaacatgttcaaggtaaacattgaaaagtcaatatctgtaaaaaaataatcacgtaaactctaaatgattaatctgatattggtcagatggcacagttaccaaagtcagtgtgtctttttgttgtttttgttgttgttgatgccatatgtggttatttttttataatctcagatatccagcattttggattcctttttttctctaaggaaagcttaattttaatatattacctgcctttaaaggtagtttaacattttaacattttcttggttatttcagtggattattatattaggttaggatattgtaatatgcttaattgaaattaatttgtcgttaaaaaaattataccatagggacatattgcatatgacatctctctctgttcctgaacaaaaataaaaaccttcctaattatgactgcttagcatagacatgttttatgttagttttggaagtaatcttatgtaatgatttctctgtacatcttttcttgaacaaaaaataaagcccaagtaaatgttaatgctacattatagcacgtgcctaatttcccagtcactgcattaaaagtaaatttacttggttttttaacattttaatgagtgtaaactaattcaggaagtctttaggtttgcatgctgtaaagtctaaattgtgcctgaaaccaattcccttcacatggatattgtcctgtagataacactacaggaactaggatactctgagtttgaaattcacacatttgctttatgttttctatctgtgtcatgattaccctgaccatttttaaagtactttaaatatttattgaaataatatttcaagtgttaattacagtggtaatgaaaacagccaaatgccacatatcaagaatgagtgtttatccgtattgttaatgtgatatgttagatttcattaagcagtaatggggtagcaaatgagtcacaaattacagttgcatctgttactagaccatattagtgccaaaataacggcaaatgcaaccatagggttatgctcattagccaaccacgtttgtggccaattcatccctttgtgtttgggaactaggggttccacagttagaaactgacagcttttggggtcattattagaatgcatgtgtcagaaaatccaatattttagtctagcattcaaatgtattattctgctacgatgttttgaatatattgagcctgctaagaacctcaagatgttcagttgtcccaccatagactgccatagctcgtgacctctttttttctggtgagatacaaataacatttgacaggttctatatgtaagaaatgttttttgttgcttttttttcttgagtttttcttttccctcaagtggtcattacattatatcatgattgatagcttgaagaatgatgattttcagcacttaattagtcctcttaactgataatagcagactcaaattatcttgcaccagttcattctttcaaatactattaatagtaaatgaactataagtttgactctctgagctaggaataaaaaatatgagtagccccccaaaccctccacctgaccaaaaaaaaaaaaaaaaaaaccaaaaagaaacaaaaaaaaacctagaccttgccactcccccagaacctctcgccaaaaaaatccccccaaaaatggttagtgtggttgggtggagcaacactgatttatatcacgaggccctattttaaaacactgcctttaagaatctcagtattggctgggcacggtggctcactcctgtaatcccagcactttgggaggccgaggtgggtggatcacaaggtcaggagatcgagaccatcctgcctaacacggtgaaaccccgtctctactaaaaaattcaagaattagccgtgtatggtggcgggcgcctgtagtcccagctactcgagaggctgaggcaggagaatggcgtgaatccgggaggcggagcttgcagtgagccgagatggcaccactgccctccagcctgggagacagagcgagactctgtctcaaaaaaaaaaaaaaaaaaaaaaaaaaagaatgcattaagacttacttaggtcttgagatataatacttctctaagtaagcgaacagcatcaaatctagttagtatttctatatcaatatagctctatgctctctagatcatctttaaaaagtcgaagactggtagaaaatgttcagataaatacatattaaaatgttcatgtaaaagaaaataaccctctttgtagtttaaataaaagcgctggcatcttttaatatgaactatgataatccttatataaaacattgtattacacacagtaacaatttccatagaagtagtcattgcacttgggaatataccaatgaggaaattaaaaaagcaaaccacaaatttaatattacttgttttatatgttgtggcagaaagtaaatatatgtaatgttcacttctggattaatatgtgtgtgtgtgtgtgcatgccacaaaatcatcagcattttataaagcatgtggatagtgtcagcggtttgagctgtttcactaacatatcaataaagtagcaatttgttatatgctccaactaacaacaaagacagatgttgctaattaagtaggcattaaaaaactgttaatactgatactccattaaaaccatatgataatgagacttaaatctttaatcagaatgatcagcaaaactttatatatggaaatctgtgtttaagatattttcatttgagaaataaatatttggcctagatatgtatgtagtgttttcatgcaatgtctttctctttccctccccggaggaataagatataggaacagaatatgaagatacctgtattttgtttccttttagcagacattccacacaccaagccttggggacgaggaattcgaaattccaccaatcacgcctcctccagagtcagaccctgccctaggcatgccggatgtactgctaccctttcaagccctcagcgatccattgccttcccagggaagtgaattcacaccccagtttccccctcaaagcctggacctcccttccattacaatctcaagaaatctcgtggaacaagatggcgtgcttcatagcagtgggttgcatatggtaggcaccacatttattacttaaattattttttatcatttgcacaaatcatagtaaagatctgagagtccatgttctgaaacgtgctcttgcctgttcctagtggattgattctagtgctatttacatgcaggtactggatcgctgcctggtattgaacaaaggggtattgggttggttgacagtaaccaaaaagaggatgatccaaaaagagtctgctgatttaaaatgatttttttttaaagtctaattcattaatttggaagtagccaatcttcccttgctgttggcttaacacaaaggtgtgcttgagttgaaagtttgcccaggcaagattttagaaatggaagtccttatcaggtgcctaagtcttttgagtttttagtattataatgcttacgatacacgatttattcttattgcaaatgaaataccaaactgagataccaaaaaagggaaaaagtataattgcttataaccagcagagaaaaatatagaacaagtgattatgtgaaatacacctaattgcgttatttattgtcataaacatcgattaaggcactccagagagccaagataactaatgcaataattttggttctatttttcttagtgtgcaattatagtcagcaatcactagagtaaatctgcttaagtattttaaactcttctgctgggatttttcttttttttccatcatagcatataatgcatttgtgtctagctaggtgaggtactaagtagacatttttaaaacaagattaatagtttatagagcttttttttaaaaaaccctgataaaatgaaacagatgtgttggtataacaaaaaacaaatcctcttgcttgtttacatatttctctgcacattaggaccatgccagtgatgtttattggcttcattgttaattccccagataacaacatatgattgcaaaatatgtagtggattagtggtgcaaagattcaaagtgctctctgaaatataagattgctttcccaaataggattgcagcaacataattttctttgcttgtgatcttttgtgtttgagctgaacatcagggtttttattttttacttttttttttttggtcagaaaagaattcagtgaacagtcgggaaatagtcattaagtattcataaacgttactagacatcacaaataattgtttcctggggactttcttatatttttgtacctttgacactggaatggagggttctattctctgtttctctacagccaggcttgcaatgttttgcttagaaaagaataaaaataaaatgggtgtgtttagtcaccaagggagtttgccagggttcaccatcattcatagatgctcagagaggctcatttaagttgcagaaatagttaaatgtgtgttaaaatgtgtactttcttaaattggtaaatatttattaataatataagaatctgcctttaaattaaacatctgatgaattaccttgccttaaagctataaaactgttattgctgccataaaaaagtgtaaaggaggcattttgactatgaaatttcatttcatggtcaattgaatttactatattggaaagaactaaagatggaatcataaaataattatgatattcacatacacttaaagaacaatgctttcacggactggcgttgggaaagaggactcaatttttaatgcttcttttgtaatgtatggctaatcactaaagcagttgaattatttcattgatttttaaaagtataggtactttagctaagtgcaggctgttgtcatggtatttacatggacctcatcacatttattggtgcctttttgaagttttgctgaacctgagtgatatttattttggcttgaaacaaactaatcttgttgaaaattctagtagaatttcaccttgaagaaatgtcatgggattttaaatcacaaatgttggaaaaaaataaaatgtactaggacagaattatgatgaatacaatgtgttgttggctttgttctatgtactacctgacatgttcacctataaacttgaattcagaatcgccagaggcatggttaaaaattggttatgtcagggttcttctatatctctctgcgggtactgagttggctggctacatcataacactccacagaagcctcctcagagatttcccttaggaaagtcaccagaaaaataataaataatactttatacgtcatgcattcagcttcccagtgtgtgttggatatttcataccttatgcaagtaagaagttttattatccaaatgaatatggctgtctgttaaggattgctatggtgaattaagactatcatataagaagaaaagccagcttgttgatgttgtattgaaccagcttttcttcagagcttcatcggttttcctttagaaagagtgacagtttgtcacattactgattagctgcattattgttggcaacaagcacaacatgtttatcttcgttaaatttatgccattatatttaaaaacagaaggcaggaacaaaaaagggggattaaaaagagtccagtgattagcattcacatttcaaaatatgcaaataatgccccagtattcaaaagcgaattgctgaaaaattgaatgtcgatgcatttgtgacttcaaagaacaaccttgatttgcttgtcgtgaatacgtgtattttaaaacaggatgtggttggcaagtcaaaatcaacagtatattttggttaaaaatttgttacctctaagtgttattgtcagttcagatgatcagaggaaattgttttaatccacaaaagattgcaattctaaaaatctacaatgtgagttccaaagggttgtgtgtgtttttttttaacacctctctataatctgcccagcctgctgagtagcactgacatcagtagtacatcaatttcagaaagtggattatttttactagacagctattgtgacatattgggtcagtcataaatgaaagatattcatgcaagcatgcaatacttgtaatgaagtctcactctgaccttctgtatgattgattctgtaatttagttttctcaggcagtgcctgaaatgaaatgaaatcatgttgaacaagttttgaatacccacagtgcaccaggagaagaaaaatctgcagccctagaggcttgagagagagcagatgaacgatttatctctatgctattatagcctttgccagcattcaacatttcttttttttttcttatttggcttaagtacttaattctgcaggtagctgtaaatgggaaaataaaatgctgttcagatttaaaatgacaggacaggagtatgtgcaggggactgataaaatatcttgaatagaactgacctttcatgtagctgaaagttactgggggattcatcctcataattaccatatagattatttttatttctttcctgcaatgaaacatttcagagagcagtagtgctgattgaatgaaaattgaacttgttaacattcttttcagcttagcctgttgtacataacagaaggttagctttgatgaatttcaaaattctctttgatatctaagaaacagacagtaaaataattgtctctggtctgatattttgtatgccccccaaaagagaatttataaaacacactgataattcacatacttttcttcatatattatatttccatgtttagaggactgacattttctgtttgatattaccttggatttaattgtgatcacacatatttatagaaaatgctatagtggtgctctagcaatatcaaacggagtattagaaaattgaaaaagatggaagtaaggaaagtatttgagtatggtagtattcgtacctgttaaagggaagagaaaaagagaagaaaaggtcctataggagacatttatgcagagaagaaaattatgagcttttaaaatattcataagactcttaagtcataatccagacagatatcatttttgatagaaaaatggcaatttatcaaaatattacatctaaaattaccaggcttattttagaagttttttttattattatacttggcatggctctaattttgaagttgaattattatatttatttttaagaaaatgactttcatgccatttttatacttaaaaaaatcttacgttaagagaaatagcagactttcaattaatatgttgtttttagcaacgttgcttaatgtgttacagataaagccgttatttcatgggtcattaatgtgtttaatgcatggaacattctattaaaacaagcctttattattgttatgaacgcattcattgccattgtcaatagaggctggggagctaaagttcacaggatgatgactatttagccatggggggacaagcaatttctcatacaaattgaatgcttacaaatttatcatacatattgaataattttggtcaagttacggtcaaaaactattttattataaattaacaatgtaaaggtcacaacttacctaggcaaaaatacacattgaatggaataagacctatctgcatgaactctaaattataaaactgaagccatatattaaccttcaatgaatatttactgagcacctactaagtgctgtatattgtttgttgttattttttttaattttacatattttttagagagaggatcttactctgtcactcaggctgaggtacagtggtatgatcatagctcattgcagtctcgaactcccgtgttcaagcgatcctcagcttctcgagtatcttggactacaggtgtgtgccaccatgtccagctagtttttaaaattattatagagacagggccttgctctcagttgcccaggctggtcttgaattcctggcttccagctgttctcctgtcttggcctcccaaagtgctgtgattagaggcatgagccactgcacctggcctgtttttaatcattagagattgattatactgtttgtgaaattgttttgtgtttctttctttttttttgactaccagtgtcccctcaatgaattacagagattcaatctgactgctgcctgaaagaagcttattgtcaaaaaccaactttaatttagctgttactataccttgataattgtctgccaaaaatacccaggccacagacacttttacaagctgccttctttgtagagccttgtaccacactgagcttaaaataaatattctttattcttggcctgtgcatactactgactctgaacagataggaattgtctttagggctgagttaacctgagggtcatctgtcaaagtaggactgtgttccaaacttctactaaacctaattagaccttgtgcagtgtgatacatgattattgtttagtttataacatttaaaggaaaatgttatgagaaggctggctgtggtttatttccctgtatcttctttttaacatagatcatctacagttaagtattgtagtacttagtgatggttcagagacagcaaagacacccttttacagcacttagattcccacataagactgacatgatggctcaaatattttttggagaggtgagagttactctgtatgccattacccctgttccttttattcacagcccttgtcgtcctttgcaatggtttcctttgcttgcttcccatctgtctcctccctaccagaatagaagctccaggaaggcaagtgctccttgggtctgtttggtgtcgtccctgggcctggaatatacttggctttcaataaatatttcatttgttcaatatataaattaataaaaggacaatgaaagaacatttacttgttattaagagcatacttagactgctaagttaaaatggaggggagggggcttgaagtatcaacagctataaaaagtggaattgctctttaaaattttaatttaggactgaataaaataagtgtggagttgtccctttggtaaaacaaaggcagttgcagggtacatgagtaaactaccattaagtgttcataataaactcttgaaaattttattttgccaagaaactattaattaactttagggaacactgttttttacaaaactttcatgggtaggtatgtctgattacaaccctgagagtagttattaagtaaaaatgatctatttcagtgcagatattttgatgagtataaaggtggtggtatgcaggtctgtaattatcattggtatgcatttggcattactgtgtcagggtccattggagttacaaaagtagtagctatgcataactatttgatcgttgttaatttggaaataaaattttaacattgctataagacataactaaataattgaagataaaattactggcctgcatttcctatttgcagttaactctgatatttatgaatacaaagtaatttttattgctgataattgtttaattacttcatttctcaagaaatattgattaaaaactggcacagtgaaaatatatttagtcacactctaatatatttgggttagttgcttcttaattggatgttatgctctattttgaaaacctaatattggatcgttatggagaatatttctgtgtaagtatagatagaagatgcattaaacacatttgcatattagaatttaaaaaaattttaatgatgaaatcaacccaagtgtaagtgccattgtaataagtataaacacataatatagaataataatgtgtaatatttacaataaaatgtcagggtgaaagcttatatcttagatttgcaaaaagaaacaaaacaaagcaagaccgtagtatgtatagctatggactactaattgtgcagcacaaagataaatgtagcactgctccaggtttgaaaaaatgagtgaaaaggatttaaatatgtagagttttctcatttaaggaaattagagcaagttttatccattctcttctcatatcctgctaccctaagacatatcttcatatgaagtacaaacatgatattataacatagtgacttacacagtaaggaagtttttcacctttcaattctcttttaatcttgattaagtccaggagaaagactcagtttggggctaattaagtctttcacacctttcttttgccttcttaagttaaagaaagcagaactcaggcccagagccttaggcaggccccagtatccacactgactataacagtattgttttcttttcctggtgtttatttggcattctattggccatgagtgattttaatttttcatttatgttagtgatctaaagtttccttattaatataacattattcagattttaaccgttcactcaaatgattaatgttcaataatagactgggtttcaggcaatttaagaaaatgagggattgctacccaaaatatccattcattggatttttcctgtttaaaaaagacaaagaggctctttcatcaggtggagagagaggcgagcctccgccaggcactcccctacccccaccaaggcatacagaaaccagaaggctttgttgaacaccacaggcatgaatcatataggccaatagatagaaggcaatgcccctcctattagtgagagcattttatgagatccatggcccacccactctgagtgaccttctgtgactgcaaatgttaatctttgggtattcttcgaaacacagattgaggtggcaggctatacatttatatttaaactaaatagaaatgtccgcaattgatttagatgggttggttgtccatgaggtatggtcagttaatatttattgcaatgaatagtcccaccagatatataccatgctttaaactttcaatggcagccttctacactgtgaatataatccagacttcctaacccagacaataaaccttgtcactttatggccatgacttgccgttccagcctcatagccagctatgctcttcctggcccagtcacactggactgtcatttccttatcggcagtatgtttgcccatgccccaggtttgggtacatgttcatctctgtctgggatgccctggcttggttagcttctacttccctttatacctcagcatagtaggtcacctcttcggggaagcatcccatgatttccccaccttacacaatgaggccagtctctccaagcctattgcatttcaccctttaccttgcctaccctgcacccagctttcctgtccaccttttcatttctcaagcatgtcaagatctctcccacttcagaccttgcacatgctgttccctctgcatgagacatgcttttcccttcacttcacagttggcttctccccatccttcagcatcagctcaaatactatcttttttgagaggcctttcctattgacccaatcaaatgtagccatccttccccaataactctcttttgtataacctatttattttcttcccaatatttatcacagttggaatcttgtttatgtggatgctttctatttttaggaaaagaatataagctttgaacattcactacctgcctcccccaaggagatgatttttatgatatttgtctaatacagtaatttgcaaatgaaggggattttgacatttgctaatgtctgtatacattttggttgtcacagcccggtagggaaagggcggctactggtatctagtgggtagaggccagagatgctgctaaatattctataatgtacagaatgcccctcccccaacaaaggatcatccagacccaaatgtcagtaccactcaggctgagaaactcttatctaatatcgccaattagaagacaaaacgagacaaggcagagagaatgagtttttcccaaatactgaaaaatttaggaaactatataaaggaacattacatataaaatgtaattgtgaaaggagttgaaaaagctaccagcattcagctcttattgttggttatgatagtgggcaatctcttagaacccaatagctgctttgcctttaaatgatcactggtaaatctttcaggacttaatttttgtaagtaagaagtaatattaacaaaatcacattaaatttctctgggctatattcatagttatacatttccttattgtgtcattactactgggaaaaattgtgagcaattttggtgggagtatataaaaattattctggcctacattatgttgtagtaaatttgttcatccattcaggattttgtttaatgtgtaaaataatcgcatggtaatttcctggttctcaaagatataaggtttgatatattgccttctctggcctgatacatagtaggggctcagtaaatacttttatactgagctgacatcttcctctttttatgtggtagtcctaagatcaagggtaacatcttttaaaggttacttttatggaaaatgattggagctgttgaggatcctcaagttccccaaggcagttgttaataatttgtggccctaaaagagcttgaatttccaaagagacactttagccattaatcgtcttatactataatcttcactcataggaggtgattatgggataactgtgaaccgtggtgagtggtggcacattttgatgcatcaattatgtgggtcagaggttactttaaaaatagtctagaggcccttggtatcttgtccagtgggagatggcatctttttggatctgaagactatgtggatgactctaagttttggcaaggccttggccccaccaccagtactcttcaggagtggtttccatactgtcacactgcaaaataatcttttttttttttgtaatgaaatattatgaggaacctcaatttataaaacaaatggaaatggagttgattttgttaaagggggatgatggcagtggagatcccagagtcttattcatctatctctgccgggacatgcctctaccgtgaagataccatggctctctagggcccaggttttctgtcaagcattcactagctagcttgggggcctggggaatcattcttatctgtctaagaataagtatagtactagtatctaatgcagaaagcaatctaggggattaaattagaaagtgcatattaagcttagcacaaatgctggctcatagtaataaacacacagtaaaactccctttttagtacagtgaaccttggctgtctatcagcaggagctccccagcaacaagatccataataaaggcataaattgcagatggaattcaggaagggctgacaaagccaaggagacatgcttgtgtttggccatgatagccatctgaaaaatgctctaggtgtggggtgagtcaatcgagcacctatatgtgcaaattttcacaggcattggagcaaagagagcaaagtaactctctgctaatgagaaaactgcataaatcagatgatcacatttcatgaccataccagttaactaatttagtattatacagtcagaattaaaatacttcatttaaatgtgccctagaatttgcctgtagatactttaaaacatctagatttaaataagatggaaagatttttaaaaagcattctgggccgggcacggtgcctcatgcctgtaatcccagcactttgggaggccgaggctggcagatcacttgaggtcaggagttcgagacaagcctgaccaacatggtgaaaccccgtctctactaaaaatacaaaaattagctgggtatggtggtgcgtgcctgtaatttcagctactcaggaggctaaggaaggagaatcacttgaacctgggaggtggaggttgcagtgagccgagatggcaccactgcactccagcctgggcaacagagcgagactccatctaaaaaaaaaaaaaagcattctgaaagacatatatgaagacgaaaatttagaataagctagatggcgtaattaccagtagtgtgggggtggaagttatgtcagtgagcagtggttacacttcaagagaacatggaagactgaatagatagctcagattttctaggagaaatgagcaaatgtggtagaattccaataaaaaaagataattaggatgaacagataacataaaatccacacaatctgtagaaagacacctgcaagtagaacgtaatattgtaggaacaacgaaggagaacactgccggtgatataagggagtgtggtgttctgatacttgtgacactttcctccaggatttcacagtaattattcggaaattattaagaaatgggaaatgtatgtatttaatattctaacacttgttggcagactcttttaaccacttgcattatcttccttttttttctgattaaagtgttttagtttttgtttactttttttttccatttcttttttttattattattatactttaagttttagggtacatgtgcacaatgtgcaggtttgttatatatgtatacacatgccatgttggtgtgctgcacccattaactcgtcatttagcattaggtatatctcctaatgctatccctccccattccccccaccccacaacaatagcaaagacttggaaccaacccaaatgtccaacaacaatagactggattaagaaaatgtggcacatatacactatggaatactatgcagccataaaaaatgaagagttcatgtcctttataggtacatggatgaaactggaaaccattgttctcagcaatctatcacaaggacaaaaaaccaaacaccgcatgttctcactcataggtgggaattgaacaatgtttacttttgtattgtggtcacagcttatcaaaacagcatacacatgtacgtagaaaaagttgaaactctcccctccttgcccctcccattctaccccttataatgtaaccattgttaatgttaggatacacttttttttttcccaaagaaaacaaggctgtcctgtatagttattttttaacttgccttttatgtactgtatcttgggtaggttagtggttctcaactgggagtggttttgccccgcctggggcaaagtctggagacatttttcattgtcatgactggtacggggagggacgttgttagcatctagtgggaagaggctggggatgcatctgagtacctacaatatgcaggacaagccccctcaatatgcaggacaagcccttacaataaaaattatctggtccaaaatgtcaagagagctgaaattgagaaactctgccctaggtcaatgcacataaatctaattcattatttttaaaagcttcataacactttgacgtatgggtagaccataatttattcaactagttttctttgatagatcttctcattgagtggcatttatatatttaatatgaagaaaccaaatgctccaatttagttatttacaattcattccgcttctttaaagagcaaaaataagccttatcggaaggactcaaaaaaggaacagttaagaattcataggcttgtgtataaaattagattctgggtcactgtgagtcaagagaatttggtttcagcaaaatcacagactcactccaaatgacatgtcttaaagtaagtcatttgaaaaacatgtcttcattttttgattctttggaattaaaaaaaaatagagaataagcagtaacaactataaggcctttctgtatgactaccaagaacagagaaagctgcatttgaagtaactgcaataagtttcagaaaaagctatttctgatggtttctaccatctttttttacgtatttatgaagaaattcattagtacattaaatcatgatggattgaacaaaagaaaacaaagtaagtttaagtgaaaaaagtgatatccaatccaaaagacattgaatgacttccagatgccgctgacaatgtaattcagaatcggaatgaccgtctggttaaccacagaggatttcacagaaagggtgccctaaagcaaacagatgtttgctctgtgaaactaaagctctatgctttgctggcccatcctctgcgtgccctgtgcatttctgggagaataaaataaagaatggcttcgccttctctcataacagctacatgtttgagaaggatggtaaactaatggatgagcctaaatgggtgcggtctctgcttcagccctttccctgccaccagtttactcaataagaaacaagagatgaaagattatatttagtttttctaatttcctttcttctttttttccttccttccttccttccttccttccttccttccttccttccttccttccttccttccttccttccacatccactgacagttctataatgaaatattctgttctggatatttggattttgtgcttctcaactttcaacttcttggcatgggtccttatatttaataaatgaacggagaccatcatcctgcaataggtcagacctatcaacattgcaacagttcaaacctatctaaggagatgctaacctgataagttcactgatatctggaaaagctgaaatattttccccctttgttgctgcctttctaggatcagagccacacacaagtgtcccagtaccggcaggatccctccctgatcatgcggtccatcgtccacatgaccgatgctgcgcgttctggggtcatgcctcctgcccagctcaccaccatcaaccagtctcagctcagcgcccagttggggttgaatttgggaggtgccagtatgcctcacacatctccttcacctccagcaagcaaatcagccactccctccccttccagctccatcaatgaagaggatgctgatgaagccaacagagtaagttagaactgccttagtgtgtaacctgccagagaatatgggattaccccatgctgtttgaatttcattcatggtgttatcttgtttgtcttcatggatttggagtagcatttaaatgtatgatggtttgttgtttttcttcactctttcatttattttctgtagaaagtatattggactggaaattgagagatctggcttctcctactatagctgtaaggcattggacatgttatttaattcttgtaggcccaatttttctaatctgcaaaaggaaggcttggactccctgctacaaatttccagaaattctagacattccagaaattctaaactgctctggttctaagttaatgtccatgtgagcaagtttcatccagtgtgttggtcaagctgctgccacatttgacagccttgcggcttcggtgatgtttatcgctgagttcattctcttcatcttacatttttgcctttgtcatgggaaatgtataatttgaaatgatacaaagtttgaaataaaaactgtgttccagtatgacttttccaaatgcttagaatgatgaaaaagagtactgtaatagtacataattactcattagtcacttattaattatgtgctgtatacctactctgtgcttggcattttgtttggttcttgtgatacaaagatttataagagaattactgctaatgagattcccctttggggatgaatagcaatgtttaaaactagctccatatgtgattagtgatataattgatgtatctggtgtgctgagattctaatcgattctgcttgggagagtgatttgaggaagactttactgagaaagtgatatttgaattaggtctaagaggatgaataaaagtttgtgaggcagaagacagaggccagcattttggttgggggctagtgaggaacagtggaagtacatgctatttatgggtatagtgaagttcgatatgggggaagagagaaatagaagttgaagaacgaaatggcttaaatgtggtggtctttcttctgttggtagctgagagctgattaattatttgcatcgaggaatggcataagtaatttatgctttagagagacaactttggctatatagagaatgccttataaagggagggaccaaagaaaaggaaattaattagaagactcttttgttatgtttcctttcatcaagggagggaatgaacagaaggtaccagattagcaggcattttaggagtgaaaatcataaagattttaaggatttggtgatccactggaatttgaagaagagacaaattgggttttagtttgagagccagaatggctatcagcaaatgagaggagcaacccacaaagagaggagtgttctcccccatggggaacatgagagtttgggatgttagagttgaatttgacgtgcttacattggagtctagaactcagtcatggggaactggaactatagattttgggaccatcagcacgtggatgagaagatgtgaaagtaatcaggacttctcagagagtattaaggagtaagtcaaggacagaaccctgagcatcatctatttctaagtagcaaaaggaagaagaggagctagagaagattaagagtgatgaggaacagagaagggaggttcaagtgatgctgcagaaattgaaggggtttcaagatgaagggtttattctataacatcatgttagcacccccattgggcccaggaatggtaaatacactgacagtcttctcacagtcacagaacttcagtccagaggattgagaagtaatggttaaagactcttgagggatatgatcagatggggttaggtaacagcttagccattacagttgagagggattcctttccctccaatcacacgtccgctgatcttcatacttgccactgtaccatactgaaattgtcatgtcttaaagaggacctcttatgggactcctagcttgctccattttaagcgagggtctaggttttgtgtaaaggcaatacagccaatgtatcttcattgaatcttagctgagaaaggaagattaaaactatcattgattatgtctctttggggtaaatctttttctccagctttctgtctcaacccttttaagtcaatgacacaaaaatttccttaggagaattaattctgaatttttgtttaaaatgtgagactccacatttcttgtttattcttaaaaaataataatgattagggcacatcatggttatccaagaaaggcgtcaaaggtggtcgacatttgaatattgttttacagagaatgaaattgaactcctcttatttggaaaaaaagctactctggaaagtaatagcaacttgccattggtcagggtattgtggcactaacagtgccagattttcttccaggagaagaatatagttgtttgactcaactagaaaaatatgtgtgtctgtatatagtttttcttgtttaaataatgtttttcattgaaggaaaacttggctccaggtgaagctctaactgaaaggcatctgactctcttggaaattcacattcattaagtagaattaaacaagtgtcacttattttgaaaatttagaaaaaagactatgggctctagagaattattgaatcaattgtgtgagttatgaaagatggcattttggaggagaagtgagatatgacttaaaaccatctgaagcttgtaaactactcagataaagtgtggatgctgttatcacttaaatagtgcaaacagtaggctcacctagaggtaggccagtggtttcttaacactttgagtgttcagagctctctaagaaaagttccttatccgtttcctccctaagaattttagtaaatggtaaaaatttagtgaaagttccaaatgaccctcatttagaaagtaaataatactctaggaaaatttgaattagaattcaagtcattaaaagcctatctgttagtaacttgaatctatcttggttgatcttgcccaaggctggctttgaaaacagattttgtcaaacattgcaggattcttgatgaagttaactgcaaaattatcttcgatattgtaatctaggggaataaaacaaggtttacaaatcatttccctgcttctctgataagtatgttaaatgatcagtgaacttagatggtggtagctggtgagtatggagcttagtcatctttaaattgggaaactatacccatatcagtttgtggttctgatctctcagagttcatatggtcaatgtgtgtgagtctctatggagtattcttgtgagcagggttacttgccataaataacaaacatcttctttttagtcttcttagtgatttttaagtatcaactattgctcttttttttacacgtttttaattttacggagagtatcaatttcccttttatctccacttaaagtagttttgacatttttacatttgctgttaatcttcagaaaattatttttagaaaataaagatgaccttttcctaatgctgcaagtatagaaattggagctaacttccatttgaatttctggagagccattagcaaagtaacattctggtaaaattaaaaaatcagcctcaaaaaaaaaaatcaattcagacagatcacacatatggcatgtgactatggctagggacctcatttaaaatatttgaatatgatcaacatcctgaatattatttaggttttacttctaaaacctctgaagatataaaatattttgctgatgtatgtatgtgtagtatagcatatatatagcattgcctggtacagagtgttctgtttttcattactcataattgctatttcgagcatatgttgtgaacgtattgaagatacttctgggtctcattaatcgatgttctaaatgctaatctctgctgtctagttaactccaagcaagtttacccctcccccgcttttggtggtgattcatctgttgatgatgcctaacaaaaccttcaaagaacaattatggatctgagttaagtcttgttgcattctctgcaagtacattctaggcagtgaattttcttcctgctttgcaggccattggagagaaaagagctgctccagactctggcaagaagcccaagactccaaagaaaaagaaaaagaaagatcccaatgagccacagaagccagtgtcagcatatgccctgtttttcagagacacacaggctgcaattaaaggtcaaaaccccaatgcaacctttggagaggtctcaaaaattgtagcatctatgtgggacagccttggagaagaacaaaagcaggtgagacaaagacccatcaaggctccatcaataaacctcatgatcatttaaaatattcctcacaccttttccaagtgcatgtgttcacttaatatgattgcttcttttgaaatccttttctaagcaatggaatttaaaaacccagacatataaatctaaacaactctccagttatattgatttctctgtcagcttatgggtgcatgttcagaacccattcagaggaaggttggaagaaatccaggcagtatcctgcaagcataaacttttgatgataatcttttcattttaaataatgtggaattttttcccctttgttcaaaaagggcactacaaagggattaggtccatcctgcttgcctttccattgatcatctttctgaacccttgtgctgtcctggtgggtttccaaactttgaagctgcctctgcgtgtctcattattgtcaccgggcatttgaaattttattccaagttcattttaaagcaaggcagtatgagaggtattcagaaattagccatgcttgtgggagatacttccttaggggcttcgtctcctctccttccccttgcaactcctccacacaaatgaagggaagaatgggttccttgggggtcgatcccccccttactccttgcatgaaactccaattaccattaaaagaagttaacttttacatatccacagaagaatagatcaactcctatgagtgataaaatagaataattgttttcaagaatgaagagtggaaagtccttgattttgtttacaaatcatgaacttatttcaggaactcattcctagaagcttgttttgttgggaaggtgcaacattagaaatttctttttagtttgcactgagtttattactgtagatagcagactgattttctgtcccagaaatataattctgagggactggaaaagtgctgcacctaacttttaaactctggagagaaagatgcatgttgactgaacacccagccatcagaccacttaggaaaaggagaagcccaaatcatgtttaatatgctggaattttatttatgtaactcagtggggtcactaatggaaatctcctagcttggatgatttctgacttttaattttgctccaaaagaaaaccaacattgaaatgctttgctcttttctcttctgtcttcatcattttacctgttgtttttatcctcttgtttggtatagtttagaaaggtatctgagggaaagaagacattgatggagaaactcattattttctctaaagtaagccatttgcagcaaagcttattcttcttgctaccttatttattgccttagcatgaggttttcagctgttctcaagaaaaagtgattctcaagtaatctgtattgcatccagaaatctttttcttatttgcaatagtaaatataaaaattgtgctccagtgagggtggcagggttctgttttgttttaatatccgtgtgtgtgtgtgtgtgtgtgtgtgtgtgtgtgtgcatgcgctaacatttaaaaatcaaagccaaggagaccaacctttttatgtgagttgtgtttatgtgacctaatttgtgcagcagctattttatagctgagaatttatacgctaaaggtggtgctaattgtggtcttttaataggtatataaaaggaaaacagaagctgccaaaaaagaatacctgaaggccctggcggcatacagggccagcctcgtttctaaggtaaacctgggcaggggcggccaggctccaaaatagtcacagcgtggaaaacagccctcaagcattgaaaacatacttgtagctcccctaaaagttgatggaaaggcatcttgaacaacttgtaaacttaggcgtttccattagagattacccaagtgatgatctgaaaatatgagttaatttaagcagctgagtctaagttgtttctgaaagatttccctgatctttatatatgtgtatgtagctatatacataaattttaaataggctcttatgctttcttctggtcagggattgggacctgtgctagtgtcctctgtttaaactgggaggtatgtttgtcaggcatttttggacatcatattataaattctcctgtggttatattactacaattggggggcattgcatttttgaccaaactgttccatatcatataaataaataaacctcatgatcatttaaaatgaaattatactccaagtactaaacaaaacctacatgtattatatagagagtatacagtggaccctggtgtgttataaaatatcccaatatcccaagcaaatgtcactctagcaaatgaatccaaaggaatatgagctaatacatgatattaacatttaattagctttttctcttgcctttctagattttagaggttttggaaaggataatttgatctaatatatttttgctctagacaaattttttctgacaagtagggatacaatttcattgtcactgttgctgtctcaagtacaacctagggtctcaaagccatttaaaaagggttcattcctttttttctcttttcacctgagttgcttcttctttatattatctgtattaagtatttgtatcaagatctaccatttgcagctgctcagaatcagatcaacagaggtcctcctctctttgctgacagctattaggacacttcccacttcattagatagataaaacatttatcaggtcaatagcaaaacctctttctcagactctggaagacacatactggaagatatactgatgttgtactcagacttgcacattggcagaaaacagctgactgtgtgggctgcagatgttaagaattaaagtatagttggttaactagatggagtgaagtgaatagagtaacagtgtgcatgtacttcttaagtgaatcatttattcattcatttatccagagcaggtataggtgattttgtgcattaaagcatgaataattgaccgtatatggatttaaaccaagatccggtatctcaaaaggcattcagggaatattaaccatgattgggctcatgaagcctgtgactgacttagaggggataacttaaaacttacacattgcatactagaatcaggattcagaaatacttccaggtagaattcaatgacaccaaaaaagagaaaaaaaatcaataggatagaatttagaaggaataaatttaaaatactagggtttggtttgtttgttttttaattcagtaaatgcactttgagaggatcctaaatctctattcaaagaactgtgaggcaactaatatagtcctttaggtataagtttagaataatttcagcctgaacccaaactgtgaagtagctgctaatatagtgatcgcacaggaagcagcattgaattgtacagtgattattagaccgcttctaaagaattggttctgttttggatcccacagtttaaagagagatgacaatcaattgatgtctctctagagcattgcctccacgatagtgaggactgaaaatcacatcatgttagaataactgaaagaatcagggaggcaaggacttggaggcatatgatcttagtcctcaaatataagggccgttatataagggaaatgaagtcgatctttgtgcccaagagaggagaactcatccaaggggtgagcttacagggagtgagagttcagccccagcatcagaaatatcaatagggttgcatcatatgcacatttaacttatgcctctgcacgcagagcctcagacctccccccttaagatacgactctgctatcacttttaatctttacaataaccaaagaaattcatggaagcttactattaagccataaaggaacaagaaggcaggcaaggaagaactctgtgcaatcatccacccatctccatttaccgttaaggcagcatcttaaaggcacaatagtgcaactgagctgcccaggtgttgaaatacagactttctttgtgtttttttctttaagacagcttgttaatttttaactactagagtatataagaattatgtacatgtttattgtgtgtattcaactttatgggtgatttaatggttttttgaagacaaatttgaatatttataggctgcttcttaccctaagaccttagaacatgacggttcaggaacatgcagccccactgagttttgtaatgtggagagctgcccactgaaggggagtgccttataatgatgacatgtgttcaaacagaaaacatcagagatggcttttcctacactggatgactctctatatgaggttacatctcagtttgtttccaacagcaggattttataaatcggagtcataaaaatttagaaatataaaattattgaagataatggatggctgtttgatgtctcctaggtgcccctacaacacacccccaaaaacatcctaatcaaatgaaaaatacaaggaaaaaatcgtctctggaatgaatcattccaatcactgttgcattagtggaagaatttctttttgtagaggcagtgaagtgtttttagtacaaaatgtaatagatagtttctctctatgttcagccctagatctgctgtttatcttttaacaggtgatttggtcccatgaagttgaacattttccccttatctatgactcctttgataaattctacaaatcttcaaaaatagttgatgaactaaaacatttctaaaattgtgaaaacttcaatttggtatctctgaggaaaccaataatggttttcttatacttgagtgaaccttgttataaataatcacacaacacagggctttcaagtattccagtggccattttctggtaatagtaactgttaactaataaaaatagctaatatttattgcttcctatggaccaggcgctttcctaaatgcttaacatgtgagttcatttaattctcacaacctctgcacaagaaaaataccatataacctggccaggggtagtggctcacgcctgtaatcacagcactttgggaggccgaggtgggcagatcacgaggtcaggagatcaagaccatcctggctaacatggtaaaaccctgtctctactaaaaaatacaaaaaaattagctgggtgtggtggtgggcacctgtagtgccagctacttgggaggctgaggcaggagaatggcacaaacccaggaggcagaggttgcagtgagctgagatcgcgccgctgcactccagcctgggtgacagagagagactccacctcaaaaaaaaaaaaaaaaaaaaaaaaaagaaagaaagaaaaataccatataacccaatgttacagataaggaaacaggaacagatgagtaaattaacttgcccaatgtcacaaagttgttaagtcagagaactgcatttgaactcaggcagcctgtactctgttgtctttaaacatatggtactcaatggtaaagtcgttagtacagacttaaatgcagaagaattgttgctcttaaatatgtgtatcggttatcttttgccacaatagtgctgtgtaacaaccatccccaaagctcaatgatgtgatgtaagatgagcatttatcctcagagagtgccagttagctgactggttcttcagatctaggccaggattggtagaaccagctagtcttgcttttctgtctggggtcagcttgcatgttggagggggctggactcattcacattgatcacagttggctggctggcagtgaactgactcttgaggggggtaattgggccacatgtctgtcatcatgcacatggcaggggcaggcttgaagcctcgtcttggaactggagcagtatcactgtcatcacattctgttagccaaagcaaaggcacaagagcagcccagactcaaggaggtaggggatttgactccacctcagggaggagtgaaaaagtcacaagacaaagagtacacatacaggagggcatgaataatggtggccgttaaaaaaaatcaatttataatatctaaaaatgcttaaatattttaaatacttatgtgttgtaacagtctggaattttctcccccaaaatgcaggctgctgctgagtcagcagaagcccagaccatccgttctgttcagcagaccctggcgtcgaccaatctaacatcctctctccttctcaacactccactgtctcaacatggaacagtgtcagcatcacctcagactctccagcaatccctccctaggtcaatcgctcccaaacccttaaccatgagactccccatgaaccagattgtcacatcagtcaccattgcagccaacatgccctcgaacattggggctccactgataagctccatgggaacgaccatggttggctcagcaccctccacccaagtgagtccttcggtgcaaacccagcagcatcagatgcaattgcagcagcagcagcagcagcaacaacaacagatgcaacagatgcagcagcagcaactccagcagcaccaaatgcatcagcaaatccagcagcagatgcagcagcagcatttccagcaccacatgcagcagcacctgcagcagcagcagcagcatctccagcagcaaattaatcaacagcagctgcagcagcagctgcagcagcgcctccagctgcagcagctgcaacacatgcagcaccagtctcagccttctcctcggcagcactcccctgtcgcctctcagataacatcccccatccctgccatcgggagcccccagccagcctctcagcagcaccagtcgcaaatacagtctcagacacagactcaagtattatcgcaggtcagtattttctgaagacgcatatggcagacggatttgcgtataccaaggagagtggcataggagggaaaagcatatgtggctgaaacctgtaagttggtgttggttatgcagaaatgtgtaacagatcaaacggtcctctcaagtgtctattagataggcaataagaactgcagtgtagctgagtaacatcttttagctgactataaatcactttgtttttaaacaagaaaagctgtgctcttttatgtgatgccttttttatttattcaggctatacctacaatatgtgaatcaaactgtttaatgaatcctgggacatactgatgactataaactggcctctctgagtcatagaaaaatggccttatttctccagaagtgagtaaaccacacttccaggctatctgaactcctgaagccctaaaaataaaaagcacagttgtaactacctgaaatatgaagatccagtttcatacaaacatttgtatgacgtgaatagttgatggcatttttttgtcatgaaaaaaataatgtaaatcacagacttttgccaaagctcttattttttttcctaaatctctccagaaaaaaaatgcaagtgactaaattcaattattgactaatttccactttttatccatgacttctccaaatcaaaccacagtatatgttgtaacaatatctatgaccactgttagcccattatattcattccaattagaagaaatgtgaatactatattccgtgttttgagtgacaagtttcgaaaaataaaaacactgtatttttaaaagggaaatgcacttaaatgaaaacagttattacaaaagttaagatttaaaaagaaaaagcaagagtttttattatgatgtaataccagtagaatatttaaaaggcacaccacatctgaataatcaatgtaaatattttctttcaaagttgtaagttttcatatcatgtgctgtaaagttttcctaaatgaggctttaacgtaaacactggtgacataaaccattcattgctacgttgcttattgtgtttttatgctgttttatacttttttatgagttatgatagcagcaattaagttgtttgtattttgcttaactaaaacaaaaatgcttttatcttgctatagaataaacacatttcagtaaaaactgtggactgtattttgatgcaacaacaaagaaactgttcacttttcaaataaaatgatatgtcagatttca

SEQ ID NO: 592 - DNA, 825 bp, Homo sapiens
tttgatgtctagaatcaggggatccaggatcatcaccaaggtcattttcccagacagatgtgctgaggctgtagaaagtgctttttatttggttgggagcttgtgcataaatgcgagaggggctgcacatctgacggactagaggtgactcatggctgaaccggaacaggacatcggggagaagccagcagtcagaattcagaaccccaaagaaaatgacttcattgaaattgaactgaagagacaagaactgagttaccaaaacctactaaacgtgagttgctgtgaactggggattaaaccagaacgagtggagaagatcagaaagctaccaaacacactgctcagaaaggacaaagacattcgaagactgcgggactttcaggaagtggaactcattttaatgaaaaatggaagctccagattgacagaatatgtgccatctctgacagaaaggccctgctatgatagcaaagctgcaaaaatgacttattaaatactcccaggaatggccgcgcatggtggctcaccccctgtaatcccagcactttaggaagccaaggtgggcagatcacctgaggtcaggagttctagaccagcctggccaacatatagtgaaacccagtctctactaaaaaaaatacaaaaattagctaggtgtggtggcgcacacctgtagtagtcccagctacatgggaagctgaggcaggagaatcacctgaacccaggaggcagaggttgcagtgagctgagattgcgccactgcactccagcctggcgacagagcaagactctgtctctcaaaataaataaataaataaataa

SEQ ID NO: 593 - DNA, 69891 bp, Homo sapiens
attgattcacaacacccttatgtgtaactcccattactattctcatcatggagaagagagaaaaaagtcagtagaagattcagtaacaggtccaagatgacacagcttgtgggccacactcctagttggaattccgactcttgcagttggtttgagcccacatgcttaacctcacacacacacacaccattcagaaagaatatagaagacaccattaataatgattgctttctggtcatggaggttagtaatggaataagagagaatttggcttttcattttatactccttatattctttactatataccttatatatcagcgtgtgtcagttgtatattttttaaaaccactacttcaaataaataagcactaaagtattaaaaacatttttaaaaacttctgcccttaaggaacttaagtccctacatcaactcttaagggatttattaatcttaacaagtaacagtaaagtatatggcaaggaggtaaggaaatgaaaaacataagcaccagatcatatgggatgtggaaatactggcttcagtgtaagcttcactctattccagggttcacactcaacaattgatggtgtttggtaagagcacctgtctcaaagcagcccaggggcctgaaataccctgattcacctacagtgttcccctgggctcagcaggcaacaacattcttttttgttcttttgcagccttttgaaagctgtttacaaataatctaatgtgatatcacaacaatcctataaggttttgattcctcttctgttaaatggagatactagtatctattcattcacctaatggctttattcctatcattttgcagataggaaaactgaattgcaaaagcggttcctggagaacagaatgtgagtttttaagtgacaagggagagggagggggagggagagaaaattctgaagcgcccagtcttggaggatgagggaggagggcaattccctaatgtccattggaattcggaaggacaggcaggccgggcggactggagacggcggctcgccttgggaccctctgagcttgcgggccccgctgagcacccaaaggccggccctagagtccaggagaagagcgcagcggcgcggagctcccaggcgttccccgcagcgcgtcctcggtcctggaaccaccgcgccgcgcgtcctggcttccacatctgccccatttgcccgcggatcttgactttttcttggcgggcaaggcctcggtctcctccccgcagcagggctgcccgcggctgcgggaccctcctggtcctgatgcctggcagaatcgaaggggtgagggtacgctctctgcagcagaaagccctgggcttaaagtcctatttattatttggcgttgccacttactggtcggtggctttggtagggcgcgtttctgagcctcagtttccccatttgtaaagccgaagtacatagcgctttccctgcagagttagaaatttcgacgatgtgccgcgcgctctagagcgcgctcagcaagcgggtcccaccgtgcccaaggcaggaccgcggcgcgatgtcacctatgcaaagtcgccgcaactcacgggaatcgcagctgtgtgctcaactttcccctccccgccgccgtctttctccccaaactggcttgggggtcgagtatccggggctctcccccgcactggcgcttcccgcgcgggcgccccaggtgtccgttccgttccgccctctgcctggcagggcatccagaggtgtccgcgctcccggagctgggcggagcggggcgcagcccacgtggttcgggcgggaggcgccgggacgtggccagttgcccgcctgccccggagagccaggcgctaaccagccgctctgcgccccgcgccctgcttgcccccattatccagccttgccccggcgccctgacctgacgccctggcctgacgccctgcttcgtcgcctcctttctctcccaggtgctggaccagggactgagcgtcccccggagagggtccggtgagtgcactgagaagagggaacagcggggccagggtggcgcccaggactcggggcttaggctttggggggtgcgcggtgtcgcgtgcagacccactggtgtgaaaacgcccccagccgccagcctcccggcctcggtccaggctggtgaggacagcgcgttcccagccacccagccttagtcccccaggcttcacctggattctttgagcagactgctctgggtgcaggcacgggtgggagtgggatggcgggggatccccattttgggcaaaacggttggttttaatcagaagctccattgcctccattgcgagtctgccatgcagactgggccaaggctgctgatgccaagtaggctggccccaggggaaaggtttcctcccagcccaggagctggtcttggggtgaggaagaggccagatgatcttggcctgggaggaggcacctggcttcctctgggcgtctaaaagtctgttttattggaatcaccttttgtttgcagacagactccctgggcccaccagggaggtgtgggaagtagagatgtgggaagggtctgtgagctgtgagcacctgtgggcttcgtccctactagccccaagtccctacaggaacggaatctcacttgtaaatcccttccccgggcttagacaccgcgtcccactgacattaactggcactggaaactccacctcacttccacacggaacttgggacaggtccttttttagatggtgtgactggtatcttcttcacttatttctttctgagggagtgaaatgacagtcgggggagagcaaggctcccaataggtgcaaaggccagcattgctgggggctgtgaagtctcaggaaaaggcttctggacttgcagaccgcgttgctgagcagtgacattgacaccccgggttcagctgtcctgcatctgtcctaggaaacccatccctccagctggcctgcatctgtcctaggaaacccatccctccagctggcctgcatctgtcctaggaaacacatccctccacctgctcattggcgggattcagctgacctcagtaaggcctcagccttcctgggcccagccccctccctgcccaggaccgtgctccttagtatctaagtaccaggcatgggtcactgtgctcctggccctcactcaggctctaagaacagtagcaggtgcctcagaggattgactgaggacacatttagagaacatgggatggtgcccggcacacacatggggagtcagtgggtcttactgagtacgacatgagtgactcagaaaaaaattaaaacaaaccagctgaatgtgtgcccagtgaggggctggaggtggtggaagtgtcccagagccctgtgggctaatgggaaaagtgaaattggtgcctttcaaccacaatgcaataacggctcaaataagccccagtctcagtggttggggcagccttctagggccaactgtcttgttcttttcagaagcaacctctggaggaacagtctttgcccctactcctccccactacccccacaccatcactccccctcttaatttcaacatcctggcatcatccagggctggagagggccagagaggtcttggagctcagccattgtccatggtacagatggggaaactaagaccctgagaggaggggcatctttcccaggtggctgggctggctgtgcctgaactgggatgggaacccagctcccacctctcagcaccatcctcctacagcctcacctgggacccatccttgcggtagagactagcactgaggctttaggtgtaaatgcagaactcatgtccatttataaatgaggtttaccaccaactccccagagaactgggagagcagaggggatggcaagttggtgggcaggtggctgaggggcagaacaccctcccagtgctgttgctgctggggccattccagacccttgtggctacagcacagatgtgcctggttcacttgtagggaagggagtggcccttctaggtggaaatgtgctcatttagccactgatgagagctgggggtcagtgcctactgatgggccccacctatagaaataaccatacaggctgacctggacggcagcattcgggaaacagccacaaaggattaaggcagagggcactacagttgtcatctctgccacctcccctttatcagcaagaataacaccacacgacacaccttggctctgagtcagagagagcattcctgctgttgttagcttgccagtttgtttgcccaggcgagtaatcacccacaatcaccattgttccaaggctccccaagcagccagcccaagagctagttaagccaattcttcatccaggaggaacccccaccctgatttcccttcaatttggccaaaaaattaattcaactctttagcggataaagatgacacactactggaattcagcagtctgggcctgggatacccatcttataaaaccagctccactctctcctccctgcctattaatccctgtgtcccgtccctctgccccactatggctattcaactgctggggaaggctggctgtctccaatgtttaaaatatgatcgaatctgagcagtggaacaggcagtaagtggaagtgttttgttcaggaacctcgtgagcaggcgttatctaaacagaaatggaacaaggagcagatagagcagggtggcgtctgccctcccccagcacatactctgggagcccccaccccacccagctagggcaggcacagagcagccctgcactcctcatgggtctagcatattctctgccctcacctccctgagcccatggaggtcgaggcagcagtgagccatgattgcactatcgcactgcagcctgagcgacagaccaggacctcatctaaaaaaaaaaaagaaagaaaaccatttgaaaggggatagaatgggggagggacagatatccaagcagcctctaggacattggttgtgatgctctgtgatctttttatccattcacttcctggtcactgactgtgctctaagaatgtgaagcttgcaagacaagaaaagcaggtttttccttttgttttgcttttcttcctcacacatcatgatttaagtttctcaaactgaggcctggaattttggcttctatgttaggagaagagagggaatgataatgcctcagctgatggtcacactgtccatccattctgaaaatagaatgtcggtgaatgctcttcttatgatcccttttttttcagaactcatgaaaaataaaagtgaatgaactccagtcatgcatcaaataataactttttgttccaattctttagaaaccagaaagtgtgtgctctgtgagagcatcaaaaatgagttcggtagtaagtccatttcttgaccagaacctaaatctgactgtaaaggaacagagtttgaatgctcccagggcattggggcaatctcttcttgtattgcaaacactcaactttatgtttgagagtggaaatgttgacgaatgggtgcaaaaaaattcaacgaattatccttctccatttttatggcataagccagggactattttggctgacttccatgacagctctgtagacatttttattttaaatggtatctgcccagaaaatgtcccttttcatagttaacctcttgtgcaacaaaatcgaagtacgtctccagcacagggggagttttgttagtatttttatgataaacgcttccaaatggtcagcagcactgatgggagatgcttctcagaattcagaagcaaaattgtgtctttttggtggttttgagacttccccctgaaagcacacagattggaccccttctctaatgttcctgagaaaataggttcaagtcctcaaggaaaacttattgaaattacgaggtggtttttaaactttcagttactcacaacagaactcccagtcatccattccccaaagcgtcagtgcccagagcagagctggtctgtctgtagctgcagcatctgagggccgagggcttccctggcacagcctgctgcacaccagggagctgcaagcacagaaaagcacctgccatgtgctgggaacggacagaggtgctattcttgtggagcttaacaataactaatgagacatcaccaactgttaaggggtataaagaaacgttaaagggatggggacaggtgaaggagtaaaaaccacaggatgatcagggaagtcctctgtggggagcgtgcacagttttgcagtgtcccagtgtgcatgcattggtggtgaagttctccctggtacaattgttcctccaattttatacccagcagtaatgtccacatcaatataagctgtgaggcctgtgtgatattgccatatgaaaagccagcaagtggatctgtcattctctgctcagccaccaccactgcatcactcccctgcctcacacccatcaaccacctgacaggatgtacaggccaaggtcctctgtgactcgccgcccactacccaagtgaatgagtctcccctagagctttgctactcagaggggtctgaggacaacagcatgggccaacacgtgcactcgagctgcctggagatcttgttcaaaggcagattctgaatgagtaggtctgggttggagcctgagagtctgtacttctaacaagttcccaggggatgctgccagtccacgaaccacattttgagtagcaagcaagattctaaggttccacctatcttggcttttgacatttggattttccttcctctgtcctttggacattgattgggatcaggtctgatgaacttcaaaaaaaaagggcataagatcatctgaggtttgacttcttggtcatcaggttacctacaaacacagcatcacatagtgcattgggtggggccgctgctctgctgagcagctgagtcacaccagattctcagacaggcaccatggctctttgggaggccaaggcagaaggattacttgagcccaggagttcaagaccagcctgggctgcatagtgagaactcgtctctaaaaaaaaaaaaaaaaattaagtaaaattttaaaaaatttaattagatttgctgagggtgaggcctggccaccagtagtgttaggtgatcctaatacaccccaggcatgagaatccctgctgggcagccccacagctgacctctcgagtaaataaatctcagcacctactgctcatcctgcccagatgttttgttctcccaagttgcatcacttttgcctccccagggaaattatgtggatattcccagcacaagcacatcgccctcacaggcatcaggctcatatgacctccccctggaaccacccccaaacacacacatggcaaacctaaacagccccccacgcccagaggatggtgaaaccttccaagtgctgtggagtctcccaacttttccacctagtgggtcagtcatccaggcgtccctgcccacacagagcctgcagcatcgctctaggaggtctaggagatgcacaggagactctgagctgactatgaatttgctgtgaagtttcctcttttctgtgctgttccctctcccaagaaacttaaggcgagaagcctcaggaatggcgcatttctcccagggttttccattgcaaagcccaaccctaggtgagggagaggagccatgcccctggatggggagatcactgacgttcatcccacagtggaaagaaaatgagagacccgtggctgagtgtgtttgggagagtaggaagtagatcccttttaaaattcgaatgtgggaattttgcatagattcacttaaattcattaaactacacaagtttccagacaagcattagaaaaccatttaacccaagtacagacagatgtcctgagaagtcagcagcgttctgtgttgtctcttactctgtgacttgattggtattggtaggcttctgggactgatgacttgtgatcctgtgacattccaggtgtgaccccgacaagaagcagaaatggggaagaaactggatctttccaagctcactgatgaagaggcccagcatgtcttggaagttgttcaacgagattttgacctccgaaggaaagaagaggaacggctagagtgagtgtgccgtgctgagcccacggagcccggggtccctgatcttcccccagggccatcatatgggtgctgtctgggtgggtcaacagccacgtgcagggtgaagagtgatggacaggaagccaggtctgggacacagctcttctttctggccttggttttctcaatgagaggatctgacttgccaaactgacattcacttgttctctgaatagttttatttcaacttgacccagcttccagggtgatatatcctaagccaggtgatacttaggccacatctttgaagaatagagcaaaaggtgatacatggggaaagtctccatgccattctgaaacacctagatgttggaatcaagtctttaggacagaggctgcccttccacctctcttttcagcaatgccaggtagcatcccgtcctcaccatgggtgaccccagcacggttttgttccactctgcccagtgactgggctaaaacccacccatccttgttcactctatccactgcgcatcttcctcccccctctatcttctgggcccccttatcctttcttgatgtctttagtagattgggtcaccctatgggaaggaagcatatgagggaagtagttaagcaaaagctgagaggatgctcccggcgaaggggggggcagagagcagaggacagagggcagagggtggagggcagagggcagaaggcagaaggcagatggtggagggcagaggccagagagtggagggcagagggccccgctgaagatggcaggagggagcctggtgtgccccagggagagcacaggctggcgaggctggagtggagtaaatgagggggccaggaagagaggcagttggagatgtaacaggtggggggcatgggatctggtgccagtcacgggggtcctgtagagcttcacagggcctcacccttcccctgagtcaccacagaccttcgagcagagcaacagcaagtcctagtttctgtttcacagcggtgggctctgtgaagtggccagatgcactttgcaggcagagccagcaagcttgaccagagatcagatggggggtctccagggtgagagggatcaagggcaacttcaaggttgtggcctgagcaacttcaaggacagagttgaggtcagctctgctggggaggccacagatggagaggtttgggggaaatgtttcaggcatgttgaagtgacatcacgcaggtgtgttgagcgggtgttggatacatacactagtccggagctcagaggagatgcgttacgagagcttcgtaaaggtgaagcttcatatggtgaaacggatgaaaggtatttgtattcatttctgggactgctgcatatgtgacttgtacagtacagatttagtggtttaaaacacacagctgtcctgcagttctgcaggtcagaggtcctaaaatcaagttgtcctcagagctacattccagctggaggctggagggaggacccatctctcggccttttccaggttctagaggcttcctggattccctggctcctggcccctcctccacctccaaggccatcagcacaatgtctaacaatgtctctttctgccactgcctctctctcaccctccctccctcacctgtgcctccatgctcacatctctctctttgactttcctgccttcctctttcccctatgaggagaaatatggttacatttaggaactgcccgtatcatccaggaccctcttcccatctcaggatccttaatgtcattccatcggcaaagtcccttttgctatgtgaggtgacattttcacaggttcttgggactagaacatgaatgccttggggcagggggtggcagcattgttcagctgaccccagcatttaaagctgcagggccataggagaccgcactggaagggaatttggatggggaccagccccggggacgtgagctcaagcatgttgaggagacaaagcaccaagaaaggagagagaaggagcagtagaagagggactttgggttcccatgctgaacagggtccgcaacaaaccgttaggtgaagcaagagcagttcagccccacatggagcaggaggcgctcgtgttggtggggaggggccggcgtcagagcctccccaccgtgtgatcccccactctccctcggccctggaccaccagtcacccctggatttcattatagcccaggtttcaccaccggcctcgggggagggcccaacctgctggccctggtacagccagtaccagcctggtggccatggccggccacgaccaccttctcaaagcctgagcagaggctgcggaccagcatgcagctgaccgcagggctgacaccctgtcccctttactctggcaggaaaatgcggtctcacgggccccgtcctcacccctccactcttgagtctcagatcccccatttccacattctgaagtccctcaccctctctttcccattctctctacgtaaactcaaatgttctctcactgttttcaccagagcagcaatccctgcgtcagctttggcgttcaggctgtgccaagggcagaacatcgttctcattagtagaacccccttctgggtggatccttcccaggtgcatcctgccctgtctccaaggcagccctggctattgtcagcccttatttcaaatggcaacttgtaacttctcattgcctgagtataggcgaatgcagagaaatggaaaaggggggagaaccatgttttccaaggagcagagggagggagcaagtggggcctgggggtcccggacaggcactgtcttccaggggactgctgagtggtccgccctgctccagtccaggcttatctgaagcgggtttagcagaaacccccatgcgtttcctgtctgtggctcacccccttctgacacccgtctttccttatttcatgctcttttcatcatttcacattgcaaagaagggacacacccaggtcacctcccagaactcttaggaaaggacgcacccaggtcacctctcagtactcttaggaaaggacttttgtaagaatatgggttctgatgaccctgcctggtgggccgctgatggccagttggttacagccgaggtcacattgttcattctgtgcctgaggctgtttgctcagaatgagccagtggctggggcgttaattggcccagtctgctatgtgattaggggggggcttgttaagtccccagatgtcttccgatgggaaggggccgcatgagcgtagagtactgtgttgaaaatgtcagtgagcagagaggcagtgctatgaaaagcctgtgtcaaggtagtgttaggtcgagaatactgaatgcccaagtggcattgctatgatgggtcttactatgagagtacatgtcagcaggtgacacatttgggaggcaaagaatcatgtaaaccagtggtccccaacctttttggtaccagagaccggtttcatagaagacaatttttccacagatgtgaggggctgggggaggaggctgggggcagggttggagatggtttcaggatgaagctgttccacctcattctcgttctcataaggagcacacaggctagatccctcgcaagcacagttcacaacagacaactatgggagctctatgagtatctaacgctgccgctgacctggcaggaggcggagctcaggcgggaaatgctctcttacctgccaatcacctcctgccgtgcaattcggttcctcacaggccagggacacttactgggccacagctggggcttggggacccctgatgtaaacagtgtggtggcagaggtagttaagaggtttttgagtttcttattgtttcatttgtgcttgtcttttgttgactgccctattggttaaatatgtcactaaaaggagagctgcctctacctgtgagaagacttttcacaggtgcctcgtgagccccggggagtggcagggccccagcgtgtgggcacgcatcaggtgcaggtgacttgagcaccgcaaggtcaaaacacgcctcgcagtgtgctctgctcaaaccaggtggtgtggacgctgtgcaaggccacagaggaaacaagcatagaaaaaaggctctggttcttggcaccaaaattggttctgcagaggagctggcgaaaataccagaaatccatgatgaaacggaagataactcttacaataatgaacctccttccctgtctttcatcattgctaatctgtgcgtttaaccaatttcaacatgaacagtcatctgtgtgctgccgccacagaatcccgttctctgtagcgtctctctgggtgacatcctcggggtcctcatgtctgctcccggtcaccgagtcttaaatatctgaatcagcaagaggctggatgaagaaactggtgctcgagggaccactaagtaggtggcggtaacaaatgtagcaattcaggagccgcccagcagtttcccatgtgtctcacaaactctgagagggaagcccgtgggcgcgacccagcccgaggaaactcaaggccactgattggagagaggagagaacaggggtgggggaattgtgaaaccaagaaacacaccatcgtttcttggaaagagctttactacccagaatatgcatcaggggaacacagcatgcagactcaaggccagtgccccagaaacaagtttgccagggggttgatttgcttaagagcggattcacttaatgcaccaattatcaaaccaaagaaaatgcatttcttttaacagtcttaaaattagcagatgtgtgtcagatggattcctgctcagtatttctctccagatgtgagcatcaatcacgttgaaggacgctgggcagggtctggaggtgacgcctgcgccttttcccacagcgtcagaacaacacaactttgatttctcctctgtcaaagcagggacaaacaagctggtccagatccctgatatgctggaggaaggagggcatgtgaccctgagacccccatgagcagcatcctgtccccaagccacggaagctcctgctcccttggccaggcctgcccctccctccaagctgtgctgtggacattcggtgacgcacacgcctgacaaggctctccttgctggcccttaggagggatcggtgagaaggaaggggaagccagcacgtcttgatctagcccaggcaggcataatctctctctcaagtcatctgtgccactagggatttgggaatgggctgtttgctatatagagtgggagggctgttcctgcctcccacgaggacacagtgctgtgcaccatagaatcgaaaacttgaagatgtacaaaattaggatgttagcaccactggcatcagataggcattttaggatagatttgacttaacacccatgtcctatcccaggagctgcccgatcagcagccccttctcagcctttgtccctcctgaccctctgcttgtcctgggtgtaactttccccacactctcttgactttactctgtggttagtttgaagcctcctctttttcccgctggcccattattggaataaattgccaatgacagatcttcccggagggtttcgtccatatgctttcatggatggatcttttaaatggtcaaagaacagataaatcctgtgtgatttaaactgcttcacggcagagtgttcactagcctcgccctgacacctcatattgatgaagataaagaaaaatatatacatagccctgttaaatcatcatataaatagacctaaggctgcactgtccaggacagaagttactagccactagtggctattaaaattaattataattaaataaaataaaattataattaaataaaatttagctcttcagtcttattagtcacattgcaggtttttgatggccacatgtggttagtggccaccatatcagatctttgcagaggcccatttggactaaggtagcaaaagtcttaaaagtatgctcacctgttgagccagcaggtcctctgctggaagtcatcataaggagagaatcagacaagggttacaggagagaagaactagaaagaccctaatgtccaaatgttcaggctttggttaaataccaaatttaacaacggatttaacaataggttgctcagcacccaatgaaaataatgatagaaataaattgacattaatagttcacaagacattgtccagtagaaaaagcaagttgtgaaaatgtaattttatcccattttactttttttttgtttgttttgtgagacagggtcttgctctgttacccaggctggagtgcagtggcgtgatcatggctcactgcagcctcgacctcccaggctcaagtaaccctcccacctcagtctcctgagaagctgagactacaggcatgcatcaccacacctagctaattttttaaattttttgtagagatggggtctctctatgttgtccaggcttgtcttgaactcctgggctcaagtgatcttcccacttcaacctctcaaagtgctgggattacagatgtgagccactacacttagccagattttacttttttaaaaaaatacgtagaaaaatccaataatggtagcagaagctcagcactcattgagccctctctggatgtggctctacgtcgtgtgttggagtctagtcccttctctgtctcctttgctggaacttcttggactctttaaatattccctttcgcagggtcgagggccctggcctcaactctcttctctgctctgtgtcactcacttctccagtgaccttgtccagccccaaggttttaaatgagttctagaccagcactgcctgatggaactttctacagtgatggaaatgttcgtatctgcatgacccatgtggcagccactagccacccaaggctatggagcaccagaagtgtggctaatgcaactggggaaaaaaagttttaatcgtattcaattttaattaatttaaacgtaaatagctgcatgtgccctagcagctaggagctactacagcagctagacaacacatctaaacaatgagtcccaagtttacacccacatcagagacacatcctctgaactctgacttttgtaggcaaaggcttgcacgacactgcggccaaagtgttccactgacatctctgtcccagcatgtccaaaacagaagttgtgatttctcctccacctccaagcaccccatccccatcttggatgcaggctgttgccaaagttaagttcccaggactcatggctgtctctgctccttccctctcaccccacaccccacactcagccagtcccgtggctcaaccaatacagccactgctcaccgccctcaatgccagcctcaggtcacgccacactgtctttcttgtggacaccacaggaatccaccccacacacacacttactcttctctccctccaccctcaccgtcttgttgtccattctccccacatcccccagactcatgccttaaaaatgtggatcaggtcatcccccggctcataacccccacagagcttccatcacatttacgatgaaattcgccctcctcacccctgctcaccgtgggacctcactccctcctccatttcctccttagcgcttctccaatgcccagtgagtcatttccttgttagtgtcttatccctgccggcatctaagccccatgagggttctgctgctttggcgctgtgtcaccagcccccagcacagtactgaccatggaacgactccacagctctctgggctcacattggatgatgacctctttcagcttcatctctattgtctcctttaaccctcagacacccctgtgatgtggttacttttactggccccatgcacaagtgagaaactgagtctggggcgggttacccagctgtgatgaatatctggtaaatgtttacttttagcattcgcgggtctatctgcagtgagtgagagcttgctgtgtattggtgtattgtctcgtattattgttcctctcatctcctatttcccccataaatatatattacatctaaaataattcactctaggccaggtacagtggctcacacctgtaatcccagcactttgagaggccgaagagggtggatcacctgaggtcaagagttcgaggccagcctggctaacatagtgaaaccacgtctctactaaaaaaaaaaaaaaaaaaaaaaaaatacaaaaaaattagccaggcatggtggcaggtgcctgtaatcccagctactcaggaggctgaggcaagaaaattgcttgaacctgggaggcggaggttgcatgagctgagatcgcgccactgcactcctcaaaaaataataataataataaataaaataattagatctaattccttaaatatctaatgtgtgttaaaacttttccgctcatctccaaataatgtccagaccttacacttgcttgctgtatcttttaagtctctttgaatctgtaagatctcttttcagctctgtttttttaatttgaagcttatgtgtagaagaaagctagctgtttacttttgtggaatttttcacagtctggagttagctgaggatatcctcgtgatgtttgcaccaaagttccattgtccctgttttcctgtaatctggtggtgagttccatagaagtggtcctcagagtgctctcatcttgagtgttttagattcattcatatcacttgggtattaagaaggttttaagtacagaaaagattatcacatgttattattttttaatgttctacaaatacaaagtagggccaaagtaaaccttcttgaagggaacattggttaatagtcacagcttttaactccttctgtccccagaagagcccagaacttcttaggcacccatccctgtcctggacccaagggacctggggctgtgcacaaaaggagcaggcctcctcctgggcaccctggagcttgcattggtgctgatttgtgtcttgctttgtatcatgcttgtgtcaagttctcccagtaactgctttctgcatttgttagggtagcccctcagctgtggttatggtagaaattaatggatattctccaaacccaggaagaactaggagaccatgcatagccggacttgggtgactcatgccctgggggaaaggctgaagcccaaacggaacaccctgttttaaaggacacagcctacaaatcaaatattaggactgccaacctgccctggaaaggcaaataggtggtgacgtggatttgtgatctctgcaaacagaggaggttcagagagaatctgtgaagggtctcctagtatgagacacgggcaaaccgtggcttgctttaaaaaaaatttttttttgaccaggctcggtgactgatgcctgtaaccctagcactttgggaggccgaggcaggtggttcacctgaggtcaggagttcgagaccagcctggtcagcatggcgaaaccccatctctactaaaaatacaaaaattagccagccatgatggcaggcgcctgttgtctcagctactcaggaggctgaggcaggagaatcgcttgaacccggggggcaaaggttgcagtcagccaagatcacaccacttcagtccagcctgggcagcagagcgaaattccatctcaaaaataaatacataaataaataataaaaatccatttttttgatcataaggaatttgaaatcacccttagccggactagttggaatcacggacacaggcaactctagagatgaaaaaaataggggctaaaacagggactccgctgccaaggcagggcctggaggggaacattggtctgagatgttttaggagatactctgaggctccgtctctcagcgcctgccgttctcacatcaccactcacttcctcttcatcttttttatcgtcatcttggtcttcccctttagaggatctccaggaacttgagtgagtttccagctccctcgtggtaattcccgacacgcgttcccaggatgaggagcctgggtccccggtgctgctcctcagcaatgctgccgtctttccgtcctctgccagccgttagccctgacgtgaggtttactttggttgccacgctttcagtcatttggcccctggatcctgtgactcactggatcttttgtgctccagtccccaactcagggtcaccctcaggaatcatttctccattacctggggtctgtcctcaggctgttttctcaggcatggcatggagtgtggattttgtctttgaggatctgttccacttgcctgggagtacaatctgacctcacacgctttcccctacaggctgtggggatgcttaccggtggtaagcagaataatcccccccaaaaagatgtctacttcccaaccccaagaacctctgaattcgtgaggctatacagaaatgggattatgcattttaggctgcccacctgctggcctggacctgggagatgatcccgggttccctgggcgggcctaatatcatcacaggggccttagaagcagaagggatggctggttttgaagatggagaaaggggccaggagcccacatacctgaagccctcaagaagctaaactgccagagagcagattcccctctgggggctccaggaggtgccacaatcctgccgacaccttgatgttagctcaatgaatcctgagtcaaacttctgccctccagagctgtcaggtaatgcatttgcattgtttttgtattgtgtttattttattttattttgttttttgaggtggagttttgctcttactgcccaggctggagtgcagtggcgcaatctcagctcactgcaacctccacctcctgggtttaagcgattctcctgtctcagcctcccaagtagctgggattacaggtgcccaccaccacacggggctgattttttgtatttttagtagagatggggattcaccatgttggccaggctggtctcgaactcctgacctcaggtgatccacccaccttggcctcccaaagtgctgggattacaggtgtgagccaccgcaactgaccagcatttgcattgttttaagccatggagttggtggagctctgaaatggcagcagttggacgggagccactgccccacggccagccctcagccttgcagaagggccccctgcatgacctccactctgttggaggccgccggttctgtccaccatgctggtagggattttgcccgccctataacagagtggtcttgtcagtctgtgtaggcatctcctaccatccagcgacccctctaatctgaagactcagctctttctttgtttcttctctctggttaggagagttttcctgtgttgttagggtgacggctgcctcagtggcatggcaaaaactcatggtcgaaaacttcacccaaccaagccgtgcaaaggaaatacaggtcttttatttcccatctgctccccctcgtgagaccccaccccttgagcagcaagacagtgcaagcttcagggcttcagatctcccagactctgctcacttaccgggtctctgttcctggctcagcttctcttccagagctccccacaaccccacctctgctccccaacccatgcttttggccaggccagcagctgggccttgggagaaaggctcatgaccctcccggtggccaggttgatggggtctggactccacacactgtccccacctccttgctggtcctgatgcagagtggagggcaggtcagcttgcaggatggggaccgctggctggtatgtgaagggtactggccgggcactgagatacggatggcacccaccactgagaccctgatcccagccacatacccacgtgctgtggcctcttccaccaaccccaagcctctgccagtcccctggctgctcctcatcgcatgcagtcctgctggagcatggtttaaggatcacagggatgtggattccccaccaccccagcacccaacgcaagtggaggcccacaggacccctcatgcaggctcttcccccgcctgtgtgctggaccttggggatggccacagtgggagcttccccctgctgtgccttcaggggtggccaccagccccgccatcctgggctctccccagtattcctgcatgttgccaccacacccctgtctagatttcaccccaagaggggcagagcagggcacaggtctgaccccttcaccctgcgtggctcaccaatcctgtccagaccccatcataggagcggcctttccttcctgttcccgtcctagaagcgttttccttccctggtatacgccctttcttcagaggctgccgggcctcccttgaggacaggagtgcccccttggctctgttctgccccaccagtcacagctctggcatgcgtgtcccagggccctctggaggtgggactgcagaggacagtaatgtgggtcccctgccccaaggacaaggacagcacttcccttccacccccatgcatccccgtctccagggctctgtctcccctgggagctcactttctcggcctttgccatcatctccccactgtctcccatcgcttagtcccttttctccacattctgggagggagagcaaacttgacttcgaaatcagcagttctcaaacctttgggcctcaggaccccttcacatttcctaaattactgagaaccccaaagagttttattcatatgggtcatatctattaatatttaccacatcagaaattaaaactgggagttaaaaatatttatttattcactcatttaaaaataacagtaaaccccctacatgttaatataaatacagtttttataaaaaatgagattttcccaaaatcagagtgtgagtaaggtgagtggtgttgttctgcttttgcaaatctctttaatgtctgtgtagcaggacaagccacagacaagaactcctcagacaccgaattgtagaaggaaagggctttattcagctgggagcatcggcagactcacgtctccaaaaaccaagttcctcgagtgagcaattcctgtcccttttaagggcttacaactctaagggggttcatgtgagagggtcatgatcgattgagcaagcagggggtacgtgactgggggctacatgcacctgcaccagtaattagaatggaacagaacaggacagggattttcacaatgcttttccgtgcaatgtctgtaatctatagataacataactgattaggtcaggggtcgatctttaactaccaggcccagggtgtggcgctgggctgtctgcctgtggatttcatttctgccttttagtttttacttcttttttctttggaggcagaaattgggcataagacaatatgaggggtggtctcctcccttatctggaacaatagaagatgggtgaattctccacttgcttctgcattcagtgggtcgtaacatgttttctaggctgtagtatttgaagaaaatctaggctcatacagatacataattgaaaaaaggagtacttgaatagcctttgtagacaataattaacatcatgtgttgttacaacatgaaaacccggcagttggagttggtagtttttttcctttttcttttttttttctttttttttttttttttttttgagacaaagtctctctctgccacccttggatggagtgcagtagcgtaatctcggcttactgcaacctccacctcctaggttcaagcgattcccctgcctcagcctcctaagtagctgtgactacaggtgcgtgccaccatgtctggctaatttttgcatttttagtagagacagggtttcaccacattggccgagctagtctcaaactcctgacctcaagtgatctgcctgcctcagcctcccaaagtgctggaattacaggcatgagccactgcgcccggccagttggtagtttcttaaaggttagttgtgatgtggaatctgaaaccatgttaatgaacttttccttttctgtttgttcaaatccattggtctctcttgcacttgaagtggattttctacccctgtgtgatttttgtaacaccatgcattaatcatttggaagacaccggctcactgagtgatgcagacttctcaaatgttgacacatttcatatgcacaccaaaagagaaccacttctgttactctcaccagcgatctcatcaaaagtctcccggtgttggaaaccctcatcaaaagtctcccagtgttgcaaactgtcaagctcacagcaggcgatatatgttttccagaattctactttgtgcttgaaagcttccgttttattactggcaataaatactgtcacttcttttccttgaagtgagagtcgcactttgttcatttttgagaaaatatctgccaagtacccaagtcgaaacagttcatctctctgttgttctctcaagtgaaaatgctatttcataagaaaagtttctagctcaggtggcgatcggaacaattgcccaatccttttaatagaaatatctgtcaccttcaacacgtggcacaagagcttcctgtcctcctccaagctcatcaggcagaatcctcaaaagacatggactgggggccacggttcaaaaagactcataacttttagggtttcatcaaggtgattctttaatgaaactgttttttcttctcatttctttttcttttttttgagacagaatctcactctgtcacccacgctggagtgcagtgacacaatctcggctcactgcaacctctgcttccctggttcaagcgactctcctgcctcagcctcctgagtagcagggattacaggtgtccaccactgtgcctggctaatttttgtatttttagtagagacggggtttcaccatgttggccaggctggtcttgaactccttacctcaggtgatccaccttcctcagcctcccaaagtgatgggattacaggtgtgagccactgcacccagctcatttctttttcaatgaaggatctaatgactgtcagagcagttgggcccactgccctgactcgtgctaaagcctcagcagtttatccaccattgtttttacaccttcagtgcaggcatcaaagagcaaagaaaaggcaaatgatgtctcagcattattacaaaaatagctttggccttgtgactcacccccctaaaggatcttaggaacctccagaagagaggtccctggaccacactttgaagaccactcttcgaaatcattggatctaatattccacggtagaaattgtgcccatttccccctccattgtgagctgtgatttctcgccatctctgtcttaaccagttcttctccacctccaccagcatagccggtggtgctcccatctcagcctggtttcctcctgtgtctcctctgtccctctcattgagactgcacgtacttgcttatgccccattcagcacaccaagctgacttgtttcgagtctgtttctgatggtaagtcacattcaggagggtcttttattcctgaagctaactttaaattggagccacgtgccgggctcttgcctgttgaggagtgacttctggtcaacccaattagcagagtgcatggagtgctctggccccattcactcctcaggatcggaagctccgggtcttgttgatacgtcctggagtggctggcagatgtcatttggtctccccaaatggagtcttctctgccctcccttcctggtctctggctatgaagaagggaagttatgttttaaagaatctaaagcacagtacagttctcctttcccctaatttcagcctctgaaatatatcagcctccagctgctgccccaggacacttctgggctcttatttaagaggactcctccagcctggaatgcagggcagtacacatgtccttgtctttcttcctgctgtgctggccctcagggtaccgttctgcctggatacagaagaagaggttctccctgggacagaggctaacaagccctgtccagcgaaggggtggcctccaggttttctggttggtgcagagctggcaagggtggaaatggagggagtgaggcccttcccatctggctccagggacttgtgctcctctgtttgggacaaagactttaccttgtcaatgcagctttatctaaactgtagtctgtggatggcggtatccccctagattcctacaactgcttgaccctttttctcttggtttttgaagctatgacaagagcctgatttcgtgtccatctcagtgaacatttttgtaaatagtggagagaggaaaatcgtgaagttcagccaattgcacttgaaaccggaggtggcctccccctgcctggtgggactcctccactctcttcacctttgctgcactctgggtgtccgcctccaaatcagtgtgcttcagagttctcagaagacaatggcacctagtgtccttcttgtttttgtcactaagaatggattaattttatctcatctgaaactgaaaatattacgtttggcagacattctctgaaatctagaacaaaagaaatgtgttcattatcatctaaggatacactttccaatcagttcaacttggcaggttcaccaggaagctgtgttatttaaactcggatggtctaggagaactgtagacttccgggtgctagatgattcctgctctggaaactcaccgagccatttcagctgcgctctagaggagcaaacctggggcgttagctcaactcttgcccccctgctgaaggagaccaaaacaatgcttgatcaggaaacaccatctggctttgcccccaggattctgtgactgccctggggagggcgcagtgacctgccaaccaaaattggtacaattgtaaacagccacagaaatgcttaaatgcaatatcatttctatgaaattaacgtgtttccattccattccagccaccaaaattgcccgtttgagctcagccctcaaaacaaagatgcctgtgtggctttgcccaacgttgggtcactgttttctgcataggagacagttactgtgtgtgtgtatgtgtctgtgtctgtgtgtgtgtgtatgtacgtgtacacacttaaagcctgttgcaaaaacaagatgcccaatatatttcttgtttctgatattttcccaagggcgttgaagggcaagattaagaaggaaagctccaagagggagctgctttccgacactgcccatctgaacgagacccactgcgcccgctgcctgcagccctaccagctgcttgtgaatagcaaaaggcagtgcctggaatgtggcctcttcacctgcaaaagctgtggccgcgtccacccggaggagcagggctggatctgtgacccctgccatctggccaggtgagcccaggccttgaggtaaaatgaccttgatagtttctggatctggcgtgtcccttccatggggctagctgaagaagggtggacgcacacatgcacacactcgtgtgtgtgtgtgtgtgtgtgtgtgagatttatgcaggcctgtgtacagcactcaggcagtgccatgagcctgtgcttgtccctgcagagtcgtgaagatcggctcactggagtggtactatgagcatgtgaaagcccgcttcaagaggttcggaagtgccaaggtcatccggtccctccacgggcggctgcagggtggaggtaaggagtggagagtaagaacggctttttgttcccaggcattttaggaatattaaagcaggttcctttggagtgtgcatgtgtgtgtgtacgtgtgtgtgtgcatgtgtgtgtgcacatgtgtgtgcatgcacatgcctctctgtgaattcctgcttctggctgctttttttttttttttttaatttttgtagagacaggcatctcaccatgtttcccagactggcctcgaactcctgggctcaagcaatccacccacctcagcctcccgaagtgctggggttataagtgtgagccactgtgccctgtgaaattggctcctttttatgtgaggtgcaaacctctgcatcccactggcctggtctgagcacctcagaagtcctgggtgctgctgaagttgccaatatttgaaattatattgttttcaaatcttcaaagtaagttgagaactcaaagccaagtttctgaaacccagctgctgattgaatcaccagggtgcttgttaatactacatgttttccaagcccttcttccctgggacatctggtttggggcctaggctctctcttttcaacaaacatttcacatgaatctggtgattatcaagatttagagaaatctgttgtaattcagttgttttcatcttttgaatccaagtatttatttcatgatgaatttgaaatccaggcagtaggcttaaactaaacaatgtgttcgcctgtaagatcccccataaggcatttggaagagatcttttcagggagagggtgggaggatgccggggggtcttttgcatttgagtttgaagggagctaacccatcagtgtttttgagaaagctcaccttgtccctgttacctggagtccaaggcttctgccactaagcccggccaagcattcgggtgggacagccgccaccaagccaggtgtctggggtctcagtgtcctggatgactccatctgcaagaccaaggcgagtttctccagggccacgaggcagcgcctggctccggcagctgggcacgtccagggcagaggctgtgcttctggattggggcgtcctcaccatgccccagcccaggcgtctcccccaggccttccttctggagagacaccttattcgtgcctgtctcttaaagcctcaagtttgattgaagaagcagaagttggcatagacacctttgagcattcaagctctcgccgggcctgctgcaggcatttcaaggcatcttagcccatcgtttaatttaggacagaggccacggagaggcaccgctggagcagtacaccgcacaccacagggtggctgcactttttgggtggtggggtggggatgggggcaggtatgatcaatcatccaaaccagggcatttttaagagtaaaaggaggctctactgataacatgctgcaacaacagatgtgactaggaacggccggtgacatggggagggcctatcaccctattcttgggggctgcttcttcacagtgatcatgaagcctagcagcaaatcccacctccccacacgcacacggccagcctggagcccacagaagggtcctcctgcagccagtggagcttggtccagcctccagtccacccctaacaggcttaaggatagaaacgacacataacaccgggaaaagccatgctgtcaagcatctcagaatctcaaccccagaggcagtctttagggactggggtgggctcaggaagctgtattatttcaaaggacgcagtgtttccacagctcagcccagagctgctggagttcacacggcccaccagaacctgctgacttcaaaatcatcaccaccaaggggccaggaggtggcgctgtggggcaacagaaaacagaaaacagctgctccttgaacttggattcccagcagctcccccaagcgcccacaggggctgcattcctccctgctggacacctgtaactacaacattaaaacagggcgcaagcaaggaacacaaacactgggaaagctgtgcctttaaaaaaaaaaaaaaaaaggagggtaaaaaagcttaaggttaatgttttgaaacctgacccagccagggcctaatgcagaccttgtccagctagtaagtgggcctctgggggtcttcattgagtgaaccttcagagtgctggtgtttcaccaaggccttccatagaggacgcggcaggctctgcaggaagcagcttcgatggccgatggccaagaaaggaagggaaaacccctggactggtcgctgggcacccagtccccctacccccgtgccttcccttccagtgcctttccctctttccctcggtggtagctttgcctgacagtgcagacctcgcctgacgtcaacactaggttctttatgctcatgtggttttatttttgttttctcctatcaagagtggtcagaaaatctctgttccatgtcaggaacaaggaaaatcttttggaatttttttggtttttttcttttttttagcatgacttgatcagataggtaggataatgttgcccccttggcccaagtgcagagtgacaaaagggaccaacactaaaaggatccctgagatcctgggatacttcctcttcatgttcattgtgggggccggggacatcaccctgacaggtgggtccccaggccccagaaagctcatttccgcatccctgggtgcagggggagttcacggggtctctgcctgttggtttgggatgcgtctcctcaaggcactcactgtccagagagaacaaaaataaaaccaggtctgctctctggctctgtcatctgggcacgttcggagccaaaagccttgaccttctgaaagttcactgaaaaatcatctcgtaaaaggcagattcattggacaaaagatttagaaatgtgtttaccgtgtatacatgggagccttcagaatacagacccacagatgcagggaaattgtccatttttatgcttaggttcaagaaagggtggactgcgtgtggaaagaagattatataacaaggccggacctgctgctaataggctgagtggggaacctagcaaggtctgtctgcctggattcttcttggcctttcctcctccgagaatggggcgggatgctctctggagtgagggtcttatgacctaaagtcaaacaaggaaggtcagataatttctttttttatttttaatgtttttttttagagatgggttctcactatgttgcccaggctggttttgaactcctgggctcaagcagtcctcccacttgggcctctcaaagtgctgggattacaagcataaaccgtgcatgcccagccagataatttctttatggctagtttttacacagaaaagtagagggaaagagtgatatttgtatgttttatggctggctttgggagaaagggatactggtttctatgtcctgccttggggaagagggattctagtttctgtggctggccttggggaagaatgggcctgagagacaagagggcaggagaaggtcagagagaaactttgcttctgaggctgctgctgaggccctcatttggggcattgttttctgagccccagcagcattgccagccaggcaggcatccgctgagtgtgtaaaaatagacctgtcagagctcagacacgggcacctgcaggcccctttaaaacccttgacagcttttatctttaagagaaagatttaagtaaaaaatgtaccatgctgcctcccccatctttccttccactggggaaactgaggccctctgagcccaggcaggcagccggtccccttgactcaccccagcatcttcccagacattcctaaacaggcagcaaagcagtgaatggcagtggcagcttcaggcaggacaggcagtaacagcgtgtgcttgtcacctgatctcagctgtttgttataaagtccgtcgttcagatttccagttttgccaactggttgactatttctatctctgtattataaatggaaaactgtacaatgagacttaattttccaacccatgtaaaagatcactgctggctcaggacagagcctgagaacccagagcttcccaaggcccagtcgatggtagaattgtaagctggtgtggacatcacggaggagggtgtacggcactcgggggcggatgaaaggaggtgcacagtgaggtctccatctcgcaggaggctttggaagatgcgtcggtgattgattgagtacatccgccgaatgctcgccaggtgccgggtcctgggctgtcctgagggtagtgctgtggaagagccaggccctgctgtccccacttggggacagtcagcacagccagtccagtgaatagggacacttgtgcctctgggagtgaaaaccacaagggaggagtttcctgcagaggggccccaggcccgagagatgaggataggatccccacggggatcacaggtgggccagtcagggaaatgtctaaaacagaaaccacgcggtcgtttcacataaggaactggttgaaatgctgttaactgagaatgggaaaaggagatactgaggtatcagaggtcataactgcaggagtgcctgcatcccccacaactaccaggggtgcaagcaaagggcagaggctgggattaatagaaacaggcagctccaaggaggccacccaggggtgggacccagccctccaaggcaggggtgctgcccactggtgcccatgtctcaggggccgtgatgaagctggaccagctgtcagggtcaagggcttggtgctggaagccacaggaaggggaacattccttctccttccttttcccactctcactcactgcgagccgagccctcacagaggagcaggcaaggcagaggtgtggtgtgcagggccagctcccacatcacagagcagagagtgaaggtggctctgaggccaccctgggccctgcacccgcagtcctgcttccctttgcagttgacaatgcacactccaatgcaccaatgcctgcttgttcacacctgtgacccgtgaggcacagagagcaaggggcaggtcccagggcaagggtgtccaggggcagcaaggcctggctgggcccagaggatctgacctccacagtgccagctgtgccctcagcccctggagtagaaaggtggatggtccacggggcctgctggctctaaaccctggggtccctttcctaaatcacttgccacagccacagcaccggccaagccaaggtcagtaggagaaaggagggagagacggtggggctgtgctagggaggccaggcccaggaggtcagtgtgaggaaggagccctggggggcagagaaaggagagggggcatgagggctgggcctcacctcccttcctgtagtgatgaggtcaggcctgctgaccagcaaatgctatgagcctgcaggtgaaaccatgtgtttgggagaacatgacttagctctaggcctcattcacactccacagctccagggtcttcctactgcccaataagcacaatcctgcagacatggtcagacctgttggtaacattgattggtaacattggcaactgattggtaatgttgatgcagattaccggtttttatactgtaattcagaccagctctaagtgatgtttggataggtatacgaaaggccagcagagagccttcgctggatgtttctcagtgagtagatggattgtgggagagggagagatgaatggatggatggatggatggatggatggatggatggatggatggatggtaggatggatggatggatggatggatgataggatggatggatgggtggatggatggtaggatggatggtaggatggatggatggtaggatggatggatggatggatggatggataggtggataggtggatagataggtggatggatgggcagctaaggtggtaggtgagtggatggatggatggatggatggatggatggatggatggatggataggtaagtggatgggtggatggatggataggtaagtggatgggtggatagatggataggtgtttgagtggatggataaatagatgtctgagtggatgaatgcattggtgggtggatgggtaggcagctgggtagatgtatgaaggagtgagggatgagtggtgggtggatggatagacgaatggatggataggtaggcggaggggtggatgggtaggtgaatgagtggatagatgggtggatgcatggatgcatggatggatggatgaacggatggatggatggatggataagtaggtggatgggcggatagataggtaggtggataggtggatggatgggcagataaggtggtaggtgggtcaatggatggatgggtgggtgagtggataggtggatggatggatgcatggatggatggatggatagatagataagtggatgggtggatagatggatagatgtctgagtggatggataaatagatgtctgagtggatgaatgcattggtgagtggatgggcagctgggtggatgggtagatggatgaagtcgggagggatgagtggtgggtggatggatagatgaatggatggataggcaggtggaggggtggatgggtaggtgaatgagtgggtagatgggtggatggatggatggatggatggatggatggataagtaagtgggtggatggatggatggatggatggatggatggatggataagtaaatggatgggtgcattggtgggtggatgagtgggcagctggatggatgggtagatgaatgaaggagagaggcatgggtggtaggtggatggatggatgaataaatggataggtaggtggatgggcagatgggtaggcggataagtaggtagatgggtaggtggatgagtaggtagatggatagatgggccactgattgattgagtggatggatggataaatcgattgatgggtgggtgcatggatgaaggagggaggggtggatgggtgggtgagtggatgagccactgattgattgggtagatggatgtatagatggattgatgatgagtgggtggatgaaggagggatggagggatggatggatggatgggtgggtaggtgaatacatggatggatgagccactgattgagtgggtggatgggtggatgaatagatgggtggaggatagataggtgggtgtatgggtgggtggatggattgatgcatggatggatgggctgcccattgagtaggtggatgagtggataaatgggtgggtgggtaggtgaatagatgaatagattgataaatagggggatgggtggattggtagatgggtagatggagggatacattgctgtgtggataggtgggtgaatggatgaaggagggagggatgggcaggtagatggatagattagtggatggatgggtggatgggctgacaaatggcttgttcccagactgtttgtccttgggtggagtcatgcaggtatctattgcagctgggcctgaactgatatctgaagagagaagtggagacagcgaccagacagatgaggatggagaacctggctcagaggcccaggcccaggcccagccctttggcagcaaagtaagtcatctccagccaccccctcctcagccacctcgattccatcccgcagctgggacgtcaggttctgatttcctgaaaaccttgatggcctctccacaactccactagtttctactgcatgagcaccaagaatctgctgccctttcccaggcctcagtagtctctgagatcattgggcaccaggcaggagcagtgcttccaccatcagaaacctcaaaagcaatctgtgtgatgggcaaagcctactgagtgtgtggccagagtctgggggcacacgggtgtagtgagtgcaggggactgctgtaggacaggcaggggtcctggagggctctcgagggtcctgagagcagctgcctttgcaactttcagagaagtggacccctcaggctctcctctaagaccttttctccttctgggttttgttttgttttgtttgtttttttttgccaaccatgagccttgtgtttctgttttcacgtattgtttaacttattttgggtgggcgagacaaacgaggtaacacctgggttttggggtgggaagcaagaaggggaagcagctggaagaaggggctgggtaggtgagcaggggttcagacttagatgcttggagagaaatgggccagtgacattcaacatgaaccaactctttgcggctgctgtgaggggaacgtcatcatctttcgtttgagaacatttgattcatgctatttatgaagttcccagaatgctctgcagtgcctggagtattccctacatgatagagcagtttaaaggatcaaaagaattataatgaaataggggtttagaactaaatgcaggctcttacatctaaagaacaaggaactatcaggagcttgcccacctctgtctcactcagccatcgtgccccggctatccgaagccccagggacccgcccctctcccagccctggaacagcttgcctgccccctaggcggggtccctggggcaagtgcaggggttcagctcagtgttccttcagctcagccaagtttctggagatgcagatcctgtatcctgggtgggatgggcaccgtgagcaccaaccagtcccccaaccagctccccctctgggcttggtcaggtttgttcctagtggagggggtggatgtgctgggagaggagcctgccccgcccctctgggggctgagtgtggggttggggaggtgcagggtatttggtcctctccctcaagctagccctgacttgagtcttgccctgtcttgtgcctgctaagaaaaagcgcctcctctccgtccacgacttcgacttcgagggagactcagatgactccactcagcctcaaggtcactccctgcacctgtcctcagtccctgaggccagggacagcccacaggtcagtgggtcctcgtgtctttcccctgcccctcccaggaacctgagtggcaggtgctcaggccccaggtgagggacagcactctggaagcagtgtctgatggccacacagtcccacctggctcccaaggcatgacagggaaggggaccgatgtgggaagacaggatccagagacctcacactcccccaggattagcatgtctggagatatgagcaggcagcttggagaagcagggggcgatgcagggccctgagactggacagatgagttggggcccagggatcggtgcttgggacagaaataaggcagaacccccgagactcaggagggcgggacagagaagggcatctgaggtggagtcaggcagggcctgctgtgatgcctacatctccgtcttactgggaggggaacatacactttattgcccaaactaggacagtcctgtgatgctggcagctattaatgatcacacctagacacagggcatgcgcaggggccatccaggtgaacaggacatgtggccgccttactcattagctgtgtggcctttgtccctggaacctcttcaagggctgattagtggtagttgctggttgattattatttgttagtatttatgttgcaattgaaattactcaagataatagattagataattaggagtaggattagaagggatgggataaaaaaagagagaaagtagagtttaatcaggcctttctgagtagatacggtaatggaggctgaaatttgggtttgcataaaggtctttggtatagacttttctagttaaattaggtttggaagtgaagccagattttggcttgtgaatagccttgagttgggggttgtatggtgaattgtggctgaataaaatcctagtatgttggagaagttaaatatctgtaatgggtattttagtttaaggttattagttatgagattaagctccattgctagcaagaagcctaaggtgtttacacctagggctgcgagcttcaggtggagtggtatggttgtttgggggaatgaagcaggaataatactgttggtgatgaggaatccagcaaagatgctgccgattgttagatgcttaattgagttaattaggaaggggttatttttgttaatagtaaccagagtcgtgtagcgaggttgtcctattagagcgaagaaaacaatatgggtactatagacagctgttaaggaggtggcaataagagtaatagaaagggctcaggcattgctgtatgatgggcttgcggtatccatgatgaggtctttggagtaaaagcctgtgaggaaaggcatgcctgtaagtgcaaggctgctgataacaagggaggaggaggtgaggggtagagtcttgaatagccctcctatttttcaggtgtcttgttcatccatcattgatgttatggatgatggaccctgaacctataaataatatagctttaaaaaggcgtgggtgcagatgtgaaggaatgctaggtgtggctgattaatgccaattgtgactattataaggcccagctgacttgagttggagaatgcgatgttttttgatatcattttgtgttagagcatagattgctgtgagtatggtagtaacagccgccagacagaatgtaaaggtttggattgatagattcttttctattgaagggtagaagcagatgagcaggaaaactccagctacaactatagtgctggagtggagcagggctgggactggggttgggccttcaaacacctgctatgactatagtgctggagcggagcagggctgagactggggttgggccttcaaacacctgctacaactatagtgctggagtggagcagggctgagactgggcttggaccttcaaacacctgctacaactatagtgctggagcggagcagggctgagactggggttgggccttcaaacacctgctacaactatagtgctggagtggagctgggctgagactggggttggaccttcaaacacctgctacaactatagtgctggagcggagcagggctgagactggggttgggccttcaaacacctgctacaactatagtgctggagcggagcagggctgagactggggttgggccttcaaacacctgctacaactatagtgctggagcggagcagggctgagactggggttgggccttcaaacacctgctacaactatagtgctggagtggagctgggctgagactggggttggaccttcaaacacctgctacaactatagtgctggagcggagcagggctgagactggggttgggccttcaaacacctgttacaactatagtgctggagtggagcagggctgagactgggcttggaccttcaaacacctgctacaactatagtgctggagcggagcagggctgagactggggttgggccttcaaacacctgctacaactatagtgctggagtggagctgggctgagactggggttgggccttcaaacacctgctacaactatagtgctggagcggagcagggctgagactgggcttggaccttgaaacacctgctacaactatagtgctggagtggagtagaactgaaactggggttgggccttcaaacacctgctgcaactatagtgctggagcggagcagggctgagactggggttgggccttgtatggtggatgggagtcagggatggaggccgaattgagctgactttcctgctgctgctaagagaaagctaattaatggaaggggttgggggtggggtctggaataaatatgtgttgacattctcagtgttggaggacaggaggaaccatgctatagctaaaataaagccaatatcaccgatgcggttgtactggactgcttgagggctgctgtattagcatctgctcggctgtaccatcagccgattagtaagaaagacatgagtcctacaccttctcatccaataaagagctgaaagaggcggtaaccagaattaatattgtgatgaggaaaataagtatttgaaaagttgattaatgtttgggtctgagtttatatatcatattgagaattctacaatagatcggataatgaatagtgctgctgggataaatattgtggagaagtggtctagtgtgaagcttagtgagggtttgagagtctggattgtcagtgtgagataatggcttcttggtctgtgtatataaacatcgttgtagggatgactgtaatgatgaaggcacatgcgatagatgtttttatgtaatttgggtatgaaccttttttgcaggggttggctaaggtaacagtaattggtaagattaaggggattagggctgttatagcagcggaataattcatgtttgctatttttatttggagttgcaccaatgtttttagttcccaagaccaacggtaactctaatcctttaaaagctgagaaagccatgttgttagacacaggggcatgagttagcagctcttgcatactttctccatagataagaagttgcaggcttctattgttaggtccacaatctaatgttttggttaaactatagctacagcatgcaaaccccataatttagggtttaaggataacaggaagatgggcgcaagatgtataagtattaacgtattttctcgtgtaaagaaggtttaatactgttaatatacaagtgtccctcgttgtgttgtgattagcatatatagggagtaaagggctgtaattagtatattaagtcctataagcataacagtgatagttgatcaggagaacgaggccatagtcacaaagagttctcctactagattactgatagcgggtaaagcaagattagtaagatttgctagaagtcatcaagaggctatttactgggagcagtgtttgaaggcctcgggtaagtaatatggttcggcctagggttaaaatagttactaatacaaggcctgtgctgattattagtgtcaggtgggttgtttgaagggctcatggcaggagtagtagtagagtgatctctaagtcgaacaggaggaacgtgatggctactaggtagaattttatggaaaaggagaggcaggctgaggctattgggtcaaatcctcattgacaggggctggatttttctatataaatattaagttgcgggagccgaaatgcgattattagtagtaatagggctagtaaggtgtcggttactagggccagtgtcaagttgattatttccgccctacaggatcatttcaaggatgctgtattagggttttcttagagggacagaactaatagaatatatatatatatatataaaggggagtttattaagtattaacttacacgatcacgagtcccacgataggctgtcttcaagctgaggagcagggagagccagtcggagtcccaaactgaagaacttggagtccgatgttcgagggcaggaaacatccagcacagaagaaagatgtaggctgggaggctaggcctgtcttgtcgcttcacgtttttctgtctgctttatattcactggcggctgattagatggtgcccacttgattaaggctgggtgtgccttccccagcccactgactccaatgttaatctcctttggcaacaccctcacagacacagccaggaacaatattgcatccctcgatccaatcaagttgacactcattactaatcatcatagatgctgtacctggaaggcatgagactcacaggcaggcagtgaaggtaactatgggcacagagccaggcccaggcccaggcccaaggccggcttcatagtgaacttctgaactccattcccagcatcccctgggcacaggcagtgctgagccagagctggggcggggctcggtccacccaggccggtctgaagacccctccaggaggagggggaagcagggtgggtcctggaagccagcagccaattggtttctgggccacaggtcctgctctaactggaggctgtcctaagtgcgcatttcctctggcctccaccccccactcacagtcaaactggaagggcgctgtggcatattgcttcttgaagccctcagtacctcctttccttggggacaatgacataacacagacacccctctgctggagggatgtccggattacagccaaggagctgccaggaagccccaacccacttttctgatcttcaaagattaaggtgtacatagttagtaacagtgcacccttctcccaaaaatattaacttccctgcccacgtcctcagagctttggtctctgggtgagtctgagcccctgaggctgtgtcaggagagttttgatccctttgtgtcatgcctggcccagggtgtcgttgggggccccaacattgcacagacacatgcaataggcagtcagtaggcaacaaataggcaatatatgctttaggcacagtctttgaaattaaacagaactgagtggcaggggccagcgcagatgggtgcctagtgctgggtcagtcaagtgcctggaaagcctcagggcttggattgaaagacccacattccaggcagcggcccctcctagtaaaccctgcagaggaggctgacagccccatgtgcttagtccctcacagatgagtcctgctcagagaaggcagcccctcacaaggctgagggcctggaggaggctgatactggggcctctgggtgccactcccatccggaagagcagccgaccagcatctcaccttccagacacggcgccctggctgagctctgcccgcctggaggctcccacaggatggccctggggactgctgctgcactcggtaggtgcccttggccagggtcttcctgatgggctcggcatgggggagcaggtcactgaggaacaaccccaccaccctgacctatccaacacacgggctgatttgaaaggccccttcctttggcgtgattgtccgggacgtgcagtcccagcaaacaccgtggacacctgccgtccccgggaccgggatgtgcgcttccctgtaactgtcagaacttccagcacaggaggtggccagcccacagctccctgcttccagcctggggtgggacatgcaggcctccctgaaatgactagaaccactggtcaaccggccaaccatcctggtctgggcaggatgggcatctgggcattgccactgctggcccacagtcagttcaagtctgttgatcaggagatctttaagcactgagaacctaaatctgcttggcttaactttgtcgtcagttttgctttgaaatgaaatccccaaagctctgtcttttctggtaccccaagggtgtatgtaccatgggtccgagagttcagatgtcccatcggaacaggagcaagtaagatcacagcagcagccagctttccccaagccacagcaagtggctgcgtgcgggaaagctgtctactctccagcttccctcttcgttgtattgaaggggccgtaatctcatgctgacggggaccttggaggctttgggaggaaggcagggctctactttcccccaaaaacaatgattaaatgaatctactttggccaagccacagggtgcagacctggagagcagttttatttcctctgtgatctcaagtcccctgagcacgtcgaccggaggcagtctgggggagaggccatcgtgctgggagagctgcctcagagtcaggcagttctgagtttggagcctcactctgccagtctgtttcactggttctcacacacgttctttttacacaccaacctctcaaacggggagtgtcttacagtgaatgtggtaagaaaggggtatgcttgagactcactggcagcactgtctctcaataatgcaacatccaatctgcaaagtctgagattcattgaggtatgctgtgctgttagaacaaatcgcttaacctctgtgcacctcagtttcctcattgtacaaaaggggttaacaacgtctaactcatcccattgtcatagggattaaatgagatggctgaacctgttgactacatagcaaattatcacaaacctaaaatgtggcttgaaacaacatgtttatgatcttatcatggaatctggtgttatttgcaatttgaaattgggaatcatattacatttactttgcaaacatgcaaagtatgtccactcataacccccacccacaatgccaggcaaggtcctcttttttcctgaagatctttgtgtgtggctgtggaatctgccccattcttattgtgactttggaacctcagccctgtaacatgaacatccttatgtcttcattttctttgagcctcatttttcttcattggactaaacacgtccatcagctttcaggttttcactgcaagtaattcaaacccactctcgctctgaagggtcgaatgtcatcaggaatgagcagctgcccctgcagtacttggccgatgtggacacctctgatgaggaaagcatccgggctcacgtgatggcctcccaccattccaagcggagaggccgggcgtcttctgagagtcaggtaacggtggctggaaagacttctgtcttgtcgtttctttgggtggagtctttttacctccacaccaagtcactttagagaaattacagcttttaatactttcaaactatgaaattgcacaagcctacttaatggagatacgtcatcacaatattttttgtggaagtgaattcacataacagaaaattaaccatcttagtatggccattccccaaaaattaaaaatcgagtttccataggatccaacaattccacttcttggtatacaccccaaaaaattgaagacagggactgaaaaagatatttgcaaccccgtatccatagcagcgttatttgtaataatcaaaaggtggaagtaacccaagcgtccattgacagatgaatggataaaaaaatgcaggatgtacgcaacatggaatattattcacccctaaaaaggaaagaaacgctgacacatgctagaccatggatgaacctggagaacactgtgctaagtgaaataaaccagtcactctggacacatgctatatggttccacttaacctgaggttcttagtcaaattaatagagacagaaactagaatagtagtcaccaggggctggggtcagggggatgggaattagtgttgaatgggcacagagtctctgctttgcatgatgaaaggagccctggagatggacggtggtgacagttatacaacaatgtgaatatacttaataccttaaaaatggataaaagggtaaatttttatatgtattttataattgaaaaaagtaatattttattgaatttaggagaaaataaataatctttagtctttcaaaaaatttatttttttttaatttttttttgagatggagtctccctctgtggcccaggctggagtgtaatggcgcaatctcggctcactgcaacctccacctcccgggttcaagtgattctccctcctcagcctcctgagtagctgggaatacaggcgtgcaccaccatgcctggctaatttttgtatttttagtagagacggggtttcaccttgttggccaggctagcctcaaactccaggcctcaggtgatccccccaccttggcctcccaaagtgctgacattacaagcgtgagccactgtgacgtacaattcagtgacagtacatttacagtgttgtgtaaccaccacctctctctaattccaaaacaacttcaccccccaaaaaaatcccatacccatgaagcagttacttcccagtctcccttgtccccggcctctgacaactaccagtcttccttctgtctcaatggatttgtctattctggacatttcatgtaaatggactcacagaaggacatctggccttttgtcacgagctcctttcaccgagcataatgcttctgaggtccatccatgctgtagcacatatgggtgcttcattcctttttatgaaaatatatattttatacttgatcaagtattatatattttacaagaggaggaaataatctgtcagctatgtgaaacgcttagcaggctgtattattattattttttttagaaagagtgttgctctgttacccaggctggagtttagtggagcaatctcggctcactgcaagctccgcctcctgggttcaagcgattctcctgcctccccttcctgagtagctgggatcacaggcgcccaccaccacgcccggctaatttttgtatttttagtagagatggggtttcaccatgctgaccagtctggtcttgaactcttgacctccagtaatctgcccacctcggcctcccaaagtgttgggattacaggtgtgagcctccatgcccagccccttagcaggctttatataggcattaagaaactctgctcataatacttaacacctgttaaattagtagaatcactcacattgtagacattaacttatgaaataattcatcacaagattcaagtgccctgagttccgcttgctgcatttaaatgatgattctgttgagtcagctgatttcaatttgagcaagttcatgttaccgggggaaaggcaatattgtttcttctgagaacatcatgaccactaggttctttaaggcaatgaaagacacaggctattaatgtctctgatagagccttgactccagcaacgtaatcacaggatgggggactgttctgtaactgatgactcttgaggcatgaaacccagagaaggggaagtggggctgctctgaatggagaccggaaccgcagtttcaccaaggctggtctcaggcacatcttctggagcctggatgaatgtagggccagctccttgggcatggtgatgcctggtacagagcccctcctccctcctcctgggagagctggggaagggaatgccctgtggagcttcccttcgggcctgtgggctctgggctgtcaggagggaggctaagtgaaagctgagccttgtcaggaaaggcctggaagcagcgaggacgcaggtggtgcacagctggggttctcaaggggcaggcgaggtgggcagggcacgcagaagctgctctgcagggtctagggcttctccagcgccctggcctttcggtgcacaggacgacctgagatggagcatcacccagctcttcagccacagggctgcagattcctctcccaaggccttggcctacactgtggcagtcactagaccagcactggctcacgagtgggcaacaggaagtatgcagtaggccctgggcttttccgagccctcattcagcaggaaatctgtcccgtggctgttctcacagggccaaaccttcgcgtgcatgataggtgaggggctcctccgacatcctgtcactttgcttctgcacccagagaaatgatctaccaaaaatgagcacctgaatttcaaaaagagacttccttagcatggcaatatggggaatcataggggtttgggttctaaaattgggctagtgtccacggggcagaagcatgcagtttctgaattcagcatctctctggactcagtgtcctcagctgactttttactgtagtgtcatctggaagcttcctcaaccctgggtggaagtttctcctgcaccaacttccttgagggcccacttagtctctgaaagaagcactcttgcccctgagcatagccgggcatgaaaggccctgacaaggcctgcgtgaagactgcttatggccgcgtcacccattggggcccacaattcctgaggcatggaactccttttgtgtaacagcaagcaaggccctgacacaaggaagtgtcctttcattcagatcagggagtgactggcttggcccctgcagtttctgtgtcccgagaggacttgaaacctgcaggtatgctgagctctggcggggactcagagcagacccagtgctgcagcagtcaagcctccaccacctgcattcgcaggtctagttctgcaacacggaacacacacaagtcgagcagagccacttcattactcacagtcaggcagcgaggtcccccaggctcagggaagctgcagggagggtggagtatcggctgcaagtatcctgtgtcatgcggcagctggggggtcccagaaagcattcctctctgagtcttataccctgggaaactgggatcactgggccaaaggatatccagttctagagcccaggttctagacagtccagacagttcttccttacatcaggaagtggctttcttgacacattctacagttattctgagaaaaggggaagagccaactcagccaagtccatccagggacctgtggatgcaggggacagtggaggactagggtggccaggatagagacctccccagtgtggccaggatagagacctcttgggtgaggccagcatagagacctctcagggtggccaggtagagacccatgggacatccttggctggctgagcatctcctagtctcctagcctgaagacaacaggatgaagaggagaatcaagttgtctattttcagtaaacctgtagtttagcaactttagtagcctttagtaaaatacatagcgtggtttccagccccactgaaaccaattatcctttatacctgcttggaattattctctagttcatgtttgtatatcctgcctgtggaattgtttctctttatttattcctattaacttgtatttactttgccaaccctaaataatgagattcagaaaatataaataagtattagtatatcaagtttatcagaacaaaagcttgacagtggccacccagaaacacagacttcaaacaaatggggcccaaagtggactagtgaagttttcacctatgtagaaattgtagcaggatcacaaccttgcaaaggaacagtgacctggggggcccttatctccaatcctgtttggtcttaattattcacagggaaaaaaaaagtagaagtttcagctgtgaaacatgtcctctcaagactcagaatttaaagttccaacagctttgtttgaattattcaatgtgacaacctcaactaatatttcacctagattgtttcccatgcatctttatatggaggaaattaagcagcagaaagaagctccaaatgcagcagcgatcctgtacttcagagaaaacccaggcagactcttagaggggcctttgtgaagtggctgtggtgggaccccaggaggaagcactctcaatctgcccatcaaccccaagactcccagccatgccctcagggcctgagctttctcaggaatcgtattttatcacagctcatctgaggggtcaggcagctgtgcattgcctgcctttgcatttgtattgacagtcacagctttcccgacgaggggtaaagacttcctgtagatattgttcaagcccagacaaggcccaagatggcacaagcatgtggtaggaaggaagtttctaaggggctgagatgggagacgggagaggaaacggccctggcacgcaccctccgccccctcactcccaagggccggccctggggccattcgtgtgtgctcgggctacagacactgacggtttcccataaaagtgtcaccagtgacatattttgttggtttgctttaatccctagctagtgtctgtattgcatttgtaaactctaaactttggtattgtcgcgagttgaaagctcaaggggttcctacctagtattctgtccgtacatatctaagtaatgtgataatcctgatgactggtgcccacacagggtcagatgcccacgtctgagtgatgctactcccaccagagcagttgttactgttggagaaatataatttttagaaaaacccgaaatcttttcattacccagaaaatctctccataagggtagcagaggaagaagacagatttattcttgaacaagcatcaaaccagaatatggcacgtgccccaggcaatccgctgagagattgcaaagacaggaaggcctctcagcccttctgcagcccggcaggcccggcccattccacacagttctcagcacaaaccatcaccagtccttaccaatgagaggagctgatggtgcctttgatcacagtgtacatcctcactctagcatcataaccgggagaccacttgtgttggctttaaccctaagaaaagcaaccttctcacacatctttaagatgggagctagttttgcaaactggagcaaggcgcccacccacgttagactcttcaccctctcctggggagtgggagctagagttatcttcaaggatgtttccatttcaaaaacacagttcccaggtggagttttgagactgcagagaggctttttagccattttaaagatttatatgtatttggaaaaagcagagaaagaagctctgaaagacaagggggcagtgggaagtctcttctctattttcttttcttttttttttttttttttttttgtcagagtcttgctcttgacacccaagctggagtgcaatggcatgatgtcagctcactgcaaactccacctcccagattcaagcgattctcctgcctcagcctcccgagtagctgggattacaggcatgagccaccacccctggctaatttttgtattttagtagagatggcgttcgccatgttggccaggctggtctcgaactcctgacctcaggtgatctgcctgagtccccaagcccactgcttccgggagacagaggatgtgtgctgagtgctgtctccccagggtattgatctctgcttctgcagatgctcaacgggaccagagggtgactcagttactagtggccgctcaaggcgtgggccgaggtctaactgaaatcctggtgttgacatttctcagccagtcatgttcttcgggcagatttgcccactcaaagcccttggtgctgtgatgattcaactaattaccgaccaaacaatacaaaagcatcttaacactccacagcaccatttccctcttttaaagccaggtgagccgtaaatgagataatggcaggaaagatgcatctgctgggtgaggaagaaaactagaaaattgatttatcatgtctcagtctgggagctaatagactttgggtgactcaagagtctggtgactcaagggatgaggaagttgtacttctggtccctttaggttgtcacctgaagtgccttgcctcctagcccactagtgaccccaggctcttgctagctaatgactgtgagtttgatcactgtggcgtaattaactgatgtcttcctgtgctgctcggtaccggcagtgacagtggctgtccacagtaatgacaccatcacaaccttccagattcagctccttgtcctgctggactcggctcctctcctccactttcaccctccccactctcccctctcttggttccgctccaagattttgcttggtgttccagaactcttggtgttagaaatgggtttcacaattaaccttcccaggccatgtcatgggtggtggccttagctctccttccgcttcttgggaatttggtgcttcagaggtggtgggtgccagtgtcttgctggttggagtgcactgggtcctctgcccactgtttctctccttctgctgcagatctttgagctgaataagcatatttcagctgtggaatgcctgctgacctacctggagaacacagttgtgcctcccttggccaaggtaacactgggggctgggcaaagagaaagggcccccacagctccttagttaaaggaggctgaagtgtgacatgggcttttgggagaagagtttcttgagattttgctgtttgtaaggttaagttctgtgtgtagttctcagagagccaggcagttcccaccacatagcctgagtgaagtcttctgtcccatccaggcctgccaccacctctcatgcccagagcttgaatgagagaatgcttggagggcacatacgtgtaacagccttcccaggggacataactggagatgggaggaaacttgcttggccctacagcctctgaagtctaggcaccaaagcagggtggaatctccttccgcaccatgtttgtgaatgtatcatcagcacagcttagtctgctatatgctgctatagcaaaataccacagactgggtaacttataatgagcagaaatgtatttggctcatggttctggagactgggaagtctaggaccaaggggtggcatctggtgagggccttcttgctgtgtcaccacatggcacatggtgacagagggcaggagagacagaaagcaagatggaactgaacttgcttttataacaaccaccctggaatgaataacaaattcattccttcaataatgatattaatccattcatgaaggcagagccctcacgacctaatcacctcttgaaggtcccacctctcaacactattgcactggggatcgagttcccaacacatgaactttaggggacacagtcaaaccacaacagcacaccgagacaacctgatggggagtaaataaaacaaaccatggcctgctgcaggagtgtgtgtgcatgtgtgtgtgtgtgcttttgtgtctgagagacaggcagacagacagccggggtgcagagggagtagggacccagtcctccattccagctgagtcacagccacacatctagcacctgggcacggagataaggagattcagcaaatatgattaagtattgagtttctttgagcacaaagtttgaggacagccttctgggccacacagactccataggaatggggtcagtgctccaaagtggagaatttaaagtttcacttatataggcagaaacagagaagtttctcagtgttacagcattttccatacaaggcctataattacattgtagcaattcactaggttacagcttactaattccgaggaagattgctttaacactccatgagtaggggtaatgatcttgagaggggtctcatctctggcaccactcggtctttcccaatcgtctacagagaaaagcagaaacagaagttgcatgccacttgactcaggccacatagccacattcctctagaggctcccaatcatttaaagttccaacagctttaagtttgaatgatttcactccgcaggacgctccttgtagcaccctaggtttgcagctgctcatttttcttggggccagggctccggagaaacagatctgggtgaagctcgggttgggggcatgagaccaagtgggaagcagagcacacaggccccaagttagaccccaagggctacccctgcacaggctctgaccccggccggagcggagagagactgaggcccagcccacatgccatgtgtccagcagggaccacagctgcctttatctataaggggatgagttactgtgctctgtgctttatgggttactagagccaggctgaccatgtgccataatttcatttaatcctgcagtacccctgcaaggtagacatttctttccctcacttatagatgaggaaactgaggcccaggctctcatgagtgagactcggcccatcactgaccggagagcaccagctgaaagcacagggaagttagggagagcattgcttcccacgggatgcctctggaagggcccctgcctgcactgagtcagagtggccccaacacaagctccagcgccccatcggaccccatgtcccatatccagccatccagcccccaggcccctgcggaacactgacccaggtctcactcgggcctcggctctgcctctcaggtggacactggagatctgtcactcacctccttcacccccttcctgcccaactccttccccaccctgctgacccctcagcaacactcgggacccgctgtcctgtagcctgcccggccctggctccagcccacccagaaacagattaaccttgtggagggaaagggcagccaccctcgctctggctcttgttggtacctcctggctttggccttttgctcatacaaatctcagcccagggactagtaaatcagaagtaacagactccacatgggacctgcactgcccatacactccccgcgaggggacactgctcgcggaatggccctctgggccatcaaggagctggacctgagaggcagcggggccctccaccttgaggggctggatctggggccaccagcatcctgtcaggggctctcagggcttttgcacctggaaatccctggcaaacaaggacgagttagtcaccctggctgtgtcccgccatgctggttcaggtccctgtcacacacgtatgttgtcatgtgttttccacacatacatgtgtatatgtgtgcatgtgttgtgtgtgtaggtttgtgtgtgtgtgtgtgaatttatttactggcttacaaagcgaagacaatccctgcctctcccaggcatctaccggcttccacccccataccccgtcgctctgctgcgtcctgcctgatgggcgctgggcttccatttctcacggggatcctgcagtttctcagccccatgcactctgggacgaagttcagctcatatcaggcccaatggcgtttacaggctgaacgtcattcccgatctttccaccgagggcctctgtgatttgggggctttgtcaggaaagtggagcctcacggaaaagcatactggctaaaacacgcggcttcttcatcgactcaatctaatcatccccttggtgttcgtctgtgagaccccaggcagccagccctgtcgatctgtctcaataggcttcgtccaaatagaaaattaaatgatcatgtgcaatatcctcggcttgatgggtgagggagggatcgatgcagcccaggggcgccgtgggctgtgagcaacttcctggtggaggcacctgctctccctccctcccagccctccagtgtcagtggaggtgatggctcccagaggaagggaccaaggacggcactaaagttccccaggtggcatctctgcgcggccctcgcctcacacttcaaagtcgacttcatggggccaggggagagccctcggaatgtgggatggatgagtgaacgagcaggtgcacgggcagacaagtgaatgggcgtcgtcttcctggccatcttgctaacttgtgtgacttcgtcacctgggaagagtcgggagacacagggagccactctgctcccagcaccggctcctgacgatggggaggtggccgtgaacaaagtcgacaaaaacgcgggccttgtggggtttgcattccatctgggagaggcaggaaacacgcaactgctggaacaccaagctttcccccaggagggcggggcctgcgtctgctgaagggaactcagcatagacagggtcacagggaaaaggccaatgatgtgttactgtgcacatgaacacgggggtcccccaaatgtgggactcgaagcagggacagacgactgaggtttacacccaaggcgacaggacggatgggtcttggggcttcctgaggggttacaggggtgacaaggtcacgggagggtgaggggaggaaagccttctggttatgcagataaaaatctctcgggtaaccaggagctgccctcgaagaatcggcagcagtccatgctggcggcgtcgctgtccgacgtgtcactgtcaggcatcagtgtccttttaaggccgctgagggggtctcagagaaagcctgtctgcctggtgttcagctcacccctatagctttcctccagggatgaaatccacccccaacacacacacaaaaagacaggttttcagagtgatcccgtctgcagcttctctgaataaacagctggaaataagtcccagaagtctattctggggtggtgtattttggtttccttcacaacccaacaagtggaacacaggtcaggaggtggaggaaggtacagaaaaataaatcaaggcagaaggtccctggggtgagggtgacatttcaaacaggacagtcagggcgcctcactgagcgtgggatttgcccaaagagctggcagaggtgccggggctgccgtgtggctgtctaaggtcaagtgttgcagcccctcctaaggtcccaaggagggagccgctgcaggagacagcccggccaagatgggcgaggcaggggcgggtgggcgcgcagaggctggagccggacgtagtggcagagtcagacagaacggagcctcccaggccatggtccaggctctgccttttactatgggggggcggggaggcttgagcagaagacagctggctgagggcacaggggttgctctggccatcctcctgagaacaggttgtggaggtgggggtgaggcagcagggccggctgggagaaggcggtggtcgaaccggagagcagcgaaggtggtgcaaggcagaccgatcccgggggcctcgcgtaggcagagccaacaggaatggatatctgggatgagagaaaaagaggggtcatgatgtctgcaaggttcttggcctaagcgagctttaaagggtgaagctgcctttaaaaatgtgagttttacagtgtgagtgacactttcaatctcatcgcctaccttagcaccatgttggctgtaagaggcaattgggataattttgtgtttttatcacataactctgccactttctcggagctggcacctaaaacccttcatgaaaggccagcgtccacaacagttaaagcctgcccttaaccctcctgcctcctgcccacagacaaggtggccagtggaactagaccctttaaggactttacagagattattgaactgagttcttataacttgcaggttggatactgctatcaccaccattttaaagctgagggaactgagatgcagaggggttgagtgacctgccgaaggtcacatggcctgatagggagccacaggtgaactcgcagtccagtggctgctgttatgtgatcaggagcagtgtgccccagaggagtgtcccacagcagctgctaaatgaatcgttggccagagcgtgggaagagcccagcccctgaagctggacccgaccaaggctgtctgtgtatttccctgagagagagtgggcagagatccatgactccacacccctctctcctcatccctagagtaaggacgtcagcctggaataaacaaatggcacccttaaacaaaagggatgagaagggagaaaaaaaatgtgggtcttagatagccaggggtggtggtcagctttccctgggaacccccagccctgcagaacctgctcctggagtctgggactgggccccagaggggcatgttggacaagctggcatggagaagggaggcagctgagctcagcaggaaccccaggtgtgctgggccctggcccatctcccagagccagccctggagctccatggctccagatggctagccgaatccaaatccactggcctgttctgtcagggtctaggtgctggagtgcgcacggaggccgatgtagaggaggaggccctgaggaggaagctggaggagctgaccagcaacgtcagtgaccaggagacctcgtccgaggaggaggaagccaaggacgaaaaggcagagcccaacagggacaaatcagttgggcctctcccccaggcggacccggaggtaagactatcccccagaggtctcagcaggaccctgcagaggtaggggcagggatggacagtcccagctggcagccaccctccccagggaggcagcacccacaggagcacaccaagggcccttgatggggtctgcagcgggtggccggctcctgaccaaccagctcccagggttcagagaggagagcaatatcgtggtgagtccccatctgggtgaaaccccacactccctcctgctgctggtcagcctccgtccttctctttcctaggtgggcacggctgcccatcaaaccaacagacaggaaaaaagcccccaggaccctggggaccccgtccagtacaacaggaccacagatgaggagctgtcagagctggaggacagagtggcagtgacggcctcagaagtccagcaggcagagagcgaggtagcccagaaggcacaggggagcactgagttccacaaacacagatggtgaccacacccaggccttgaacatctgccagctctaacatccgccagctcacactgagccctccccattggcccagcatgcacggctctgaaggccaggcatgaacctgggggtttctgggggactcacctaattcgccaccccctgagccctccaccccttccctttttcctgttcaacttggtgagggacaggcagggtttccaccaagaaaaaggtgctgaacacacaatccctgacccaggatgggggcctagaagcaggcctggaatttaggacagccccagacctcagcactggactctgtccggagggccatctgtgagtctgagttgtggctgcagagcttgaatctgggtgaggaacccatcaatagtgcacaaaggtcaaagggcagagccaaagcattcaggcctcccagggacagctgaggtgacttaggcactgctctgtcctccctggagacctacagagaggagagggggtgcctctcggactgtgaggacagccagcccccacggccctcctccacttcccttctcatcagcaggtgcctgtcactccctaaggacaaagggcacgtcccctagagctgttcaaggggagcgagtcaggctctggactttcccttcatgtattccttcttgctttgcaaataagctttaaatgcctagaatgtagcccacattgtgtaggccacggaagatctggtgcaaataccttagacgaagccccagccttcctggagcttgtttttagtggaaggagataaacagcaaacaaacaagatcatttgggttcatgaaaagtgtgattaagacaatcagtgaaggtgagcccctagagtgctcggggcagggcgattgagataaggcagtcaggagggatactaggaaagtaagccagcctggcaaatccagggggcaggaggccgggtggagggagcagcccgtgccaaggccctggggtggcagtgggcttggtgcctgcagggattagccgtgaaacccccacaccaggtcagagtgatgaggggagagtgtgaggagggtggacggcaaaggcccctgggggccactgcaaggatctgagtagggggtgatggggcctgcttctaatttccagaagctgcccccagctgctgtgggaggaggggcctaagacgggaggggtggaatgggggccaggcaaggatgatgccagtgggagtggccgactgctaggtgaagagtagccactactgtccttgcatgtcacggcccctcctccagcccctcatgggagccggactccctgagactcaagaaaatgcacccgtcctgcgttcctcctgcctggggtgacccataaggaacaccccccccttctcaacaaccacagaagataaatgccaaggggaccaccaacatgggcatggggctgtgatgccaatcttaagggaaaacacaagtaaaattggctccaggactgagctgggggcagctgctctttctgtccatgactttgaggcgggatctcgagcgtctgtctgacgggccttctgtctgctgtcctctcgcaggtttcagacattgaatccaggattgcagccctgagggccgcagggctcacggtgaagccctcgggaaagccccggaggaagtcaaacctcccggtgagtggggggcagtggtgagtggagacagtgctgagtgggggggcagtggtgagtggcggacagtggtgagtgggggacagtggtgagtggagggacagtggtgagtggggacagtggtgagtggggggacagtggtgagtggagggacagtggtgagtggggacagtggtgagtgggggacagtggtgagtggcggacagtggtgagtgggggacagtggtgagtgggcacagtagtgagtggggggacagtggtgagtggggacagtggtgagtggggggacagtggtgagtgggcacggtagtgagtggggggacagtggtgagtgggggcacagtggtgagtggagacagtggtgagttgggggacagtagtgagtggggggacagtggtgagtgggcacggtagtgagtggggagacagtggtgagtggggacagtggtgagtgggggtacagtggtgagtgggcacagtagtgagtagggggacagtggtgaatgggggacagtggtgagtgggggacagtggtgagtgggggcacagtggtgagttgggggacagtggtgagtgggcacagtagtgagtagggggacagtggtgaatgggggacagtggtgaatgggggacagtggtgagtgggggacagtggtgagtgggggcacagtggtgagttgggggacagtggtgagtgggcacggtagtgagtggggggacagtggtgagtgggggaacagtggtgagtgggggacagtagtgagtgggggacagtggtgagtggggacagtggtgagttgggggacagtggtgagtgggggcacggtagtgactggggcgacagtggtgagtggggggacagtggtgagtgggggacagtggtgagtgggggacagtggtgagtgggcacggtagtgagtggggggacagtggtgagtgggaggacagtggtgagtgggggacagtagtgagtgggggacagtggtgagtggggacagtggtgagtgggggcacggtagtgactggggcgacagtggtgagtggggggacagtggtgagtgggggacagtggtgagtgggggacagtggtgagtgggcacggtagtgagtggggggacagtggtgagtgggaggacagtggtgagtggggacagtggtgagtggggggacagtggtgagtgggcacggtagtgagtggggggacagtggtgagtgggaggacagtggtgagtggggacagtggtgagtgggaggacagtggtgagtggggacagtggtgagtggggggacagtggtgagtgggggacagtggtgagtgggggacagtggtgagtgggcacggtagtgagtggggggacagtggtgagtgggaggacagtggtgagtggggacagtggtgagtggggggacagtggtgagtgggcacggtggtgagtggggggacagtggtgagtgggcacggtggtgagtggaggggacagtggtgagtggggacagtggtgagtggggggacagtggtgagtggggggacagtgtgtggggggacagtggtgagttggggggacagtggtgagtggggacagtggtgagtggggacagtaatgagtcgggggacagtggtgagtgggcacagtagtgagtggggggacagtggtgagtggggacagtggtgagtggggggacagtggtgaatggggacagtagtgagtgggggaccgtggtgagtgggggcacagtggtgagtggggacagtggtgagtcgggggacagtggtgaatgggcacggtagtgagtggggggacagtagtgagtggggacagtggtgagtgggggggacagtggtgagtggggggacagtggtgagtggggggggacagttgttgagttgggggacactttagtgttgggggggacattgtttattgggggcatagtggtgtgtggttgtcagtgtgtggtggtggtcagtggtgattgggcactgtagtgagtggggggacagtggtgagtgggaggacagtggtgagtggggacagtggtgagtggggggacagtggtgagtgggcacggtggtgagtggggggacagtggtgagtgggcacggtggtgagtggaggggacagtggtgagtggggacagtggtgagtggggggacagtggtgagtggggggacagtgtgtggggggacagtggtgagttggggggacagtggtgagtggggacagtggtgagtggggacagtaatgagtcgggggacagtggtgagtgggcacagtagtgagtggggggacagtggtgagtggggacagtggtgagtggggggacagtggtgaatggggacagtagtgagtgggggaccgtggtgagtgggggcacagtggtgagtggggacagtgggtggagggggcactattggtaggggggacaattattgggggggggcactaattgtgaggggggaccagtgttgagtgggggaatagttatgagtggggacagtggtgagtggggggacagtggtgagtggagggcacagtggtgagtggggacagtggtgagtggggacagtggtgagtggggcacagtggtgagtgaggggaacacagcaacccagttgagttggtgccccctgaggcctccccacagcacacacgccaccgtgggcctgacagcaggatcctgggccccccacctcccttcccgtgaacatccggcctgagtttcctcatagccagttagccagctgtgcctttgttggggttcatttttgtttattatttgttgtttctaccctaaaaaggctctttatgaggggactctgagcctctgctctgaggatctgaaacacacacaccctgacagtgtaaaatccaaaaggagccgcctgaatcatgttgcctcatgtggaaatccttagtccgccgccacgtgaagatggatgtgactagaacggagggcgcgggaggctcacatcagaggagctgctcacgtcaggccaacatcctcctctcctgatcccattcaggaatcttcagacaaaaccatcctgattaggacatttggcaaaagaatgaaagatgaccttaggagagtcccagatagggtcatgacggaaaatacaggatgcccagttagctctaaatttcagatcaacaactaataatctagtataagtataccccatgcaacatttaggacttacactaaaaaaattagctgtcgatcttgtgaacacaaaatatctgagacaggtctcagtcaatttggaaagtttattttgccaaagttaaggacacacccatgacacagcctcagaaagtcctaaaacttgtgcccgaggtggttaggggtacaatttgcttttatacatcttagggggacatgagacatcaatcagtaggtgtaagatgtaccttggttcagtccagtaaggtgggacaacccttaagtgggggcttcctggttgtagtagataagagacaaaaggttgcattcttttgagttcttgatcagccttccactgaacacacaatttagtctggctcagtgagtctgcatttttacagaagcgataggggaaaggaagcaatcagctatgcaggtgagcctcagggggatgactgtgaatagaatgggaggcagctttgccctaagcagttcccagcttgactttttcctttagcttggtgattgtggagtctcaagatttgttttcttttcacaatctgaaattcaaagttccctgggtatcctgtattttcatttgcacactttggcgccctagtcccagagtcctggagcggcatactgggggtggctgtgcagtcccagcatccccaacccagcatgtatagagagcatccatccttacatccagctgacccatgcccatgctcctccctgtggctggaggttcaacaataacataagtctcttctttgccctccagatatttctccctcgagtggctgggaaacttggcaagagaccagaggacccaaatgcagacccttcaagtgaggccaaggtatgtgttactccattcaagccccagacacccgacaaaggtggaagactgcacccctttccagcagtgtggcaagtccacggggtggcagagatgcaatgtcctcacagctacccacacagcaatgcccacacagctgccacaacaccgtggcaactcttgtgagttggcttcctccgtggcacacacctgagctggatttgtgtagatgcatttgttgaaaatccaagaaagcccagtaggggagcgggaaagtgagacgggaaaggaaggaggcaagcatctgacatgaagcaaacccacacaggctgactgtggctcagtcctcctgggggctctggagaccacgcagatcacaccccacagttaattccgcgtaggagcaaggccacccacacccgtcagtcctgagtaagggccaggccctgggccacacacattcccaggcacttctgcccttccctgaacaggcacagcgggcccgtggcctggggacttcttccatctgggagacataggcgctggctgccagaggtgaaaacactcaggagccagtgtgctcgaaaatggcacagggactcggggggtgtgagcgggacccacagatgcagtgcacagagggcagagccagcctgggagggaggagctccccgtgtttaggtggagtggttaggagtaggagcagtgcacagagggcagagccagcctgggagggaggagctccccgtgttcaggtggagtggttaggagtaggagcagtgcacagagggcagagccagcctgggagggaggagctccccgtgttcaggtggagtggttaggagtaggagcagtgcacagagggcagagccagcctgggagggaggagctccccgtgttcaggtggagtggttaggagtaggagcagtgcacagagggcagagccagcctgggagggagttgctccccgtgttcaggtggagtggttaggagtaggagcagtgcacagagggcagagccagcctgggagggaggagctccccgtgtttaggtggagtggttaggagtaggagcagtgcacagagggcagagccagcctgggagggagttgctccccgtgttcaggtggagtggttaggggtaggagcagtgcacagagggcagagccagcctgggagggagttgctccccgtgttcaggtggagtggttaggggtaggatgagaggtaccatggccagcgccccaggaggaatgggctttagcttcaggccttacctgcagcccagcgcagcagggagcctcaaggaacatctagccactcctcttccaaccccggcagctcctcacagtgacacgcgatgttttcaaaagtccatctttccacaggatgtttacagcacccagcgggtaggcagtgctatttattaaccctgttgtactgatgaacaaaccagccggctcagggcagggggtgagcttgatcaagatcacagacaggaagtgacagcggggtctcagcccaggccatgcctgacacccacactcttctctggtgggggcgcttccacctttgtccctggaagcccagcctgacagcttctgcagtgcctctggcagccgcccacaaacccagccaggcaaaatcccagggtgccagacaccaggagaaatttccaggggaatttggccatttggctgtctcttcacttccctgaaaagccaaacagagaatggatttcttatcacactgtagcaaggcaatcaactggaaaagagacaggaggagaagtgtgaggaccaacagtcacagggacccaggaatcgtgttagccacaagtgatcttccagtatccctgtaaagagagctacaggcccattttacagaggaggagaccgaggttcagagagggtaagaagtgaattagccgggcgcagtggctcacacctgtaatcccagcactttgggaggccgaggtgggcggatcacaagatcaggagatcgagaccattctggctaacacggtgaaaccctgtctctactaaaaatacagaaaaacaaaattaaattagccgggcgtggtggcgggcgcctgtaggcccagctactcaggagactgaggcgagagaatggcataaacccgggaggcggagcttgcagtgagccgcgatcgcaccactgcactccagcctgggtgacagagcgagactccatctcaaacaaaaaaagaagtgaattaattgtccatgtcacacagtggtaagggggagtgctgggatttaaaccagacctgcagggcagaaacttgtactctttctgccataccacccaaatgtggcagcttccccaaagctgagcatctcttatttcaggcatttcatgcttaatttattgaaaatgtccattctcatattgctaaaagttcaaatattgctagagagcagaaaatagtggccatggttaattagaagctggaagaacaataagaaatccaaaattagttgacaattcctaaacgtcacaacttgatgaagcctggagacactctgtttcttctaggcaatggctgtgccctatcttctgagaagaaagttcagtaattccctgaaaagtcaaggtaagagccctctgctcccccacccccatgggcctgggaaatgagcttcggggaggaaaatgaccagtcgcagctctgtgtgtttcttcattatctgtgggacatatctcatgtcctgactcccaaaaaacattcccagtgccgctcgggccaccctcaggacccagcaagttggtgttctggacagctggaacttgctgctttaagcgtgcaaagggggccctggtggcagcggtggtggtggtagtggtttccatggttttctacataaattgtcctaacgtggtacacagttcctggccttctagaaagtacggctcatcatttagccttccttgaaggcttggtggtgacaaggacattagctttgtcctggacgaacgggatgtgaggcctccccagcacgtggccgggctcttggggtatctgtgtgctcatctcattcactcaccttgtgacccaaccactgctcaccagaggctggtagctcctccccccattcagagtcccgtccctctgctgtcgagctgtttcaggcccccagacattgttggactgatctcctgttgtccctgtcttctgagctttgccctcacacacaccattgttcaaactctgccacagctgcagtccttgcagacagtgtgtgtccctcctctgctcacaagcaatccttggctcccaactgcctgcagaatgaagtgggatttcttagcatagccctgcagactttggccatttgtcacacactggagccagcctgccccctactacacccgcccaaggatgcacttccttcccgtgcgtaggacaacgcacagcggacgctggtttcagagcgcaccaagcaggcacttgcctccacgcctgggtgtgccccctccctgcccatctctgtcctgtgaagtcctccagggccaagtatgaagcctctcccccggggctctccaccgcctccctgcaacacctggcacatcaatccctctttccagccagctcactccttgatcagtcagccaccccacctccatgccagctcgctctttgcatgccctgagctcccagcacacattctggtcaatcctgggatacagctggtgcccagggccctttggggctaatcccagattcagggtcaccagccaggagggcaactttgccagagatgacccactaaggagctgccagcaggggctcctggagagccatgtgctggctctgcggggagtttcctgcacatctcgtgggctgaaatccaggtggagattcttgttttgttttattttgttgagacagggtctcactctgtcgcccaggctggagtgcaatggcgtgatctcagctcactgcaccccccgcttcctgggttcaagtgattctcctgcctctgcctcctgagtagctgggattacaggtgcctgccaccatgctaggctaattttgtatctttagtagagacgggttttcaccacgttggccaggctggtctcgaactcctgacgtcagatgatccatccacctcggcctcccaaagtgctgggattacaggcgtgagccaccgtgcccggccaagagattcatgtttgtagcaggaggacaaggggcgattccttgtgtcctctgtatgactggttttgtgaagggtagactctgtcctatccagagacctcactcacctccagtccaaagccagaatagctcacccccggccccctgaagctcacaggaattttggggtctgaaaggcaaagctgaggcctgacccttcacatttctccccgccatcctcaccagcatctgccaagcgtggccacgggagcttttcactgtctgcagaggccagccccgcacactggcaggtccttgggcctccaatcccggggtctgtggggcctcatgcgacttcactgctcaggagtcgtgatccctcgagttaggtgattccctccacagaggttagtcctggagcggggacggagggccggcaggccaggccacatgaccctgcagagaggggaacagcacaacaggagcacgctgctgagccaactcccagaaaaggaaaaggacaaagtcctggcctgtagcatgtgccaggttctgtggcgtaaatgctcccaccctggctgatcgcaagctcccagctgatgtcaccgagcgtggggtcaggaagaggtgcccacagtcagctctcaggagccctgacaactggctccagtcaggcaggccacagaagacatgcaaaagtgaagaagggcgggtgcctgcaccagccacctggacaccaacactcaactaggatgtgaggccagatgcccccagctacacagccatggccccaggaggtgccctctgctgagggtcagcatctgagaccccttgggctgttgccgtgtctcacaaaggaaaggcaaggaagccaggcatggtggctcacacctataattccagcatttcaggaggccaaggcgggcggatcacttgaagtcaggagttcgagaccagcctggccaacatggtgaaaccccatctctactaaaaaatacaaaaattagccaggcatggtggtgtgaacctgtagtcccagctacttgggaggctgaggcagaagaatcacttgaacccgaggcagaggttgcagttaagccaagattgcgccacagcactccagcctgggtgacagagcaagactttgtctcaaaaaaaaaaaaaagaaagaacaaaaaagaaaagaaagtcaaggaaatgcgaagaccacacaccagtgcagtgtgatgggcctttctgctgcttcattagtgtgaggatttccagggccacagtgaggaagaatgttaatgccagtgccagagcaaaggagaaagaagttggcaaaactgttgatttgcatgacagctgaaatgtaaatactttttaaaaaatatgtgatgtggaagcttcttaaaaggggatatgtccatttttttctaccttttaaatttctgaggaggccaaggcacttgtttgggctaagtatgtgattgataaagcaccatccctcttcctgttttccccaaaggtaaagatgatgattcttttgatcggaaatcagtgtaccgaggctcgctgacacagagaaaccccaacgcgaggaaaggaatggccagccacaccttcgcggtaaagttttctctcattctctgaggagtttttaaagttcagtgacccgtcagatttatgtattaaaattaagtcttcagagcaaagaaaatggagataaacaaaacaaagattcagacctgagaatcaaagcaaaaagtaaagtaaaatctttgccaacgagggcttgaaaatctaaatactttgaaattagaataatatcttgtgttttagagctttaaattttcaaatatctgctgtccacacaccccattggaggaggacctgtgtcactaacccaaatttgtagctgagaaaacagaggcagagagaggttaagtaaaaaaccccaagagagttcacctaatattgtgaagaaagcaaacccagggtttcactaacttgtccatgtgtgtatgtgtgtggctgcgttcacccctgtgtgtgtgtgtactgtgtgcatgcctgtgtgtttgtgcacacccatgtgtatgtacctgcatacacacccaagtgtgtgtgttaccacaacgaaagcgcagatttattgaaaagaaagtgcactccacagagtgggagcaggctagagccagtggctcaggagcctggttacagcattttctggagtttaagtgccctccagagttttcccattggttacttggttatactctatgcagatgaaggagtggccccaaccaatgtgatcagtcgcaggaggcaaccaatcagaggctgaagggaagttacaaagttacacatgaagacttggccgatgaccagtctggttggttgcgggaggggaccaatccgaggtactttccattttcatctgagatgcagtggaaagggggtatagcaaagggagtagctgctgaaccttttgttcctcaggcatggagaggtggggttttcattttgattcagttctaggaagtcagcacgaattggccttaggttccctgcctccagaccctattctcttgcctcacatgcatgtgtgcacaaacgtgtaatctaaatttgtgtctacagatgtgcacatccatgtacacacctgtgtatttgtatgtgcatgcccatgtgtgtctgtgttacatgcctgtgtatgtgtgtgcttatatgtgcatgtgtgtttgtactttacagaaacctgtggtggcccaccagtcctaacgggacaggacagagagacagagcagccctgcactgttttccctccaccacagccatcctgtccctcattggctctgtgctttccactatacacagtcaccgtcccaatgagaaacaagaaggagcaccctccacatggactcccacctgcaagtggacagcgacattcagtcctgcactgctcacctgggtttactgatgactcctggctgccccaccatcctctctgatctgtgagaaacagctaagctgctgtgacttccctttaggacaatgttgtgtaaatctttgaaggacacaccgaagacctttatactgtgatcttttacccctttcactcttggctttcttatgttgctttcatgaatggaatggaaaaaagatgactcagttaaggcaccagccatatgtgtattcttgatggtctatatcggggtgtgagcagatgtttgcgtatttcttgtgggtgtgactggatattagacatccggacaagtgactgaactaatgatctgctgaataatgaaggaggaatagacaccccagtccccaccctacgtgcacccgctctgcaagttcccatgtgatctgtagaccaggggaaattacactgcggtcaagggcagagcctgcacatgacagcaagtgagcatttgatagatgctcagatgctagtgcagagagcctgctgggagacgaagagacagcaggcagagctccagatgggcaaggaagaggcttggttctagcctggctctgcccctcactgcagtggatccagtggggcagaggacagagggtcacaaccaatgagggatgtctgccaaggatgggggtgcagaggccacaggagtcagcttgccactcgcccattggttacatagatgatctctcagacaggctgggactcagagttatttcctagtatcggtgtgccccatccagttttaagtggagccctccaagactctccagagctgcctttgaacatcctaacagtaatcacatctcaccctccctgaggttcactttagacaggacccaatggctgcactgcctttgtcagagggggtgctgagaggagtggcttcttttagaatcaaacagtagagacaagagtcaagccttgtgtcttcaagcattgaccaagttaagtgtttccttccctctctcaataagacacttccaggagctttccaatctctcacttaaaactaaggtttgaatctcaaagtgttgctgggaggctgatactcctgcaacttcaggagacctgtgagcacacattagcagctgtttctctgactccttgtggcatcagataaaaacgtgggagtttttccatataattcccagccttacttataaattctattctttgaaaaaattattcaggctaggtaaggtggctcatacctataatcccagccctttgagaggccaaggtgggagaattgcttgaggccaggagtttgagacctcctgggcaacatagtgagatcccatctctacaaaaaacaaaacaaaaaaattacccaagcatgatggtatatgcctgtagtcgtacctacttacttaggaggctgaggcaggaggatcacttgagccctggaggttggggctgcagtgagccatgatcgcatcactatactcgagcctgggcaacagagtgagaccttgtctcttaaaaaaattaataataaataaatgaaaataattcttcaga

SEQ ID NO: 594 - DNA, 25255 bp, Homo sapiens
cctacccgcgcgcaggccaagttgctgaatcaatggagccctccccaacccgggcgttccccagcgaggcttccttcccatcctcctgaccaccggggcttttcgtgagctcgtctctgatctcgcgcaagagtgacacacaggtgttcaaagacgcttctggggagtgagggaagcggtttacgagtgacttggctggagcctcaggggcgggcactggcacggaacacaccctgaggccagccctggctgcccaggcggagctgcctcttctcccgcgggttggtggacccgctcagtacggagttggggaagctctttcacttcggaggattgctcaacaaccatgctgggcatctggaccctcctacctctggtgagccctctcctgcccgggtggaggcttaccccgtcttagtcccggggataggcaaagtggggcgggcgcgggacgcgtgcgggattgcggcggcagcggcgcacgcgggcacctgggagcggcgggctgctgcgggaggcgttggagactggctcccgggggctgttaggaccttccctcaggcccgggtgctcagaacgctggaggacttgcttttcttgggccttgatgcgaagtgctgaccccgctgggcaggcggggcagctccggcgctcctcggagaccactgcgctccacgttgaggtgggcgtggggtgcggacaggaattgaagcggaagtctgggaagctttagggtcgctggagggggaccccggttggagagaggagcggaactcctggacaagccctgacaagccaagccaaaggtccgctccggcgcgggtgggtgagtgcgcgccgccccgcgggggcggggagagagcctgcagccttcagaacagatattgctcattttctggcagttctcagacgtaggaaataagtcagcaccgaagcagtggttaagccggagggctcggaagaacggcaccttttctttctcgaaaaagttatatgggggctgaatgagcttctggaggcttgtttaccgttttttattgtcacacagaaaaagaaactgccttgtctcccttccgggaattctctctttaagactgtaagtcgctgcctgagtggtttcattttgttttgtttttctgcccttctctttcttcttttgccctttcttagcttgcactcccatggtgatttctgcttggtctcctgctggggttggtggtactcgttcccaccgcacagaacccggcgcctattattggccaagaaacttgagcagcctgttttgaaaagtccctcgctcagaaatgccagcttgcagatggctaatcaaagagacgtggatccaggaggctcatttgagtaccggagcctctgagagtccatggatttttattttattgggccccaacaaagtgccaggcatagcgagagaagtgtttacaaatgtgatctccgcggattctcacgagagccatgtagtggggaagataaccacatccccattttacagatggcgaaatgaggttcagagagcttcagtaattcagccaagatcacacagctagtaaatgggagatatgggattgaactcagatctaattccaaaactcaggctgttcgctgattgcatctgatatccagattacaccaagaggctgagatgtctgggtccattttatgattagaaaaaaaaatcctgttcctttcagaaatagtgtgcactatttgggattctttagaaacttccttggagaaaattaatgattcaagattgagaaaacatttatacaacctcaggccacactcttctctctcttgttattaaccattgcaccactgcaatgttggctgctttgaaaatctcatagtttttggacagcagtattagtaaagtgtaagaaaattgtcaaagcttggagctatgcttgttgaacttttgtaccaatagcacctttaccagaggctgcgtgtttaaagcccgaagaaaactttgcttttctgaaagaatacacacacacacgcatatgtaaatattcatacatttatgtatatatacatattataatacctataagttaggtataacttatatttgtatatgatatatggcctaggaaattaaggcttattaaataaaatttataaatgcagatgagtcaaatacaaagatcagacataactctatcacctaagtaatcattgtttacgttttgcagtttatcttccatttctcccctctaatatgactcttttaaatttagttacacagaaattggttttgcgctcacgacatgcctaacatcaggcctttatccttaaagaagtttcaacactcttgtgtcacctcatgtgtctacagaaaatgtttgcttttatgccttcacggttatgttttcttagtagtagcaataaataaaatagatgcaaagtgctaattacttggaatacagaagcaaattttaattctattaatgggctggacatagatgggtggggagctgttttctgcttttcccctcttcccctagtcctctgactctggtgataactatagtcaacaagtatccccatccttaaccccttttgcttctctttctctttccttctctcaaccttcctggtgttagttttctctttcctatttctgagtgtttttactccgacacttacaataaaaaagtttgaaatcccaaaaagttgacaaatttctaaaggagacagaaaaagagtcaaacttactttacaaattaatttgagaaatagctgtgggttgcattttttttttttattgtgcatgaccctgttattggccaagaaacttgagcagcctgttttggaaagtccctcgctcagaaatgccagcttgctaattgaagggatgtggatccatgaggctcatttgaattccgaagcctctaagagtccatggatttttattttattgggccccaacaggttttgtcttgcattatttaggacattggccaggcaatcactggacagccagtttgctctcctttacattttgtagaatggttatcttatggtcaaaggaaagggagagggcctttggaaaataaagctgtgtatttacaagcagtcatacagaatagttttgtggggaaaataaagaacagttatttaatttgtaatttaatcatttttcttaaaccaacccaaagagcataaaatggaatatttatttatttttgtagcttaatttgtaatttaataatttttcttaagccaacctaacgaacatattgggctgtttattttcatttttaatgggccatatttacatcacaaaggacttgagaagtcttacaaatacaataaaatgataaaatatgaattaagacattagcaaccaggatggaaaaacacaaatttgtaaatgatggccaggtttgcaagcaaaaattaaattgataaatggcagcacccccactaccagctatagttagactgatgaaaaatcctctaatgttcatgcctgaaatacagttaccacccttagcagcaaattagaggcaaagaagttctggaatttggacgttgtctctgagtaagctctttgagacactggacaagtaatttccttctgaatactcttatactgacacataggagaagtgtcagtgtttcaaaggaatctctttgaaggctactacattgctttaggggtgccagattaccagagtaaactgccagtttgagagaataactgtttcttaagagatggtctgaaacctaagtaaggaaatccccccacttgaaagcccctaggaagttaattgcttttggcaaattatcttgggccccaaaagtcccttgatgagcacatgttttgtaataggtactaaagactatttacttatgatgaaaaataaaataacacaatttaaaacttgaaattgataaaaagcaacttgaaaccaaatttaggacagtgaacccatccctttcttatttttaaataggtaaatatagaaaaaatgaccacatgatgtgaaacaaaaagcaaatatttaaaaactacatttatactttatctcaccacactaatgtaaagaattttgattttacttataaattcttagccttgtctacacatatacataattgcatgtttaatttgagctatatatagtctgttttttgttcctttgcatgttacacaaacctttttctatttctacataatttttatctcatattttttattggatacattatagagagagcatttattaaatgagctgggattactataatttttattatttattttttaatttattacttatttttataatttactattgaaaaaaagcatttcttaaatgtactgggatacatatatatatatgactttttcttgttactaaaaaattactcatagaacttacatattaaaattttaggacttgtgatgaaaaataataaaataattcaaaacgataaaaagcaacataattttatatgttgtaccttgtacttccttataaggtacaacactacaatagccttagtgtgtagttttctttttgctatgtatgtatatatatattcataaaagtggaaaaataacatttaataaatcctctttattttctggaaaatccttgctttaaaaaaagtctttagctttttatatagttctacttctaacaccaattaaatatcttcaattcagtctcaagcaggaacaaatcttcagtccacttgcctacctttactgtctttgaagtgacagtgtgagtagtaaagcccaaatcagagagaaattgacttttgtaagattggtaacttcaccttccccggaaggaaatgaggtggttcttccctttgatcacaactgctttcttgatttgaaataaactgttgtacagcccagtcaccccatctttagacatttagaaatggcaatcatagttatataggacaactagcctgagtcccactaagtagaaatgatagtgaatttagtataagattatacctttaggctgggcaggtgactcacacctgtcacccagcacttcaggaggccaaggtgggtggatcatggatcacttgagattaggagtttgagaccagcctggccaacatggcaaaaacccaactctactgaaaatacacaaattagctgggtgtggtggcgtgcctgttatctcagctactcgggaggtcgcggcaggagaatcactggaacctgggaggtggaagttgcagtgagccaagatcatgccactgcactccaggctgggcgacagagtgagactccgtctacaaagaaaacaaagaaacaaaaaatcatacctttagagcaaggccagccttgtgaattagcaaatctgactacaaattcaatcagcagatgtactcagcccagcaaagtgagcaagcttactataggttgtgttaaggcatggactgggataaactggcaaaattagagtaaatttgacaatttgacattggattcattaatgatagcctgtccttcaatgaagtcaggcagcattgtgtttctattcacctctgtgttttgtgaggctataaaaatataagatatgagaaatgtgaatactttttatttgtgagggcagatatcttgaaaaagagagcgagaggaagtcagagtatgcgggtgaagactcttgtttttttgctgaggatttagctttggtttttagccattctcacagagatcattggtcctaattaactggttgttgttgttttttttcatgtgaatgtctgtaaggtttcaggcttgattttaaaaattgggcctatactcacagaaagacaaatactgcatgatctcgtttatatgtggaatctaaaagttttgaatccataaaagtagagagtagaatagtggttaccagaggctagttgggggcaaagttgggggatttagggagatattggtcaaaggatacaaaatttcagttaggaggaataagttcaagagatctagtgtacaacttgatgtctatagctaataacaatgtattgtatacttgaaaattactaagagtagattttaagtgttctcgccacacacacacaaaagaaaatgataagtatgtgaaggaatgcccaatgtaattagctcgatttagctaattatcttccaaaatatgtacataattatcttccaaaatatgtacataattcaagacatcatgttatataccataaatatatataatttttttatttgtcgaataaaaataatacaaaaaaaccctgggcctatactgcccacaggtagtggccacaggcagagctggtcccaagcccctccctctctctgtagtcccttatcccaggttgctttattcttgtatgacccacgtggcccctctgggcttgtaagggctctggggctgtattttaggactctatagcccttacattacccatttcctctaccaaaggtcatttctcttatcttcaagcttatttttggaagggtcattatttcttcatgagaagtcaaattctgatttgcaagtgctgaacacagatgccattagtctataaaactcttatattctcacatgtaaatgtagtaacctgctaacctcagattctgcttcctctaacctagttgccctgcaactgtgatgaacctcaaaatcaccaagggtacttccccattctcagagatcctgattccttaggtctatgtaggggccttagcactttttattaaataatgcatcactacaggattctgatgtctgtcggggtcttgagaactatttttctgactctagcactaaactcaaaatgtaatttcagatggaatttcctaggctcattcattttattttatttatggcttggccagtcatggatctaatcagtaacttgcaactgttgcttcaactacctctgtcctggactttccagagattggctttaagaaagaaagaggacatccctgggataagattaccatgtgtatttttatgtacagattttgaaaaacatacaaatgaatgggatctttgcttatctcttccatgtagaaaaatttattttacttctatttcaggttttcaataatgtagtaggacaagatgacatcactatatccctgttttttacacagatatattagagatgcattatcttattggaaattttaaactattcaataataaactattagtcttttagaatttctttttcctcaagtgttgataagtaactgaaagtctacaagcagacaagcagaattagtcggtggaacttcatttcttgctccatttttgtcctcagcagtagagggtggtgagatttcaacccagcctagcaggaccaataagtctggaaagaagtagctctagttcatattggcacctgctaattctagttctgaagaccatgggaaatctcttgcctatttagctcagtgatcatccaagatgggaaattcttgggctcagctgtgagggatcccaagtttatatgtaacactaatgtctcacaaatcaagaatccaagagaatcaagagactatagttcattccttatattaaattcttaggactgccaactgggtggctacagttttgggggctagaagtctgatatcaaggtgccaactggactggttccttctgaggaccacgagggcaggatctgttcaggcttgtagatggccttcttttccatgtgtcttcacattatcttcctctgtttgtatgtgtgtccaaatttcctcttctttttttttaatttagaaatttatactgtctacaagctttatatagctttagttaaaaaaaagcaaaaaaaaaaaaaaatcaaaacaaaaacagtgaagccaagacactcttccaaagtctggacccttccggccttccaaatacaagagctctggaagttgtatataccaaatttcctcttcttaaaatgtcaccagtcacattggattaaggcttaccctattaacaccattttaacttaatcacctctgtaaagaccctatctcctgatacagtcacattcggatgctcaggaagttagggtatcagtatcactatatgaatttgggagttgggggaggacacagtttagcccatgacagtcctgaatctcctttgctagatgcatgactgtgggccagtcacttcaccagttgggatactgccatctctatcagaaaaggggtttgggctaggtcatctataaagtcctttctgctctaaattgtaaatataatgagataccaacatttagtttaattgtttaaaattttagaagctaactggatgctttgctggtgtcaacactcccctttacaaaaaaaaattcggccgggcatggtggctcacgcctgtaatcccaacactttgggaggccgaggcaggcggatcacggggtcgagagattgagaccatctggccaacatggtgaaaccccgtctctactaaaaacacaaaaattagctgggcctggtggtgcacatctgtagtcccagctactcgggaagctgaggcaggagagtcacttgaacccgggaggcggagcttgcagtgagccgagatcgcgccactgcacctccagcctggcaacagagcgagactccgtctcaaaaaaataaataaataaataaaataaaataaaataaaataaaatctcactttctgtttctactgttctctcaagtacccctctgccttctgttacttctttgctgcattctgagaggaatggggtggggagcactctttcctgtagaaccccataacccatctattttcatcaatttatttgaaattcaaagccaggggttaaaatgtccactttcaatttgagatgtctaactttcagataaatctattaacatgcatttctaagtgacttttaagctaagcattttattttattgagctcgtatggaagggtaactattatacttgtataataaagtgcactttcaaaaatactcggttcaaatgtaaaataatattcgtaatattttaagacaaacctcctagaacttatatgtgtctttcttcccagagcagtctctatgggtgcctaaacaatactgcattattagatttttttcagtttataagccacacaagaaagttaacccatgtcatctctagaggcataaaaatagacagttgttctgagaaacatatctgtttattcctagttcagtaacagcgcaatgagatcctaaattatgaggtactttttgtttatcttattgtctcattggcaaccagcaactcctgttgcatttttgacatgggaatctatcagggtgtggttaataaagtacatttccatggtaagtattctttaagaaaaaataaaccaagatttcatcagagacagaaattactgcaaactgtacttaccagtttctggtgatttgtataactgagctttcaatttcaaaaattaaaaagttctctttagtgtaacatatttttgtgtccagtaattttacttcaaaaataaaagagaattttctttaccatcaaacaacgttgctgtaatgagtggtgatatatttagtcctagaggaccaaagagaaataaaatggctttgattatgctggtttaagaaaatatatccgatgaaacagaggttaatatttgtgatgtttgatttagtaaaattataagactaccaaagaaaactagaagagcaaaataaccaaaatttatataaagaattcaatgttgataattcaaaggtttagaattttttccacctttcaaatactaagttgctgttatagatttactaccattattacccagattttctattttactaaaaaataataacacagttcgttatgataaatcagtatagatctttaggctcaacacaaccctgctaccttttaaacttttttattatacaacaaacacatatgcattatcaagaaaagatgagtttagcaaaatgaagaaaaatagtcttatcaactagaaataagcaccattaaaatttctgtgtgttaaaagataatatgctgctgaaactttttttttcttgaaatgtccctcttttctttcacttttcattttcttaatccctaaccttctactgttgaattttctggaccaccgttataccccctcatcaatagggcatttttttctgcagtagctgagcacaatggtcatattgaagaaattcccttgtgggggctttgcctagaggtaaaatcctcttggccgggtgcgttggctcatgcctgtaatcccagcactttgggaagctgaggcgggagcatcttctgaggtcaggagtttgagattagcctggccaacgtggtgaaatgccgtctctactaaaaatacaaaaaattagccgtcatagtgtgcattcctgtaatcccacctactcgggaggctgaggcaggagaattgcttgaatgccggaggcagaggttgtagtgagccaagatctagattgtgccactgtgctccagcctgggtgacagagcaagactccgtctaaaacaaaacaaaacaaaacaacaacaacaaaaacaaagtaaaaccctcttcactgtgatgactctaaagcttgcttttgtctctctaaatcacaacaaaccgtttgcagtgtgatgctgtgctcaaaattgagaattctcactgactgttccaggcatctgtctactcattcttgccatgctgagggctgtcatttctcaccactgaatgcctttttttttttttttgtgcttctttttaaaagtcttttcctgtttgctttgaacttcaataaaaacagggggtaagaaggtaatatgcttttattttgtctgtggggtttttttcttccttcttttggttccttttcagatcctagctcatcaaggccatttgccacactgacactggaataagcctgaatgggggtctatatttcttccagtagttagtttaattcggtcattgagctgttgctctatttgtaaccgtcatgctagatccgagggctgactattcctgagaaagtgtggagatcctttcagactgccatggtgctagggcagagtttcagtcattatcttctgtgtctgctaattcttgcatcatttcttctactctgtaacctggttggctatgaaaagtgattcttcctcactgatgctgcaggcaatgggtgaatatccaattgttctctcaggttcttgtcatcggatacaaagaacaaatttcatgtgtccctgtttctgagaggttcaaagggagcaaatgcacagattctagcttaggatgacttccagcttctaactatttgtctgtgcattccatttcctcacccctgcgagaggttgcagtcatggtaacggctgttctgagaaattcagtgcccaaactggagggaggggaacacaaactcagcttcttcccaagcttcagggcagggctggcaagttttgccttccccgccagcaagagccctggctttaggggtcttgctacagttttcccagactggaggtcttggggctggattctggttcttagcgaattcttgccaaacacctcccctttccccagtatccatttgttttgaaggttctttgcaggcttcttgccaataattgtcttaaaacaaatggagttgtttgcatacctagatggagtaaaatatttaggaaactattctacaaatatgaaacagcccagatttgggccagaagtcctggtcctgagtctcttgttagccactcttaactgtgaattattggacaaatcatttctcgcactctgtgtaatctgtcacctgggtacttgatgatttaaaccaggaattgtggcccttctcataatactgtctcctaaatattgggtgaatttagtatatcaaggagggcagggcactatacccgtaggggactctctctctccctctgtctctttgcctttctcagatatgcatctttggtggcagacctggggttcaaaccacagttgttttgaaatttctctttccttctccactatgctccccctcactgaaactttaataataaaagtagcacacttattgggcatgtatttgttatgtgccaggttctgtgctaacagctttaagtgcattattccacgtattttcacaacaagcctgtgaggaagaggttatttccacttatagataaagaaactgagacttggagaatgtaagtgattttacccacaaacacagggcagtaagtgggaggccctgttcaccttagaacacctggcttctatcattcatggtgctgtttctagtgtggtttgaagaacctgagatccaaactgctatacaagtgacctgctgctttcttggagagagaaatctgaaagacagtggagccctcacattgtctttgcctgtgcacagcagatactgccaattttgggtgggttacacttgtttaccacgttgcttacttcagaaatcaataaaattctcttcatgcttttattttacaggttcttacgtctgttgctagattatcgtccaaaagtgttaatgcccaagtgactgacatcaactccaagggattggaattgaggaagactgttactacagttgagactcagaacttggaaggcctgcatcatgatggccaattctgccataagccctgtcctccaggtatgttacacaaaacatccagagattacagtgaaagtcacagttaggagtagcacatagtaatcatgactataataattttacagtttttggttcccctatattatataacataactgagagaaaaacaactatgaaattattttccaaagatgagttttatttatatttatcacgcttatttgatgtggttatggataaatttaatttacaagtgacatgcacctctgaaatgagaagactggtctatttggctccatttttttctaagcaaaaatgactcatttgtgaatatgaaagcttatcatgtcaaaactgattaggatctaccataacaatagtggaactctgaaagcaagagacttctcctcttaagggatatgtctcagcacttcccttcaatcagaaggtctctaagaaagctgtcctggcactgaagcctgcaaaatatatttgcattttgcagctgaataactagacgaataagaaaagcaacaggcagaaaccaacagcttttttttttaaatcaatactttgaagggcaaactaatttcagatcacaaatccttcaaacactggtaaattagaagctaagcaaaatgcaattgtgcaaacatttcttcaactttgagtagagttgaaaaaaggaaaatagcacatgggttcatgtgatagattaatagaacaaaaaaggactgtagtatgtttcatggttgtcctcccaggcttccagcactcaagctgtaaaacaggatgggtcctgtttgtgaaaagattctaccagtctccctgtgcttcatgtccagattttaataaccgttatggaaaaatctcccctataacccaacccatttatacttaaacccatttacacttaaatcttctccaacacgaataaagaatggcgtcctggctttattataacctgctaaacacaatcaatttgctctatgaattgaaatctttgttcataattttaaaacctaaaatgtaaattaaaatgaacaaaatatgctttgcacatcaaactgtcaaggatttttgtctattgctttttcggttttgctttgttttattttaatttaagaagtgaatgtaaattgttacaaacttttaagaaatacatttggatatatgagtcaaaaatttgaaaaaaaattttttttaacttttttttcttattattatactttaagttttagggtacacatgcacaatctgcaggttagttacatatgtatacatgtgccatgctggtgcactgcacccactaactcgtcatctagcattaggtatatctcccaatgctatccctcccccctccccccaacccactgtttatacttgctaagatagcaattaatttatacgaaaataccctgagaaaataatcaaaaataaaggaaaatattgtacacatgatatttcattatcaatatgatgtaggattccttaggtaaattctggaatatttaaagactgaaatagtatgtatcaaagtcatgttttctgatatatttctaatataatcctcaattatataaaccttcttaagtaatttccaactgatctggctggattaactgattctccctgatccgtctataaaatatcctggatggcatccaaccatgttaaatactcttcccacttcaattccctcttgttgaattttaggcttatcaatatctaagttgcttccaaatctgtttatgctcattagtgttgtgatattcatatgtaatttgattgaatattgcataaattaatgaaatacaaatacagagaaaagacagattttatttctaagaaaactaggttgagtgctttggagaattcaataaagatgagctgctaaaatgttgttgatgaattttgtgagggaaaaataaaagttaagtagtaggaaaaatcacaaaaatctctaaagccattcatagagattattggtatgtttatgttttcctttcatcaaaaacgaagggagggagggagggagggagggaggagaaaaaaagaaagaaatgaaaaaggaagagaaaaatagacaaacaggaaattataggtgatgcattatggatgtgacttaagaaagaacctgggattataataacttctatatcacaaaattgtcaaatgattatatagttatattttataaattaaaacaaaatatttacagtatttttaagtgatttcctatgtaaattgacatttttgattaaatgatcaaagaagtcctccccacatcatcatattcaataagaaggattctatggtatactgcacacatatttcatatatacacattgtacatatatatatatacacacctgttatatatatgctcatgcatatacatgtatgtatgtattatatgcataggaatgcaacaaaataacggcaatatctccagattgttgatatatagttttttgtttgtttgtttgtctgtttttttgagatggagtctcactctgtagtccaggctgaagtgcagtggcatgatctcagctcactgcaacctctgccttctgggttcaagcaattctgcagcctcagcctcccaagtagctgggactacaggagcacaccacaacaccgggataattttttgtgtttttaatagaggcggggtttcaccatgttggtcagtctggtctcaaactcctgacctcaggtgatctgcctgccttggcctcccaatctgctgggattacagacatgacccactgtgcccggcctgatacataagttcttattatactttcctgccttttccaacatttctataataagcatatgtaccattatactaaaaaaagtattttaaaatctgattttcaataaaacaactacttattttcttattttaataaattttgttttcatactttggaggaacgaaagaacctgtggtttactgtatctccattataccaaggaagttgtgctaggcacattctgtaagataattcattaaagagaccaattcattcagagaccagtataataccactagcaaaaaataaaattatacttggacttgggttctgttttctttaaatattgctacaatgttatatagccctatgcactatttttgaattttgttctgggaatctccagtttgttttttactattgacagactattatctttacttactaaaatagcatatatatttacatgtcataatttgctcatgtagtaaatattttgttttatcaaaaagaatatatgaagttattaaggaattcatgttcctaggaaacacagcagaaattaattttgctgtataggtgagcagagcagattaaactgcttatatttttaaaactagttataccattaacaattagagtcactagtaatgtttttctcacacttcccttgatattttctgtcactttcttcttaattctctattcccttaccttcatctagctttccccatagcatttttttagcacttgatatcaatatatttatttgtgtattgtctgcctgcatcccaagaaggtgaagtctttggtgatgaagggtttatcttatttcctgcataatatcaaacttctaaaaagttcctaggactcaataggcatttaataaacacctatcagataaatgaattttttaagagaacacattacataatgctttctaatagcaatacagtgacaaactttatttttaagtaaattaatgcaaatatgtatattatttaaaattgtttgtttttaagataacaagcctgatagataataaattttggcataaatatgttaatgcttatcaaaactcatcagtacatatcctgtcttttgatgaaaaagtaatagaaaggggagaacaaagagaactctcatgctcactaggcaggccgagtgcagctctgacagcaatgcaagagaaatattactatctccatcatatgcaggatgaaatttaggcttggagaaaacaacacttcgttaaagattttatagctgctcaagatttgaccaaggcttttaaaacttcaaatgttcttttccttattacactgtttcttatcaggatttgtggactttggaaagtaaaatgaaaagtcagagcaatgtgagttagtttgataatctcagtggccagtaacagctatccccactctgaatatataccaaccaacctctcccctttctccaaggaagttagttcttggcaaaggcatttcatgcagtgtactttgtcattctaaccttcctttttttttgtatgctcctgttgctaatcatcctatttctatgggcttcagtcactcttttagcttttgtcttgggagactttctgtctgttgacatgacttttaaaataatcttctcccccattgtatttatatctcattagcctaccccccctccccttgtgttttagaagagttttattgtctgtcatccctctatagttcccaccctgttacctgcccgtgtcctgttcaaacacttgctccttttttccttgggcaggtgaaaggaaagctagggactgcacagtcaatggggatgaaccagactgcgtgccctgccaagaagggaaggagtacacagacaaagcccatttttcttccaaatgcagaagatgtagattgtgtgatgaaggacatggtaagagtcttaaaatgcaattgaaagaggccaatcttggaatttcatgtagaaccatttataagacaatttgaaattggggcctactgtggtgctatgttgacacacaggaaagggaaggacaggtggctagggtaccgcagaaccaggtgccgagctaactactggtctagacctttatgagtaagtctaggcaattcttccagatataggagaatgagtaaatatgaaccctaggaacagggttcatcagctcaaatcaaaagctcagaaattattttttttctggccttgacttacgcttatataatggtgctcgttcatggccagaaaaattcagaagcctgcagatacaaggacacagaaatccaaaaggtaggtaggaatgctccccctttctttggggatttagtttgtcctgataattccatctggggacctgaattttcatggatatctcaatgtattctaaggacccagattgaagtataacagaagtgtttctagttttgtttgacatgaagaaacctctggacataaagcttttcccatccctattcagcctataaagcaatgtttctcatccctggcagtgcattagaattgcttagggagctactaaaaatgtttcatgtttaggtcccatctcagggcaattacatcagagtctctgagtgaggaccttggtattggcctgatggagtaagtctggggtagagcctaacattctacatttttaacaagctcccaggtgatgctcatgctgccagtccccaggtcaccctttgagtgttaaggctagagactagaggaacaggggagacgtctaagtattggtgaggtttgtcttggttgctgctaaatgattgctggccatttcaacctggggtttcctgttctgtgtttaaacactgactgtattactggtgtcatgctgtgactgttgatataagcagtggatctcaaaaatccatgcagctcctgcccaccattttcatagtctgcttataattagccgctataactaatagtttccaaactgattttctaggcttagaagtggaaataaactgcacccggacccagaataccaagtgcagatgtaaaccaaactttttttgtaactctactgtatgtgaacactgtgacccttgcaccaagtaagttttagtctttctctgattaaaacactagatataacatgagagttatcattttcctagggaagtaacactgactgagagttaagaattagggttctagtcctgctttgcctccaagcaactagatgactgtttgctcatttaaacactggtgaacttcctgtgtaggtgacactttgctggccacttaagctaaagatatgagccagacatatgcctggcatcaaggtatcagtccagaagcacagacagtcaaggaaagcaatggttattgtgtttcaacagcatgagaatagcatcagaagagacttatgttccaggtgttacaaattatacagaaaaacttttcaactctgcctgaggagatggaggtgaagacatgaatgtgtctcatgacttgaatcttgaagaaagaaaagaaagagcattaacaggtgcacatggatggaatgcacattataggcagggaaacagcagctgcaaagagacaaaggaagctcaggaaaacagaatacctggctggagtgtaggaaagactgagaagcgttcagggctgaatcatgaagggccttgtcttttaggctaaagaggttggttttgacccaaagttagagaacctgccttgtaagtcatcttgggaagcttttaggagttcatctaataggcttaagaaataagcacatgatgccttatgttttatttgctaggaaaattttatgtacagttgtcccaggctctcccctggccacaagtgtctgagagtgcccctatgatgacaggctaggtaggcattggggaagcagctgacttagtaaaataataacaataatagtaattccaaatatttcataatcttgatttaattttcttgtcatcataaccttttgaaatagataatattatttccatgttattgatgagataaaaggctcatggcagtgtgacttcccaagctcacctagtcaggtaatgggcagaggctgtgaactcagacaacctgattgtgaatgtttgtctgtctgaaggaaatcacacatgaacctcttgagtctcctgatcaccaccggttgctaaaagtggcagcctctaagggccagctgagtaccctccctgagctacatcatgggcgtggctatcacctggccattttcttggtctataggaattttttgaaattacttttgacagtttattttaagagctagtttaagctataggatttacgtgttcagtttattactaggtttaagtttatttttgtatccacttcatctctcttgtgtgtcactattttcctatcttcctttaactcttgaaatcttaagacagagtcattccttatgatatttttcatccagccatccaaattatattaacttgtgccagctttagatactaatttagaaatatttgaaggaatacgtttgccagagatgcaaagatgaataaaatggcccctaatttacaaagtgccattgaaaattataaaggaattattctgccaggcttttgaatttctcctgtatttttttttctagatgtgaacatggaatcatcaaggaatgcacactcaccagcaacaccaagtgcaaagaggaaggtaattatttttttacggttatattctcctttcccccaaccccatggaaagatgtgaagaaaaaccaatcactcttgattactagaaagtcctttatttaatcttaaagattgcttattttcatataaaatgtccaatgttccaacctacaggatccagatctaacttggggtggctttgtcttcttcttttgccaattccactaattgtttggggtaagttcttgctttgttcaaactgcagattgaaataacttgggaagtagttcacaaagatttgcctcattcttacctataaaaagctaccactttggtagatttatgtattgttaatttcttgcccctgaatgcagccttgagagctgactgataagaacaaatgaaattattcctcagctagtttctgagcaacagttttggggcattgagtggtattctcatccttcctatgaacaggtgttctctgcagcagcagaattggccaaaaatcagaagcaattcttcactattcattgagatctccctatgcaaaaagagaacacaagaagcaaaggcattcccaggaaacacattgcagggaacactttaaaaacttgtacttcactgcctcctcttcctcggcctaattgcttgtttttaattatttctccttcttaacttaaaatactatggggacacatgttatacaaaggtgacttagtagagtcagtagaaaagccaaaattagatattatcataattagtctagaaaaatccctttaagtcattcatcaactacagggtcacaccaactttcagtaacttagaagtattcaattttcccttctcagaacaattatctgtttcttcagttcagttgaagaagaaagtttgccttgcctttagcggttgtttagctgaaaatacatttgggatatttaagcactgtaattgtgctcagagacatacagattcttctatctcacattgactttaatgcatacacctattgagtatgtatgcttgagttatttgtgtgtgtatttcatttctgggcatccatagcaagttgatgttgacttgcttgtcctacggcttctgcatcctgccatagtcttgccgtccacatctttgctggacagagagtggtgcttgccatatggtaagtcaaaagccatctccttgctaggccagcctgtggtaattagatgactaattaagatatgtcctttcactagaacacttgacttagtagtacgaaagttccaaaatcagcggtctcctgcgatgtttggccacttttaagtttcactgaatttctcctttttccttcttatatttctcttagtgtgaaagtatgttctcacatgcattctacaaggctgagacctgagttgataaaatttctttgttctttcagtgaagagaaaggaagtacagaaaacatgcagaaagcacagaaaggaaaaccaaggttctcatgaatctccaactttaaatcctgtaggtattgaaataggtatcagctttccttgaaaagaaaaatagagaaattagtgatttggctttttgttacttccttttacttttttgtttcttgtttgtttcattttgtttgagatggagtcttgctccatagcccaggctggagtgcaggggtgcaatcatggctcactgcagcctcaaagtcctgggctcaagtgatcctcctgcctcaactgtgaccctgggactacaggcatgcaccaccatgccaggttaattttttatttttattttttatagagacagggttcactttgttgcccaggctggtctcaaacttttgacctcaagcaatccttctgcctcagcctcccaaagttctgggattataggtgtgagccatcacatccggcctgttactttctttatttaaacattgcttgtgtttgtgggtgcataggttaaaggggcctcacagatgaattatgatatggtacccaaattaaaagtaaacttgtacacaaaaaccgtaagaatcaacaaaggagggaattgagagtgtgctgaaaatgagctgaaaaaagaacttggccaacctccatgttccgtgttgttgttatccctgcagagaaacagcctttaccaggcatgggttcagtatccaagcctgagcaaagagattgctcttaaagtttgtcataagggcacagcttaactttctctggctgccggttgaccttatgtctcaccatatcttttcccaacatggtatcaatatatttcagatagcaagaaatacaccgagaaaagaaaccagttgcacttaatggaattattttcttatttggggccagggctcagtgggagttaggattctttaaattaatatggtaaaaaaaatttcaatttgagccattttctggtattaagaataagaatagttacagggaagaaaattttagagtagttatatttattatttattttaataagtctatatgaaaaataacctcaacctattttatgaattctttaggtttcttgcctttaaaaactaagacaatattgcttagtttctggcaaggccggaacctttcagaataaaaattgaatggtaaaagtaaccttcttaatcacttaatctagcttcctaattttatacatcaagcaactgattgtacttctttctgaattaaggaaaaattagaagttcacatttagaatattctaaagatatatttttatttgtctttctctgcttccattttttgctttctaggaaacagtggcaataaatttatctggtaaggcttttatcattttatttcatagagatggcatcctttagagtaataggccaatttcagagtaaaataatgttactaatttcagtgacatattatgggatcttgttatttctcatacaattctacctgctcagcataaagcatttatcaggcagtttgtttaaatttataatgaatactcatagttaaaaataatcaagtaacaataagacacaatagtctgaggcttaagaaacttttccttcataatcagctagatgtattacagaactcctgcctaaaaagatctagaggttaaagtgtactgtagactcaggtattatcagtgtacccaactctataacaacatacatgattccattcagttgttctttgatctgtgatttagagataagatgatcataaactctttgcttatacttttagatttgtgggtcattgatcattggatccataagagatgttataggtgatcttttccaatcctcttaatttataaatgagaaaagaagatacagaaatgttatgtattgtggcccaggttatttaacaaattactgggtatatggcaggatttggagttagaactcaaggttgtcttgtttctgtattcccctagtcagctcttcatagacctttaggacttagctatattctgaagtactataaaaagagaaataaacatggttttcactaatgggaatttcatttagaaaaacaaattttcagactattttctatttttcagatgttgacttgagtaaatatatcaccactattgctggagtcatgacactaagtcaagttaaaggctttgttcgaaagaatggtgtcaatgaagccaaaatagatgagatcaagaatgacaatgtccaagacacagcagaacagaaagttcaactgcttcgtaattggcatcaacttcatggaaagaaagaagcgtatgacacattgattaaagatctcaaaaaagccaatctttgtactcttgcagagaaaattcagactatcatcctcaaggacattactagtgactcagaaaattcaaacttcagaaatgaaatccaaagcttggtctagagtgaaaaacaacaaattcagttctgagtatatgcaattagtgtttgaaaagattcttaatagctggctgtaaatactgcttggttttttactgggtacattttatcatttattagcgctgaagagccaacatatttgtagatttttaatatctcatgattctgcctccaaggatgtttaaaatctagttgggaaaacaaacttcatcaagagtaaatgcagtggcatgctaagtacccaaataggagtgtatgcagaggatgaaagattaagattatgctctggcatctaacatatgattctgtagtatgaatgtaatcagtgtatgttagtacaaatgtctatccacaggctaaccccactctatgaatcaatagaagaagctatgaccttttgctgaaatatcagttactgaacaggcaggccactttgcctctaaattacctctgataattctagagattttaccatatttctaaactttgtttataactctgagaagatcatatttatgtaaagtatatgtatttgagtgcagaatttaaataaggctctacctcaaagacctttgcacagtttattggtgtcatattatacaatatttcaattgtgaattcacatagaaaacattaaattataatgtttgactattatatatgtgtatgcattttactggctcaaaactacctacttctttctcaggcatcaaaagcattttgagcaggagagtattactagagctttgccacctctccatttttgccttggtgctcatcttaatggcctaatgcacccccaaacatggaaatatcaccaaaaaatacttaatagtccaccaaaaggcaagactgcccttagaaattctagcctggtttggagatactaactgctctcagagaaagtagctttgtgacatgtcatgaacccatgtttgcaatcaaagatgataaaatagattcttatttttcccccacccccgaaaatgttcaataatgtcccatgtaaaacctgctacaaatggcagcttatacatagcaatggtaaaatcatcatctggatttaggaattgctcttgtcatacccccaagtttctaagatttaagattctccttactactatcctacgtttaaatatctttgaaagtttgtattaaatgtgaattttaagaaataatatttatatttctgtaaatgtaaactgtgaagatagttataaactgaagcagatacctggaaccacctaaagaacttccatttatggaggatttttttgccccttgtgtttggaattataaaatataggtaaaagtacgtaattaaataatgtttttggta

SEQ ID NO: 595 - DNA, 12576 bp, Homo sapiens
gcgccgccggccctttatagcgcgcggggcaccggctccccaagactgcgagctccccgcaccccctcgcactccctctggccggcccagggcgccttcagcccaacctccccagccccacgggcgccacggaacccgctcgatctcgccgccaactggtagacatggagacccctgcctggccccgggtcccgcgccccgagaccgccgtcgctcggacgctcctgctcggctgggtcttcgcccaggtggccggcgcttcaggtgagtggcaccagcccctggaagcccggggcgcgccacacgcaggagggaggcgacagtcctggctggcagcgggctcgccctggttccccggggcgcccatgttgtcccccgcgcctacgggactcggctgcgctcacccagcccggcttgaatgaaccgagtccgtcgggcgccggcgggagttgcagggagggagttggcgccccagaccccgctgccccttccgctggagagttttgctcggggtgtccgagtaattggactgttgttgcataagcggacttttagctcccgctttaactctggggaaagggcttcccagtgagttgcgaccttcaatatgataggacttgtgcctgcgtctgcacgtgttggcgtgcagaggtttggatattatctttcattatatgtgcatcttcccttaataaagagcgtccctggtcttttcctggccatctttgttctaggtttgggtagaggcaatccaaaagggctggattgctgcttagattggagcaggtacaacgttgtgcatgccccgtatttctacgaggtgttcgggacggcgtagagactgggacctgctgcgtactggcaaagcagaccttcataagaaataatcctgatccaatacagccgacggtgtgacaggccacacgtccccgtgggtctctgtggaagtttcagtgtagcgacatttcagataaaagtggaaaaagtgaagtttggcttttttcatttgtatgcagtcctaactcttgtcacacgtgtgggatttatctttttccataacttactgaaaacccttcctggcgggctgaacctgactcttcctgagctgagtcctggactggcacactgatggctctgggctcttcccggtcaagttataacaaggctttgcccatgaataatttcaaacgaaaatgtcaagatccttgccggtgtcctgggattacaaggtgaatcttgtcatgaagaaattctaggtctagaaaaaatttgaagattctttttctcttgataattcactaatgaagcttttgtggttgaaaaataaaaagtgaggtttatggtgatgtcaggtgggaaggtgttttatacatcaatacattcgagtgctctgaagtgcatgtaataatagctgtttctctgttgtttaaaggcactacaaatactgtggcagcatataatttaacttggaaatcaactaatttcaagacaattttggagtgggaacccaaacccgtcaatcaagtctacactgttcaaataaggtaagctgggtacagaaaaagaaaattaaggtctttgatgtttctactgtcctatgctgaacaagaatgtctttaaagctgattactggatgaaattatttaacagatgacgaagaagaagggattcttggcaattcgctggccggtgtcatactctattaggcctgcaacatttccagaccttaaactgatagaacattttaattgttttaattgtttttggaaatgatgggagagttcctaagtggagtataaactgtggagagatgaaccatcttgagtaggcactgaagtgtgctttgggtcatgatagattaattaatctcatctaaacattgatgtctttttctgttgctgtctagactgtgaacaatgtctaacaccttagggaagaggtggggaggaatcccaatgtatacattgcccttaagcagtgtttgattcattcatctttggactccatgaatcgaaatctggtagaatacatgatcttagtggaggaggccaaatgcgtgactcactgagcctggcagagcagaaatactctgctgtctgcaccctctgggtctggtgtggctctgcttcttggtgcctcaactctgactggcagctgtccccaggaggcgataattcagcatgttcaatctaaaggttatgacttccttgatggttttcaccatattcttggcaagtttttggtttttgaaatgttctaggaggcttggtagagatcttatgaaatagagaatagctgctgtggaaattattttaatgctaattacataaaagtacaaaagtagcactagctaaaacaaaaggtattttgctgttctgttttgttttagcttgtgccaggccttttacagcattaggaatgcaacttctagataacgatgcatcttttaagtgaatgttcttgtttttcaaaatgaacttcatgacagtagttgccaaaccagcaaggagaacttgcatgcatacgtgcatgcatgtgtggatatgtatgggggtggggggagagaaagatgaaggaatttcataacatgaaataatgattacagttctggtcaaacttgtcaattcagatttcaccaattgagaattagtaagtaatttctctgatacaggcctgaagtttaccttagtaaacactttacttccatatggtaaaaattagattttgggaggaatgcttacctcctaaatatattcaatctaatatttgagggacacatgggaatatatttatgattcatctgctttttaaacataagcctttgttaactgtaagttcttgaactttataaggctgctgttatttaaatgagcacagctcctgatctgcaaacagcagagcgcagggctacagcttgggggatgccagccgactcagggtggtcctatggactgaacaatctcttgctgctgtactggagggcctgggagcttttccatcagcctcggcctgaggtgtgcactcttctcctgcccaccccaggaataaatgagattcctggttaaaaaggaccagagcagtcattttacagttgaggaaactgttgctctgagaagtgagggatttattcatgactacactgatggtgagtgcccatgtcaggtctggaaccaaagtctacccagtatccacacaccaccatccctcaggtggctctgccacagtctgatgggaggctccaaagcgggaggaagaaggaaagtcttgcccactgcatctcctcagttggccttcctctctgcctgttttccctccctacagttagcatcttaagcagctgcccctcttccctcccgactgctctcactactgcagcctggctccagccgcaggacactactgctgtgcagaagcccctacttggaactccaactgcatttttcacctttgctaacagttttcagtggtggttgggaaatgttattggcttaagccttagcacaaaccgtcaccggtgatattcattccatggaaatgttctgaattctaaagctgaatttacaaagcttctggaaaacaacctgcaaccaaattagtgactgaattttttagttaactcaaaattccaaatcagagggttttgcaatgcctggaggaaccttggaggcttttaaagtgttaatgctattaatggcattcagagggattttctacagaattgtcccttcattacctgtttatacagttttactacttaccagggtactgtataaatccttgtgctaaattttgctatagagtatgtggtccctgctgtgagctgggaggaaccaaatactgtatctctatgttacatagaaagccctaggagactttctcctgttatctgaacaactatttgctgtactgataaaaaggaaacagcatagtctcattcactttttgaaatggaaatgataaaataaaacacattttggtcattcgggaacaaaataccctctctacttttatcacataaaattaaataaatagaaaccaaaatatttcagtatcaatcttagtttgtgcactttaggataaagaatgtgtttacccaaatccttttggcctggttacttagttcagattttgaaagaaaatatatttgtggcttttatgtgtgaatttagacaatggaatccatgtggtgcctcgttttccctgagattatgtattaattcaacctgtaaatgcaaaccatctaatagtcagcgagaccctatagccctgctgcttaatgggggcacacaagggcatgcagccctcgtaccaggcagactgtgttcatattaacagcatcgtggagaaactcatgctgggggacaggggagggagatgtaaatgctcagcagggagatctggagattcctggagcaggtggagttgggacctggccttgaacgatgggtctggctctggcagtcagtaatgccaaagggaagagcagcataactgtcactttccatgggacagaagtgtgtgaatcaagttgcagtgacgcttcacctatttattattttggtcatttagaagaatttcattgtcagtagaagtcctttaaatcatttccccttcagtgacgtctcacaaaagaaagatctgtctttagctttttagtctcagactttattagacagatactacctgtactcttattctgtaatctttgttgggatggattcacatcttgcaaaggaagggaggcatgtagtataatggggcaaacagacccagctctgccactcgttagatatgtgaccttctgcaagttgcttagtgcctgtgagcttcagtgtcctcatggataagaaagatccaacaccttcttggaaggattatatcaaatgaagtaacatgagtaaagggtccagcagaatacctggcatatagtggagtcaatgaatgattaataatattattaatagtggtcatgagagaatatatgtataacatgttattatgtagactcactatatagactctattctacatagaatatagaacattatataacaaacaactataataagtagactatagtaaacaacctcactttgtctcagttgcctcatcttgatggaaaactgctctttctctcctgttaccctgacagagagcgtctacattctaaaagaaagatatttaacaaaatggttgagtacagatccaagagtcaaatagctgtctggttcaaagtccagctgtgtgattttgagctagtcacccaatctcactttgtctcagtagccttatttgtaaaaacaaggcaaattacagagccatcccctgggttgctatgaggactcaaacatgcatcccaagtgctcggtgttgctaggtatgatggctcacacctgtacattcagcactttgggaggccgaagcagaaggatcagcctgggcaacatagcaggaccccatctctacaaaacaatgtttaaaaaaaagcaaagtgctcagcacagtgactgcatcattaggattgattgtagggctcctgatgttagcacagaacaccacagccaggaagcagtctatcttgttgggtgcaaattgtaacattccatttatgtttcttccttcttttctttctttagcactaagtcaggagattggaaaagcaaatgcttttacacaacagacacagagtgtgacctcaccgacgagattgtgaaggatgtgaagcagacgtacttggcacgggtcttctcctaccctgcagggaatgtggagagcaccggttctgctggggagcctctgtatgagaactccccagagttcacaccttacctggagagtaagtggcttgggctgtaataccgttcattcttgttagaaacgtctgaacattctcgtgatcttgtgcctttaggggctacaaaattaaaaatatttattctttttttctcagaaactggtatgtatcacagccctcttcacacattccagatgtggtaggaggttcacagaatgtgaactttggagctgatgacagtgtcatcaagtaactttctcccccagtctgtccccagaccctgttactgtcctcagtaaccggctgaatgtgtgttgggagagggcgggccagggaagcgggtagggataggaaatccaccaaggccggggttttagcttttccctatatatatatcatgtatcctgatttttctgtcccgttatcacactaaaaatcccagttgaggatttttcccaaacggtcataaatcaatgaggaaagtccatggtttccctctgagcccataattagcctaattatgctgaccttttctaatcagttggccatgatttgagttccgtgatgtgccagcacctgcccagccatctgcctgtcaccctcgttctggttttggaaaggtggaatactttcctcctcagcctttgcccctgtaagctggccctaggagccagtaaaagaatgaagagaattcctgtcaagtaggagatttattcttttgccgcaactgtggctctgagctaggcaatttagataaatgcatgtagcacattgagtagagtgaaattagcttctcttgtaaggccagctggttagaatgaaggtgttgtgtgagtgttaggcccagcgagagagaacagtttctcaaggtaggaatggtgaaaagaaggggtggacggacaaccaaccaaccatcctcctctggtatctactttgagggttgaaatagggggcctgaccccaggtgaatgtggctgccttcccagagcccccatttgcaagaccctccagacccccaggtgcttctgcttgtgtcttttgtggcaccaggcaagaatgtagcagcgtcagcagcccctctggtgactgtggcatggttgacattcatttcccccctaattaatggcatcctcatgattctcttttatattaatagttcttgagtttttttgtaagctacttcaaatcctttgttggtgcaagatagaagatattttatgtgtttgttttgcatgtgcacacacatatttggcctgtgaattgatgtttgttttcctgtcatttaaccaaagcacatgagataattgagccattgcagagaccccgtggttaaatccggcttctcgaggtaccaaggacatttcctgggctttctcacagccctacatatttttgaacctaaaatatcgtagtttatgctaccaccctgttcagtatagtagccactagccacatgtggctgttgaccacttgaaatatggctaatgctctaagtataaagtacacactggaatttaagaagtgtagaatatctcaaaacttttttatattgattacacattaaaatgattatattccagatatatgcagttgactcaagcaatgcatggctgagaggcaccgactccctgtgcagttgaaaatccgagtataacttgactccccaaaaacttaactactaatagcctacctatcggttgactgttgactgcagccttaccaataagataaacagtcaattaacacacatttttcatgttgcgtgtattatatactgtattcttacaataaagtaagctagaggaaagaaaatgttattaagaaaattataaggaaaagaggctgggcatggtggctcgtgcctgtaatctcagaactttgggatgctaaggcgggtggatcacttgaggtcaggagttcaagaccagcctggccaacatggtgaaaccccatctctactaaaaatacaaaaattagccaggcgtggttgtgggtgcctgtaatcccagctacttgggaggctgaggcaggagaatcacttcaacccaggtggaggaggttgcagtgaactgagattgcgccactgcactccggcctgggtgacagagcgagactctgtctaaaaaagaaagggaaagaaagaaaaaaaagaaaagaaaagaaaagaaagaaggaaggaagagaaagaattataaggaagagaaaatatatttactattgataaagtggaagtggatcatcataaaggtgttcatcctcgtcatcttcatgttgagtaggctgaggaggaggaggaggaggaagagcaggggccacggcaggagaaaagatggaggaagtaggaggcggcacacttggtgtaacttttatttaaaaaaatttgcatacaagtggatccacagagttcaaacccatgttgttcaggggtcaactgtctttggttaaataaaatatattattaaaattaatttcacctgttcctttttactttttctaatgtgactactagaaaacttaaaatgacatctgaggctccattgtcttccccttgggccagcactaccacagaatgtcttaggattcagctccaggccgccacgcctgcttctttcagggagctggttctatgcacatgttttatatgagagataattaagttgtcaattgtgataacaaaacaggatttgactttgtacagaattctttggttccaaccaagctcatttcctttgtttcagcaaacctcggacagccaacaattcagagttttgaacaggtgggaacaaaagtgaatgtgaccgtagaagatgaacggactttagtcagaaggaacaacactttcctaagcctccgggatgtttttggcaaggacttaatttatacactttattattggaaatcttcaagttcaggaaaggtgagcattttttaatttgtttttatgacctgttttaaattgtgaatacttgggttttacaacccatttcttccccaattcaaaaatagcagaacagagttgttgagaaggtgatggagtagaagggggagcgcgcactgtggggaggggtggacaacaggcctggtcctacctgtgactctgcactaccctgtgactctgggcagggccccctcggagacccaggttcctcagccaaccggctggatcaggtcatctctaaaggtcccgccatgctcacatttctccctctattgaggatcccaggcacaaaatttgtttttggttcaatgcataatactcccttcctttttcttttactgcagatatcttctaaaggggctcaatagggttcaatatgcctaaattggatcttctcagtcttggaaaaggcatttttagcagtgatcaagggaaactgattagcgaagtcacttctaatccttcacgtgtcagctgtgttcttgtaggctttgcttagaacctaggtttttacttccacagtgacttaataaaggggaaagaattgactcagagcccagatgaattaagaactctatctttttacagaaaacagccaaaacaaacactaatgagtttttgattgatgtggataaaggagaaaactactgtttcagtgttcaagcagtgattccctcccgaacagttaaccggaagagtacagacagcccggtagagtgtatgggccaggagaaaggggaattcagaggtgagtggctctgccagccatttgcctgggggtatgggtgctgtgggtgacttctggaggagtagctccaccctcagggctgggatatacttccttggttaaatattcaggaaaacaaactgcctggaggttttttgttgttatttgtttgttttggttttgattttgctttggtacaaaaaagattttggacatttagaaatgtttctgtgttgattgtgcccttgtattagcaggtgttttcttgagcacctgtcatgtgctaagccctctgctgagcactggatacacaaactgtgtttaggatttagcaacaagtcacagatttccctgggcattttttcatgcttaaattctaattctgggggtggcttctggaccagctgcagcaggacacagtagacattcgtgagtacccactgtgggctgttgccacagaggctgtagagtctaacccatcaagggaagggattgagtatatcaaatatacccacatgcatgcatgtgtgtatatggcggacacgtgtgtgtacatgcatgtgcatatgttgggagctcaggcccattgtgcgaggaacagtccctaaccggaagtgctgtgggccttcagactcttgcaggaagctgcaagcctgtgtgtctcgatccatgccttacagggaaagtattctgagtacttccagtgaagaaaagagtcaggggatataaacgatggcttacgctgggtgtggtggctcacgcctgtagtccctgcactttgggaggcccagacaggcaaatcacttgaggtcaggagtttgggaccagcctggccaacatggtaaaagcccatctctactcaaaatacaaaaagtagctgggtgtggttgcacgtgtctgtagtcccagctactcaggaggttgaggcaggagaattgcttgaacctgggaggcggaggctgaagtgagctgagattggaccactgtactccagcctgggtgacagagcgagattccatctcaaaaaaaaaaaaaaaagaaacaacgaaaaaagaaatgatggcttagctccatgtgaagatgatatttgaacattttaaaacactttaaataaactgttctctcctgtttattgccactgacaggagaggtttctctttacctctggtcctgcacccctctgagccatcctacccacagccttcagtcattgtcctaaagcctagctctaattccactgcctctccttttgtgcacacacacttctctgcttccctggccgttctctatcttggagaggcatttcaaacgccacttccaccagaaggccttgctactgcaccaactagttactatctcttcttcacccaaatcctggtagcactttggatctcccactttgcacttagggttcaccttccgttataatcattgccatcaatctcagcatcgtttttaggcacttctttccagccattgttcttacctccaactacatatcttttctggactgtgcattattcagtttattaaatgcccattaaatgtgtttagccattgtcaattactctgaaacgttcaggttttgacaaattctttcctaatgtaagtgtggtggaaagagtgaaagaaagtcaaattgcacaaaaataggatggtgtaatttggggttatgccgtcaattttgtccactgataaatgggatttgagctctccaagttgactagatgccctttatttttcagaaatattctacatcattggagctgtggtatttgtggtcatcatccttgtcatcatcctggctatatctctacacaagtgtagaaaggcaggagtggggcagagctggaaggagaactccccactgaatgtttcataaaggaagcactgttggagctactgcaaatgctatattgcactgtgaccgagaacttttaagaggatagaatacatggaaacgcaaatgagtatttcggagcatgaagaccctggagttcaaaaaactcttgatatgacctgttattaccattagcattctggttttgacatcagcattagtcactttgaaatgtaacgaatggtactacaaccaattccaagttttaatttttaacaccatggcaccttttgcacataacatgctttagattatatattccgcactcaaggagtaaccaggtcgtccaagcaaaaacaaatgggaaaatgtcttaaaaaatcctgggtggacttttgaaaagcttttttttttttttttttttttttgagacggagtcttgctctgttgcccaggctggagtgcagtagcacgatctcggctcactgcaccctccgtctctcgggttcaagcaattgtctgcctcagcctcccgagtagctgggattacaggtgcgcactaccacgccaagctaatttttgtattttttagtagagatggggtttcaccatcttggccaggctggtcttgaattcctgacctcaggtgatccacccaccttggcctcccaaagtgctagtattatgggcgtgaaccaccatgcccagccgaaaagcttttgaggggctgacttcaatccatgtaggaaagtaaaatggaaggaaattgggtgcatttctaggacttttctaacatatgtctataatatagtgtttaggttcttttttttttcaggaatacatttggaaattcaaaacaattggcaaactttgtattaatgtgttaagtgcaggagacattggtattctgggcaccttcctaatatgctttacaatctgcactttaactgacttaagtggcattaaacatttgagagctaactatatttttataagactactatacaaactacagagtttatgatttaaggtacttaaagcttctatggttgacattgtatatataattttttaaaaaggttttctatatggggattttctatttatgtaggtaatattgttctatttgtatatattgagataatttatttaatatactttaaataaaggtgactgggaattgttactgttgtacttattctatcttccatttattatttatgtacaatttggtgtttgtattagctctactacagtaaatgactgtaaaattgtca

SEQ ID NO: 596 - DNA, 67771 bp, Homo sapiens
attcatctggcgtccgccggccccgcgcgccgcgcaggcgggggccgtggccaccaagcccgggcgcagtttctctccgcccacggcaggagcgaaggaaggccctggcgcgggcgggtaaactgcccaccgggcggcccacccgctgcgcccccggcccgcaagaggcagtcccaataggttggcccgcctggccgaagtccgcccggagcccgctcacctgtcagcccccactgccgtaagtcctgctcctgcacccgcgccgcctcggctcggccctcagtatgaagccgcagtaagaagccaggcgcttggcccccgcggctagtagcgcccgcgcgctccatcgggccggtagaggccccgccccgcgcggccaagcgcgcacctccctcccaacttcccaacgcgcgggggcgggcgactgcgcgctggggcccacctatgagcgaggcgccgccagagggcgcgtcctgccaagatatccggagcggagctggtgcagtcacccttccggacaggcagttcttgcagtgcggagcgtggaagggctgcccagttctcaccagtcgtgcttctgaagcgctaggcgtctgatcacgcacaggacgtctgattgcctgaactgcccgtcaaggaggtggcatgtgttcatcattcatttattatttaatcaacatcgactatcatgtgtcagacactccgctgggccctgggggttctagaagtaagacttgttccgtgccctccagtgattcacgataagatcaaactgttcttgttcggtttacctagtgataaattgatttagtccctgaaatccctttcttactgcctgtgacctgtaggccaaaattgggaacctctgaatagtagtaaattaaaatcaccaaagacgtcattgtggcagtgggtatctcaagtgcattatggggagcagattgaggcaatgtgttcagttaggggtcaccgtgactcagcatcagctttgagtggatttatgatgtagtataccactaatataaatatgataataacaaaatagctgcatttattgatgaagttctgggtggtgtcctaagggctttaagtatattttcttatttaaccttcacaataaccaataattaggtgttataattgtccccacattgtaaatgaagatattgggacttgtaatggtaattggcagtactggaacaggaacgatattattctctggctaatgtcattagaatagtattctcatttaggttaatcttggtgcttccttcttcagtaaactcatgttaaatttgtaccctccattctcatcttcctctaaaataaaagggagaaatttgttctgagctagaaaagggatgacttcagattggtttattcataaaaactcaagcaaagcactgttttatgaagctatttttgtgtcttgagtcattcataaatactgactttcatgcgcgtccgtgtgaagagaccaccaaacaggctttgtgtgagcaataaagctgtttatttcacctgggtgcaggtgggctgagtccgaaaagagtcagcgaagggagataggggtggggtcgttttataagatttgggtaggtaaaggaaaattacagtcaaagggggtttgttctgtggcgggcaggagtgaggggtcacaaggtgctcggtaggggagctttttgagccaggatgaaccaggaaaaggactttcacaaggtaatgtcattacttaaggcaaagacgggccatttaaacttcttttgtggtggaatgtcatcagttaaggcaggaaccagccatctggatgtgtacgtgcaggtcacaggggatatgatggcttagcttgggctcagaggcctgacactgactgaattacatactatgtgccaagcactctatggtactgaagatagaggccacttatctcctggatcttacattttaaaaggaggagacaagcaataaataaaaatcaggtagtgaaggggtggcctgcccctccacacttgtgggtatttctcgtcgggtggaatgagagacttaagaaaaaaaaagagacacagagacaaagtatagagaaagaaaagtgggcccagggaaccggcgctcagcatacagaggacctgcgctggcaccagcctcagttcccttagtatttattgatcattatcgggcatttctcagagagtgggatgtggcaggacaatagggtaatagtggagagacggtcagcatgaaaacatgtgaacaaatgtctctgcatcataaacaaggtaaagaaaaaagtcctgtgcttttgatgtgcatacacataaacatctcaatgccttaaagagcagtattgctgcccacatgtcccacctccaggcctaaggtggttttctcctatctcagtaaatggaatatacaatcgggttttacaccgagacattccattgcccagggatgagcaggagacagatgccttcctcttatctcaactgcaaagaggccttcctttctcttttactaatcctcctcagcacagaccctttatgggtgtcaggctgggggacggtcaggtctttcccttcccacaaggccatatttcaggctatcacatggggagaaaccttggacaatacctggctttcctaggcagaggtccctgcggccttccgcagtgtattgtgtctctgggtacttgagattagggagtggactcttaacaagcatgctgccttcaagcatttgtttaacaaagcacatcctgcacagccctgaatccatttaaccttgagtggacacagcccatgtttcagggagcacagggttgggggtagggttacagattaacagcatctcaaggcagaagaatttttcttagaacagaccaaaatggagtctcttatttctacttctttctacacagacacagtagcagtctgagctctctttcttttccccacaaggtaggattaatgctaagacaaaagtaaaacacaatcgcataatggggcaatagtaattttgtacagcagctttcctgcttgggtgttttctcaaaacaaacctgaagagagatttatatcctttggtggcttctccagagggacctctgtcctatgtggctgctcatgagtggtttttgcatcttggtctccatgtatgacttatttcctctcctctagattctaccagtagacttatctgctaaagcagccatatcaagcacttgccacttaaatataagcctgtttattatttttaacttaaagtacatttgttgtaacagaataccagatgatagagtcctagctataagccaggtagactgttggtatactaagtctggtacctaaaatacagctaagaaaggtagctgagagactccaggtctgccagtgaggtgacacatagaaaagttttgctctgaatactgtatgaagagatctgtagatgatcaggatggaaggaaggaggcagtttggaaactattgcagtagtctgggcaagagttgatagttttggggccagcatggtgatagtggagtggtgagtagtggtctgctactagatctattgaaaagatagagcctataggattcactgattgagcatctgggagaaatgaagaagcaaaggttgggttcagggatgtggcccgagcaactggtgggatgtgttggatttgtacaaacagtgctgggcacatagtgttgtacttgagcgagttagagagaacgccacactttgagacgaattaagagtctgtttatttagccagcggctgagagatggctaacgctcaaagttctcttggccctgaagaaggggctagattttcttttatactttggtttagaaaggggagggggggtctagttaaaacaattttccagaagtaaagtaggcagaaagttaaaaggataaatgattacaagaaagtaaacagttctaggtgcaggggctttaagactcttacaaactgatagacgtggggctttgggcgttatcaattggacgaattcctgggaactgcggatattgctcgccacagtattttatcagttaattgaattcttggatgttctgggagtcagcttgcacaagttatgtctttgaggaaggggctgccagtgaaagagccaagatgaagtctgtctggctctcttagctaagggacagtcaattcaggtggaaacaaggctaggggattaaaggaaagagagaatctaaaaacagggttagtaaaaacaaggttaggcattacaatagtatgccctcaataaatattgttgaatgtttgaatgaggtgcctgtggaacaattttaaaatctagggcatatgattgttataactttgaagtacagagagtgcatttcacagatgggcaaaccaaggcacagaaagtttaggaagctggtccagtgttttctgtgagtcgtgattaactcccagaataaaatttagcctcaactcatttttcattcattgttcaggttatacaatcatgctgtttttgttaattgttttattcctccacagaaaggatgtgtcctttggcaacagcaactccataagattaatgctaaccaactaacactgtcagtgggacttagcatgtgcagacattaccaaaacaagcatggattaagcacagattaagaaacaaattatgtttgctgtttgttgtatccttgctctgttaggtaacatcagggcaccagttagaagcacctagtgagtcagatacggaaattggataaaagctgtgaccaaagtaaacatttattcagacctcttgagtaaatgaacttggaactttgagcttaggttagaattaggtccgtgcccatgggtggaagatttttgtgctgggatgaaaaacacttaacttgggttttctttcttgcaagaaatgaaaaactgtattttgacttttgatgccagtatacctctttgtcatgaaataacatgtaataaatttagaacccagaaagccagggaaaatataccacagtatagaagtatagaaaaaaagtaagttggtttcacaggactcttgcccagtcacctcagagaattgccactcccttttactatcaaaggtaaggttgtaaaatagtaatattatcaagttaatctttgagaacatagtttagaaattgtaggcatcaaaatttgcccacggtctttttgcttgaaaggacagtgttttcctttttaactggatgccttttgactgtcatgccatgccatcacattggtcacccagaatttcattctttatgttctccaaccagcagtgtaacgtttatgcaatctgcccagctagtccctgaaggcttttgagtttgccaaactggaaatttaacttttgtgacatattgatggcagtgacggcctatctagagcagctgctgtcatgatgccacttgcaatgggggtggcacaccagggctgccagctccatggagctgggggaaccaggaacaggtggaggccctgcctccttctgagttggcagggcaggagcttcctgctccccaggtacagctgtggctgcccagctgcagctgcagacctgggcatccctgtgctctttggggctaaaagcaggcaggagccctaccctctcaggcacagctgcagctgcctgagtcatgtccaccaactcggcctccctgtgctcttgggttcctggagcaggcaggagccccaccctcctgggtgcagctatagctgctcaaaccacagctgcagacctgggcatctctgcactcttgggggccctgtaagacctcccaccccattcctgcaggctaagaagtgtctcctcccattgcctggcctctttctgctcccagcacccactccattcccagagcaaggttggagctgaggctgggtgctattgcagcctggccaggtgtgcacccactccaggcagcactgacacatggctttggccccctcaggactttgggtgccagcatgggagggaggccaagggggtgctgggggcagctcagcctctgtgcttgcctgcaggtgcccctttgcacaaacagtttgggtgctgtgaatgccagcaggaggcagtctcctgggtggaagggagcaggtcaccagtgaagacctaccctcaagctggggagggcctgaagcctggaggctgggctgctggtcccaaaaaccagagtgagaacttgtgttttatctgggtgcctatggaccagttggcgcacacttcctctcctctgaggcctgtaaaagccccagactcagccagacttgagacagtgggataaccagctgcagagaggagctacccaccccagggtctactctctgctaagagctgagttgacaatgatgacctgccagctgtggagaggagctgcttactccagggtctcctctctgtgagagctaagcagacattgggacaaccaactgcagagaggagctacccactccagggtctcctctctgctgagaactgaacactcaatgggacaacctgcctgtggagaggaactatccaatgtgggtctcctctgagctgttctgtcactcaataaagtttctcttcaccttgcttaccctccacttgtcaacttacatcattctacttggacgcaggacaagaactcaggacccgccaaatggtggagctaaaagacttgtaacacaaacagggctgaaacatgcccattgcttgccacattgtgggcaacaagaaggagagaagagagaaggagagaggagctgcagccctttgggaagcccagacctaggagctcactgagccagggctgtgacaccctctttggggctctttagctcttggcatctccaagcttccaggcaccactgcattctccagttccagccatgaaatctgcttgtggcacccctggtccagctggagcctcacagggagtcagtgcccatactggcacctggagctgcctgccttgccgcagctggcatgcctggctgtgcatagtggctggacctcatatttgctcacacacccctctctgctctgcatctggctggcccttggctggcatgggatccaggctggtagcatgagccatgtgcagcctgccaggctgaatggaccaaacaagcccaataggctcgagcaaaacttgtgcaaaagcaccaatggccacagaggtttctgtctcacaaagcaacaccccaagaatcccgtgacaatatttccatgtaggggacaggttgtctcaataatataccataggaagccaaaatgtttctcatgattcaccctactctaaaatatttttaggcaatgtaaaattatgaccctaagaactctctatgaccttcttcttcctctgattgacaagaatccaaagccattttttttaccctaaccctataaagcctgggttttagttttgaaaaatgagcatacctattctgggttctgttgcacatgtatctatccctgaggcacagttataactttgatgcaagggggttccccacctctatcccctcaaattgctcaaaaatggcatgtctaattaggcttcctaattagagggttttaacaatcagagtgcttctgaaaggcccataatgcatagtgaattatgaggataatagtagctatcctataatgctgttgtaaaaattaaatgaaaattttttcacaagaaactaaatacaaatttgaatgtccaaggtattacgaaggactgaaaatcttcacttgggaatgagcctggggatcactcaagtatccacatctcatcagtggagaattaagaaattggaagttatccctcattattgaggttccatggtaatctcatttgcttggggtgtctacaggcatagtgttttccccatatgtgtggcccacagatatgggtcataaaagtaaacagaaatacacacacacatacacacacacacacacacacacacacacacacacacagtgtgggatatctactccatggtgggctctaaccagctttgatagattgtattactgttcctaactatccactttctccccacaagatggttatacatttatgcccttagtcatgtgacttgcagtgcttcctaataggaagaacccctgtgatttgccttggacagtggaatatgagtggatgtgatttaccctagtatataagttgaagctttaaatgtgcttgcccaaattattcctaccctctgccatggaaactatacaaatgaaataagggccatgctggttaaaatctttcataattttttcatgtcagtataaattcatctcattaaatataatatgtaatatagtccttccccatcttgatgaacgtttatgaagtcatttcaaatttttcactattactccataaatatagacaattgttatttgtccattcaaaataaattagtaaaaacatttttaagttagaaaacaaaataattttttacaattaatgctgactaatacttgaactccaactacatgccaggccacgtgtgggcactttacatgtgttataacatccacaggttctgcggcttaggacatggatgtctttggggacgatgttttcagcctaccatgatggctgtgatttatctcctcatcttttttagatatgcactttctcttcctcctctctgggtaacaaagtacctagcacatagcaggcatagaatggatgctgttggggtgatcagacccaacaccagatcctgggggtgacaaagtccggtagagtcaaaggattgagaaaaccacagtttgagaagtaaagtgggagcagggggccatcacaattgtggaggctgcgaaggctccgagctctgggagcccacgctgtttattggtaatccaacagagaatcaggtggtgagaatgtgggggtcaaaagagcaggctcatgatctacagctgtgacggtttagcatttatttatttattttttttattgatcattcttgggtgtttctcgcagagggggatttggcagggtcataggacaatagtagagggaaggtcagcagataaacaagtgaacaaaggtctctggttttcctaggcagagggccctgccgccttccgcagtgtttgtgtccctgggtacttgagattagggagtggtgatgactcttaacgagcatgctgccttcaagcttctgtttaacaaagcacatcttgcaccgcccttaatccatttaaccctgagtggacacagcacatgtttcagagagcacagggttgggggtaaggtcacagatcaacaggatcccaaggcagaagaatttttcttagtacagaacaaaatgaaaagtctcccatgtctacttctttctacacagacacggcaaccatccgatttctcaatcttttccccacctttcccccctttctattccacaaccgccattgtcatcatggcctgttctcaatgagcatgttgggtgcacctcccagacggggtggtggccgggcagaggggcttctcacttcccagtaggggtggccgggcagaggcgcccctcacctcccggatggggcggctggccgggcggggggctgacccccccacctccctcccggacggggcggctggccgggcgggggggctgaccccccacctccctcccggacggggcggctggccgggcggggggctgacccccccacctccctcccggacggggcggctggctgggcggggggctgaccccccacctccctcccggacggggcggctggcctggcaggggctgatccccacctccctcctggatggggtggctgctgggcggagacgctcctcacttcccagacggggcggctgccgggcggaggggctcctcacttctcagatggggcagttgccaggcagagggtctcctcacttctcagacggggcggctgggcagagacgttcttcacctcccagacggggtcgcagccgggcagaggtgctcctcacatcccagacggggcggcggggcagaggcactccccacatctcagacgatgggcggccgggcagagacgctcctcacttcctagatgggatggcggccgggaagaggcgctcctcactttccagactgggcagccaggcagaggggctcctcatgtcccagacgatgggtggccaggcagagatgctcctcacttcccagacggggtggcggccaggcagaggctgcactttcggcactttgggaggccaaggcaggcggctgggaggtggaggttgtagcgagccgagatcacgccactgcactccagcctgggcaccattgagcactgagtgaaccagacaccatctgcaatcccggcacctccagaggccgaggctggcaaatcactcacggttaggagctggagaccagcccggccaacacagcgaaaccccatctccaccaaaaaaatacgaaaaccagtcaggcgtggcggcgcgtgcctgcaatcgcaggcactcggcaggctgaggcaggagaatcaggcagggaggttgcagtgagccgagatggcagcagtacagtccagcttcggctcggcatcagagggagaccatggaaagagagggagagggagaccatggggagagggagagggagagggagaggttgaggtttagcatttatatggaacatgttctgctacttgagataatgggattacaaccgctctaggagcttggagggctagaagcaaggatccagcaagtctacacacattccagaggacattatgtcagacatgcaagccctgcctcagctttcttcccaacactcagctttttcccaacagacactgtgctagaaatgactcttggactagtcaggattgacttattaaggtttactactgaacaaatagctctccacattttaattcagcaaaaagtatatttctcactcatgtcacagtccaatgcttgtcagccacctttcctttgcagctctccctcaagattcaagcctattctatcttacaaagatgccatttaaaagtggcctctggggggtggagccaagatggctgaataggaacagctctagtttacagctcccagcatgagcgaagcagaagacaggtgatttttgcatttccaactgaggtactgggttcatctcactggggagtgtcagaaagtgggtgcaggacagtgggtgcagtgcactgaccatgaactgaagcagggcgaggcatcgcctcacccgggaagcacaggaggtcagggaattccctttgctagtcaaagaaaggggcgacagacagcacctggaaaattgggtcattcccaccctaatactgcgcttttccaatggtcttagcgaacggcacaccaggagattatatcccatgcctggctccgagggtcctacacccacagagtctcactgatacaggagcacccagattcataaagcaagtccttagagacctacaaagagacttagctcccacacaataataatgggagactttaacaccccactgtcaacattagacagatcaacgtgacacaaaattaacaaggatatacaggaattgaactcagctctgcaccaggtggacttaatacacatctacagaactctccaccccaaatcaacagaatatacattcttttcagcaccacaccacacctattccaaaattgatcacatagttggaagcaaagcactcctcagcaaatgtaaaagaacagaaattataacaaactgtctctcagaccacagtgcaatcaaactagaactcaggattaaggaactcactcaaaaccgctccactacatggaaactgaacaacctgttcctgagtgactactgggtacataacgaaatgaaggtagagataaagaggttctttgaaaccaacgagaacaaagacacagtgtaccagaatctctgggacacactgaaagcagtgtgtagagggaaatttatagcactaaatgcccacaagagaaagcaggaaagatctaaaattgacaccctaacgtcacaattaaaagaactagagaagcaagagcgaacacattcaaaagctagcagaaggcaagaaataaccaaaatcagagcagaactgaaggaaatagagacacaaaaaacccttcaaaaaatcaatgaatccaggagctttttttttgaaaagataaacaaaattgatagactgctagcaagactaataaagaagaaaagagaagaatcaaatagatgcaataaaaatgataaaggggatatcaccaccaatcccacagaaatacaaactaccatcagagaatactataaacacctctacacaaataaactagaaaatctagaagaaatggataaattcctcaacacatacaccctcccaagactaaaccgggaagaagttgaatctctgaatagaccgataacaggctctgaaattgaggcaatacttaatagcttaccaaccaaaaaaagtccaggaccagatggattcacagccgaattctaccagaggtacaaggaggagctggtacccttccttctgaaatgattccaatcaatagaaaaacagggactcctccctaactcattttatgaggccagcatcatcctgaaaccaaagcctggcagagacacaacaaaaaagaattttagaccaatatccctgatgaacattgatgcaaaaatcatcagtaaaatactggcaaaccaaatccagcagcacatcaaaaagcttatccaccatgatcaagtgggcttcatccctgggatgcaaggcttgttcaaaatacacaaatcagtcaacgtaatccagcatataaacagaaccaaacacaaaaaccatatgattcctcaataggggcagaaaaggcctttgacaaaattcaacaatccttcatgctaaaaactctcaataaattaggtattgatgggacatatctcaaaacaataagagctatctatgacaaaccaacagccaatatcgtactgaatgggcaaaaactggaagcattccctttgaaaattggcacaagacagggatgccctctctcaccactcctattcaacagagtgttggaagttctggccagggcaattaggcaggagaaggaaataaagggtattcaattaggaaaagaggaagtcaaattgtccctgttggcagaagacatgattgtatatctagaaaaccccattgtctcagcccaaaatctccttaaactgatgagcaacttcagcaaagtctcaggatacaaaatcaatgcacaaaaatcacaagcattcttatacaccaataacagacaaacagagagccaaatcatgagtgaactcccattcacaattgcttcaaagagaataaaatacctaggaatccaacttacaagggatgtgaagtacctcctcaaggagaactacaaaccactgctcaatgaaataaaagaggatacaaagaaatggaagaacattccatgctcatgggtagaaagaatcaatatcatgaaaatggccatactgcccaaggtaatttatagattaaatgccatccccatcaagcaaccaatgactttcttcacagaactggaaaaaactactttaaagttcatatggaaccaaaaaagagcccgcatcgccaagtcaatcctaagccaaaagaacaaagccggaggcatcacgccacctgacttcaaactatactacaaggctacagtaaccaaaacagcatggtactggtaccaaaacagagatatagatcaatggaacagaacagagccctcagaaataatgccgcatatctacaaccatctgatctttgacaaacctcacaaaaacaagaaatagggaaaggattccctatttaataaatggtgctgggaaaacgggctagctgtatgtagaaagctgaaactggatcccttccttacaccttataaaaaattaattcaagatggattaaagacttacatgttagacctaaaaccataaaaaccctagaagaaaacctaggcaataccattcaggacatagtcatgggcaaggacttcatgtctaaaacaccaaaagcaatggcaacaaaagccaaaattggcaaatgggatctaattacactaaggagcttctgcacagcaaaagaaactaccatcagagtgaacaggcaacctaccgaatgggagaaaatttttgcaatctactcatctgacaaagggctaatatccagaatctacaatgaactcaaacaaatttacaagaaaaaaacaaacaaccccatcaaaaagtgggcaaaggaaatgaagagacacttctcaaaagaagatgtttatgcagccaaaaacacatgaaaaaatgctcatcatcactggccaccagagaaatacaaatcaaaaccacaatgagataccatctcacaccagttagaatggggatcattaaaaagtcaggaaacaacaggtgctggagaggatgtggagaaataggaacacttttacactgttggtgggactgtaaactagttcaaccattgtggaagtcagtgtggcgattcctcagggatctagaactagaaataccatttgacccaaccatcccattactgggtatatacccaaaggattataaatcatgctgctatgaagacatatacacatgtaagtttattgtggtagtattcacagtagcaaagacttgaaaccaagccaaatgtccaacaacgatagactggattaagaaaatgtggcacatatacaccatggaatactatgcagccataaaaaatgatgagttcatgtcctttgtagggacatggataaagctggaaaccatcattctcagcaaactattgcaaggacaaaaaaccaaacaccgcatgttctcagtcataggtgggaattgaacaatgagaacacatggagacaggaaggggaacatgacacactggggcctgttgtggggtggggggctggggaagggatagcattaggagatatacctaatattaaatgatgagttaatgggtgctgcacaccaacatggcacatgtatgcatatgtaactaacctgcacgttgtgcacatgtaccctaaaacttaaagtatgataaaaaaaaaaaaaagtggcctccatggagcttgcagtgagccaagatcgcaccacttgcactccagcctgggcgacagagtgaggctccatctcaaaacaaagggggcctccaaaagagactgtttgctgaatgaatatgggcaaaatgcaaacgtaatagaaagaattagaaaacagggtagcatctgagtagaggtgagactgtattgtttgaaagctctttctgggttggacctttgcagaaactctgcaaacccagttccacatgcatgtgcatccatacacatacactccttcaaaagcctcatatgttatcttggaattagttgttcttatttctcactcataatattgctgtctagtaatagcatgagtaactgagttgagtctgtatattaatttggatgtatcaagttatttttcaatgaagaaattgacttacttgcaaattgtcagctaggcaagagagagaacatttgagtcaaggtttaaaacattgtataagtaattttaatacaacacaaaacatatttgctatattcaaaagcaattaattataagacacaattgaagtagggggacattaaaataaaattacattgttaactacattttaaaagtaattcttgcattatttgtaaaactgattcagtaggaggaaattaatactcagtttataaaagtattcatgttttcctttaggcatttcttctagcgcattcaaaattatccaatttacaagtaattcattttaagttaacttctagcatataaaatggttgtgttgaaacactgtcttcagaattttatttttaaaagatactattttagtataaattcacatttatagttgaatgcttttgtgaaagatattagtctttaaaatattttacaggctggccttgttggctcatgcctgtaatcccagcactttgggaggccaaggcaggtggatcacttgagcccaggagttcaagaccagcttgagcaacatagtgaaacctcatttctacaaaaaatacaaaaattaccaggtgtggtggcacacagctgtagtccctactcagaaggctgaggtgggagggtagattgagcccaggagatagaggctgcagtgagccatgattgcaccactgcactccagcccaagtgccagagtgagaccctgtttcaaaaaaaaaaaaaagttcgacagttccaaaacacattaatgttaattagagtctgctaagttgctataaatacaacaaaaaattcaatggcacaaacaaaatatcagttgcctctcatgaaaaagtccaagattagcaggtgcagattggaagagcaaaattgactcagggagtggtagaaggagagcaaggatccaaggcatgagccacaatccatgcctcttacaacccctcacatctgtcaaatagaacccttgtctggatgggcccttgttctaacccagtgcctgaaatcttgtatctgttatattggtggttctacatgactttatatttgaaaagttacattttagaagtggatattttgtatttttggttactaatataactgtgtgaaagcactattaaaaatacttttatttcgttaaaattacctgtttatgttttggtctcctccactaatctgtaagcccctctgagtaggaaacaatacattcctcactatactccagcactcagctcagtgcatggggatttaaaagtaaatttcttccagaagtgtagattcttagatccagattgtgaggaggggaggagagaggtataggtgagccgggggcggaagtgggggcaggatcatcttaaggaaggagaccactactactactgctgccctcctcccaccaccttgcctcgttcacaagacaggaggagagaaaaagcaaaaagttggaaaaaaaaaaaaaaaaagtaagataaatagccagacaaccttggcaccaccacccggccctaggagttaaaaaaagtaataataataacatcaacccctgacctaaactacttgtgttatctgtgaattcctgacactgtatgaaaaaagcattgtagcccccagtcacgtttcccactcttgtttgatgtatcacgaccctttcacgtggaccccttaaagttgtaagcctttaaaaaggccaagaatttctttttcggggagctcggctcttaagacgcgagtctgccgacgctcccggccgaataaaaacctcttccttttttaattcggtgtctgaggagttttgtctgtggctcatcctgctacaatctgtttgaacagatcacctgaaaggtaggtgttcatttaagcatttggagtagaactggctttggggttgttgacagttttcccttcactaggaagtgtttgtcactttaaggcaaaaaccaggaagttaaaagtggatgcagaagcgagcacagacggggctaggggtttcagagaaagtaattgagagtgctggcaacagcagctgaaatatagagaagttgtaggattaactttttcgcccaaagcagcttcagcccacgttttattcccatcgagggagggagaatgggtgccgctgagtgggcgggggagtggtccctgaaaggaggtggagtgctacagcccctccccgttggctctcgctgtttgtccgttgttggtttatactaatttgacaacagccgcctgttgagtctcctccagatcgcagctgaaggatctgttgagcgcttcaggaaaggcggtgagatccggtaccgcagcagagcactctcagctctgggtcttgcaggcgcagggctcccccatgccagcagaaagatttcctctggtgaagaggaccgtcgaatctgtcctcctcaagacacctcttgtacagaatttattcgaatgccacggccaaggtcttccttgaaaaatgttaaccgatgtgtgctttttgtcttttgtcatcctttctttaggacaggcgacactaacaggtgaagatctcgggagaccatgactaagaaaagaattgctgtgattgggggaggagtgagcgggctctcttccatcaagtgctgcgtagaagaaggcttggaacctgtctgctttgaaaggactgatgacatcggagggctctggaggttccaggtacatacatctcctagtcccttaatacttgaaaccctccctgcaactaggtgcatacgacagtttatcttaacagtgtcaggtggccgggcgcggttggcacacgcctgtaatcctagcactttgggaggccgaggcgggcggatcacgaggtcaggcgatcgagaccatcctggctaacacggtgaaacctcgtctctactaaaaatgcaaaaaaattagccgggcgtggtggcgggtgcatgtagtcccagctactcgggaggctaaggcaggaggatggggtgaacttgggaggcagagcttgcagtgagccgagatcgccccactgcactccagcctgggtgacagagcaagactccgtctcaaggaaaaaaattaaaaaaagatagttaaacttattatattccaaagaataccagccacctttattgatctccaaactgacatgcattggatttgctgggtttgcttttatttttacattttttgaaggagaatttttattctttttatttacagaaaattcagcagtgtacatttaacccagtttagtggcaacttctttcacctttcccttttccactttggtgattcaaacccacagatttaggacccaggacattgcctccccattggcagcgaatctcatcatatctgtccatgtaattggttctgaaaactgccaccaacttagccacacctcctttgtcttcctagtgaacctgtgtgaaggcaacgtcgtgcaggtcttcctgtggactagacatcccaatcttacctcacccttgataatgcagtaagggacccccattttgggacacagggcaggcaggaagacaaccagctcgatgggatccgcatcgtgtgcaatcaccaccagctgagtcttcttgttctccaccaaggtggtgattgtgttaacccctgctggaaagacgggtggtgtctcgatgggggtatcccctttgctagcagctttcttctcagtccaggacaacagtctctgcttcttctcttgttttgtctctggtctgtgcttgtgggcccgcgtaagcagtcagtagctgtttggcagtgcgaagcctgggtgaactggttaatggcaggaagtgctttcagcagcttataaaaggatagctctttgctgctgcaacctgatataggggggccatctgacaaagagggtgaggtctctttggggctgtatgtcctgtccaatgccaaaattcttaggctttttctcaaacagaggattcacaacttttttggcttcctgcttcttcactgatagcaggggcgggggccgccttctttcccttagccttctttcctattggcatcttgggtggctagaggagaacgggtttgcttttaagctagttttctgaacatttaatagtattgaggtgccctagataagttttacgtttcatatttcataaaaactaacacattgttggccagctacataaaagtggctttatagcatttcttagttgaaccgaaatacaatccttttgcaccctgactctgttttggggactaattttatgtgacaatcatccttattcagatctggagtggatccccttagctgacctgcatacgtgtatcatcatcagtcttggacatgggctaaaagcctgttgtttttagtaaacagcagaaaattctgctcttaaaatccagccacaatatggtatggaggttaagaatgcagtcttaggctcaaaccttatttctgtcacctactagcagtgtgactttgggcacatcattaagcttctctgtacctgtgtttcttcatctttaagaagtggataataatagtatccactttatagagttattgtcaggagtaagtgaatggataattatgccaatcacttacaacagtgccaggaacatagtgttacatgttggttattattcagtaggcctaggatgggactcacacatgtggtgtctttactaagcatcttagccagttttggcagttactgaaaaggcatgaaatcaattgaggatgggaggaggttgggagggcatccatcatcttgtctgattatcaagtttctggtttttatctccaatgtggtttaaacttattctctgctaaagacttaacgtggaggtttttcttctgattatccacttggcaaaattttaacactttgtaaactgcttccttgaaaataaataagctgtgtttcatcataacgctctgacttctgttccaacagaccacacctgtgtggttcaccgttatatttctagagccaagcatgtattctactatctccattttttaaagctccccagatgattccaatgtgcagacaacagttcaaagagagtttctattccatgggattttgaaaatctgacaggaacagaagccccaaactgtcctcattcctcccatttaaatttttctcctttcttctgtccttattacttcttccaatcccatcagttccaatttccccaacttccatcccctgctctctctctcttttctttttaggcagagtctcactctgttacccaggctggagtatagtggcgtgatctcagctcactgcaacctctgcctcctgggttcaagtgattctcatgccttagcctctcaagtagctgaaattatacacgcactactacgccttgctaattcttgtatttttagtaaagatggggtttcaccatgttggccaggctattctcgaactcctcacctcaagtgatctgctcacctcggcctcccaaggtgtggggattacaggcatgagccaccatgcctagcctctcttttcttacacagacttcctgctcaaatgtgtgagccttgtgcctaggtaggaaatataatcagtgtatagagtttgtagagagaagatttattcatcaatggtagaaaattgtaaaatgcaggagcagaagcttctttttcttctactcactaacccaatactgctctgtgctcactcttttggaaagcagtggattggcacagtggtaaaccttacctaagttccaatcaggtgtttcgaaggacttgaaggatgttgttgacacaggataacacttgttgtggttagtgatttgaaaaagagttgaaatataggagtacctcaaagaggtgagatctgtcattcatttcactcagtgatcccaacagacctgctgtggataggatggctctactctttgtaaacgttgaacttttggaatacacatacagacttgcatttatcggtacctcataaagtattttattacagagggactttctaaatatctcttgaatgaataaatgaaatgaaattcagaagttaggaacatgcctcacctgctctccatacagcaaacatcttaattccaaaatgaccttgccattcattaatttaccttaattaaaaaatatatacacttatgtacaaacatgtttaaataagcttttaattttagaacagttttagacttacaaaatttattaggaagataatacagagaattacagtacacctcatgtccagttaccccattttacattagtatgatacgtttttaaataatgaatgaaccaatattgatacattattattaactgaagtccatactttattcagatttactcagtttttcctaatggccttttgctgttccaggatcccatccaggatactgcattacatttaatagtcatatctccttaggctctttttggctatgaaatttcttagactttccttgtttttgatgcccttgatagttttgaggattacttactggccaggtatgctgtagaatatccctcagttgggatttatcttatttttttctcatggttaaattggggttatgacttttggggaggaatattataaggtgccattctcctcacctcccatcaagggtacatactatccacattatacccactgtttttttttttttttttggaaacttaaaactcattttatgttattataagtaagaaattagcattcaatatatgccacaatatatctttgttgaagtgtaagtttgttccacttttctatttttcattttccaacttttattttaggttcgggggtacatatgaaagtttgttacaaggataaattgtatggggctggtataactgctagccatatgcagaagattgacactggatcccttccttttgccatatatgaaaatcaactcaacatgcgttaaaaagttaaatgtaaaatctaaaactataaaaaccctagataatatcactattgatgttaaccttgatgtcctggcttgaaatagcatttgtcagtttttgccacactgtaaagttgctccttttttctccattgccatactatactctttggaacaaagtcactatgcacagcccactattaaggacaaagtcttctattctaggccttctgtctttccatatgaactttagaatccatgtgttagcttggattctaaaatagcttgctgggatgttgattgagattgcattgtatctataggtcaagttggaaagaactgacatcttaacaatatttaatcttctagtctatgaatcagaatatctctccatttatttaaatcttagactttcttcatctgtgttttctaattcatgcttataaatcctatacatattttgttatgtttatacctacgtatgtaatttcaggggtattactatagatggagtttttaaaatttcaaattccagttgttcattctagtatataaaaaagcaaatgactgggtgcaatggctcatgcctgtaatcccagcactttgggaggccgaggtgggtggatcacgaggtcaggagatcgagaccagcctggccaacatagtgaaaccccatctctactaaaaatacaaaaaattagctgggcatggtggcatgcgcctgtagtcccagttactccggaggctgaggcaggagaattgcttgcacccgggaggcaggggttgtggtgagccgagattgtgccactgcactctagcctgggcaatagagcgagactctgtctcaaaaaaaaaaaaaaaaaaaaagcaattaacttttgtatgttaaccatgtatcctgcaaccctgctgtactcacttgttgactctaggagtttttttctttttttcttactttttttttttaatcctttgggattttctacatagacggtcaggtcatctgcaaataaaaagttatctttattccttcccaatccgaatatcctttacttttctttcttctattattgtactagctaagacttctagtgcaatgttccataggagtggtgagagaggacatccttaccttgttcccagtcttaggggaaaagtgtctaatttctcactgttaagtatgatgttggttataggtattttgtagatgttctttatcaaattgaggaagtttctctccattcctagtttgctgagagttttcaccatgaatgggtgttgtacaaacaacattttaacaaaaaaaaaaagaaaaagaaagcaatcctactgccttaataagtcgactggttttctgtattttcacatttttttctatttcaaataaatgaagtatactcaaaagagacatgtctaacagggagcgattatacaagtataattatatacccatagatagacataatattacatatttggtgattagaatgtaaatttaattttacagttccctttgtacttcattatatcatacgccatttttaatgttcctgcacagacttcaaaatcatagtttttggtgtctccaaattcaatttccataattcattaactaattcatttcaaagcatttattgcacatccaatacacaccaggtcctgataatagagatttaaagaaggatatggctactctcgggtttctcacagtcatggaatcaaatgcctgataatatagtgtgtttaagttatctttatagaaatatgaacagagagttttgggagcttggaggatgaataggggaatctaattctatggagaaattagaaaagtcttgttgaaggaagtgacatttgatgtaactcttgaaggacaggaaattttccagatgaagaaatagtaatatttacgaaggtttaaagttgtgcaagagcctagagtgtttcaggaacaatttaatgacttagaaatttgagattaaataaggacaacactggatgaagattaaaagataaaccgggctagattgtgaaatgtgctaaatttcaaaataaggaattttgttttccatatggaatcaagagaaactattaagcagtggagtggcaggatctactttgtatttatcaggatacccatggagtggtgtggaaggtgaattctgcatgttgaggctgagcgcggtggctcacgcctgtaatcccagcactttgggaggctgaggcgggcggatcacgaggtcaggagatcgagtccagcctggctaacatggtgaaaccccgtctctactaaaagcacaaaaaaaattagccaggcatagtggcgcgtgcctgtaggcccagctacttgggaggctgaggcaggaaaattgcttgaacccaggaggcagaggttgcagggagctgagatcgtgctactgcactccagcctggcgacagagtgagactccatctcaaaaaaaaaaaattctgcatgttgagatactataatttactaaaccattcatctattttgggaacatttaacattgttactaattaattgctatttaagttatacaaaaatatatctatgcatttgactttatattattttgaaatttttcttgggacaaaattttgggagatacatatatcttattgaagtctttttgagataaatgttgatgtattttattagttttcttatgcattttgtgaaacttacatcttattctgtatatccctttctcaatacaatttgatatgcatccattaaacatttattgagtgctatttatcattgtggatgctgtggggaaaaccatgagtacaattcaaggggcttacaatctagttggagagataaggaatacactacaaaacattatggaggtctttgaatcctaagctgagaaataggaactttattctgcaggaaatgggaaaacatctaaaattttaattagggcagagatttagtccagccacaccttagagagaacactttggttgaaacaggtaggctagattagaagaagagacttcaaaggagtcttatgaaaatgttattagcagttaaagaaatgagatgttggattataggtcagagaaatgggaatgatcaatttaggattcctagattgaataattaagcaataaaaatgggagaaaaacaatcctaaaggtggacaaagccaacaaacaacaaacactctcctttgtggctatttaatgtttcataatactcaatatctcaatatctgttcatttctagaataaaaagggaggaggagatccaaattgattaaggtgattttccatagtcaaaacaatttttgaaaatctaaaaatttgaaaactcctcatttgtgaaatctcggtgacaggctgggtagattgcatcattgcattactttatgtgatcaccacaacaatgctataagatagttaataggaagtttttttttctttttctttttttttttttttgagacggagttttgctcttgttgcccaggctggagtgcaatggcgctatctctgtcaccgcaacctccgcctcccgggttcaagcgattctcctgcctcagccccccgactagctgggattacaggcatgcgccaccacgcccggctaattttgtatttttagtagagacagggtttctccatgttggtcaggctggtcttgaactcccgacctcagatgatctacccacctcagcctcccaaagtgctgggattacaggcatgagccaccacgcccggcctcaataggaagtttttgaggatgcaaagaagtttgttgtaggggaaagaacactgaattgaggattaatgtcatttaatgcagtgcatctcagtttgcatgagcatctgaattctgaatcacatgaagattttgctaagatgcaggttctgattcagtaggtctgaggtggggcctgagagtctgcatttctaacacaatctctcaagggaagccccagctgctagtctacagaccatactttggtagtaaggatctagagcagtggttctcaaatttcagttgtttttttgggcatttagcttgtctcatttttgtattatgaataatgctggtattaacatcctttaacataaatcttcctaagcgatgctgaatatttttttaaaaggctaggtaaattgcaaggagtttcatatacattttaacactgctctccagaaaacgctggagatgttatactctttccagtatatggaaactgttacactctttcctgtgtatcttcccattttgcctcattgttactcatttaaaagactattactcagtgttagtaactttctgttcacatgtttagaacttcagctgggatagaatagaataggtagaatttctggggactggccatatattttctgtcccagacattctcttcatgtggtgaggctggacttcctcaagctatggtgatctcatggtagttggatttctcatatggctgctagcttctaccagagtgagctttctgagacccaggcagaatccgcaaggctacttatgacttggtcttggaagccattcagtgtcatttcaactgtatgctgttggtcaaaagcaagtcataaagataactgagattcaaggggaagggactacataagggcacaaatactggaaggtgtgtgtgtgatttaattgacacttctttcagaaaactttttcagatgtctattggctattataaaacatgaagatgatcctcaagttgctatgaatactttctatttattgcaggaaaatcctgaagaaggaagggccagtatttacaaatcagtgatcatcaatacttctaaagagatgatgtgcttcagtgactatccaatcccagatcattatcccaacttcatgcataatgcccaggtcctggagtatttcaggatgtatgccaaagaatttgaccttctaaagtatattcgatttaaggtagaaaattgtgtgggtatctttgtgtttgaagttgtttgccaagtaaatgaataacgtggtttcagttacctatgtttacttctaaagattggcttgatttgcacatgtatttatcctacccaggcaaaaactccattctttgtcctcctttgctcctcaaaaatattcaagggacagtctctctttcatatattttggctgcagatacaggaagccacctggcagagtgttttcattaccttcatttcacattatttgattgcaataaacagatgaagggaaatgttttccccattacagaagggaactgataggtatgggaactttaaaactctctggttccacaacttgtccattactgcttagcccttttgtactttctgaagtactttccaatatatttgtttacatgaacatcataaaaacccagtaaagtatagctcttgggtagttaactctggtgtagaggggagaacatggaattgcagaataaaaacctgaattctggtgcttgccctaccactaactaacttagatgttagacaagcaatttcctcaatttcaatttttaaaaattttcttgtttgtaaaacaagatgattgtaccagatcacttctgtggttccttcctgctctaaagtattctaggacttttctataatttctgatcacgaccataaaagaattttatggtcagatatttctgacagctggcaaaaagcccaaaccttctgccttctgatcatcctgctaagtcatgcctttttctgcttaatgacaataagaaaatgaaaacatctagtgaacttctaaagtaagtcatttacattccagtggtgcttctcttcatttatttaaacaatacttattgaacaagtttgctaccatactaagcattgaatatgcaaagacaaaaaagaaaaatcagtaactttatagtctagttaaggggataaaaatgaagaaaaattttattataaatataattaataaaaatagagagttacatggggacaaatgctagagatctatacgttgcagctcggaggaaagatgttgaacccatcaggacatgaaatatcaggttccagggaagttttcttaaagaagataaagttttcttaaagctgagtcttgaaggatgagtaggagtctaccaaataaggaataaaagggtgatctcggcagaggcaccagcctgtgtaaaagaacatgatagaggaactataaatagtgctggattgctagtgcatgcaggggtggtttgtctctctttttttttttttgtttttttgttttttttcagacagagtcttgctctgttgcccaggctggagtacagtgacacgatctcggctcactgcaacctccacctcccaagttcaagcaattctcccgcctcagcctcccgagtagctgggattacaagcatgtgccaccacacccactaatttttgtatttgtagtagagacggggtttcgccatgttggccaggtgagttttgaactcctgacctcgggtgattcacctggctcagcctcccaaagtgctgggattacatgcgtgagccaccgcacccggccgggatggtgtctctattagtccatgaagacattatggtcatgggcccgtagaagcacatagtgtttccttaacctaagtagggtaacccatatttattattttttataaagctaaaaatcataacactatcctgtttcacagcctctttctttatagttctttgtaaaatgggtatttatgggagccaaagggagattcatttatataaaatgagagccactgaggtgtttttctaccctaccaggaaaaggagccctatagctcagtcacttatttaaaggtagccaggagaagagaacctagggtaagaagacatcagaaggtctcaggacatataggggtcaggagaagaataggcatttagtgcatggagtgtcataaaagcacaggagaagcccaggctttactcaggtgttacagtgccttaggacctggaccaagagacctagtgacttgcacttttctagaagaggagggtacattagcctgccaacactatgttatttttttctgtcttgtggaaattttctcattctgactacagccccaaacagttcttatttgtggagtatgaaaatcaaatatccctgcatgggtcctattatgtgatagtgcctgtgatatcagccctttgtgtaacactatgcaaggagagtcatgtcagggatgtcccctgtggttatcacttttcttttcagaccactgtgtgcagtgtgaagaagcagcctgattttgccacttcaggccaatgggaagtggtcactgaatctgaagggaaaaaggagatgaatgtctttgatggagtcatggtttgcactggccatcacaccaatgctcatctacctctggaaagcttccctggtgagcagcttaccaggaaggaagacccttgacccatgcctgtgacctgacccctgaggaatgggaggattgtggtctgagtaattcctactttggaatgaagtaagacttatcctaattattcttgttccccagaaggatgttggggtaacttgtattactgccatttttgtaattttggagattagagcaaaatttgcagtctatttagttttacaatgactttagtcattgtatcaaatgactggagtatcaaagggaagaatgtggagttcttgaggagcattaggtagaataaggaatttttcagcagtaaacacaaatattgagtttctaaggaaggaatgaaagcttgaagaatttcagtctttggcctggattttcatttaaaaaaaaaagcactctatactctaaagtatataagaatatatgtgctgtaagtgaaatgcgagtaggtatttaaggggatgaaaagataaaagagaatggaggttttctgaggcagtttatatttatatctctaaatccaaaatacaaacacatcctgagttaagcaaagtacatatgacaaggaaatcacaaggtactactctgaggctatgggaaaagaaaataggcaaaaatactgagaaaggcaagaaagtagctgagtaaagagaacacttggagaatatatgcttaaacttaagtctgcaaaaaaaacaaatgacttgacaaatgatatctatcatgtaaaccattacccaataattattttcccttctcttgcaggaattgagaagttcaaagggcagtacttccacagtcgagactataagaacccagagggattcactggaaagagagtcattataattggcattgggaattctggaggggatctggctgtagagattagccaaacagccaagcaggtttgaatcactcaattattatttacgttgcttaactctagcttcagtttctccaaggaagctgcaggtggacccaacagagaatagggatacctgcacatagcccttcagtgccagtggcaaatatagggcttcgtttcattacctcagttggcaacatggtgattggtgctaatagaggagttaaggctaccagttagagttccattgtgcaactagcctcacaccaaggaactggatcagctaaagtctgggctcattatcctaatcaggcatcttctcagagtgtgcctctggctttgataaagacaaagtaattgctgggagaggttgttagaaagcagtattgagagcgaggatcttcaattggccagcagaagtgctatgttcttacataaaggaaagcacgcgtgatcattggaaacttttcactcataggatggtgcttgaattttcctttacactccccaaatggaaaaaagtatcaattttatcttcccaaagacaatgtgggtatccgtatagcgtccaaactgtagcacatgcaagcagcttgccctggcctttgcatacagttaggtaactcagataacattcattctaaagcaattatatctccttggctttttgttttgtttgttgtggtttttgtatagcagactttgaactgagaagcaagtgtcttcactataaattcctggaaaaagacatgccaatattgtattttgttattaatgtctgtgttgaatcaaactctattggcaataggtaaatgtcttggttgttctttagtaactttaattaagccatgcttctctataaagatgttttaaattgttttattttaattagaagcttagtgctacaattctgttaaatgactcttactcagcaactttgtttgaaaaacacttcttctcattgctatcctcatctataaccacaaaaattatttcatatgatacttcataaattaattcaacagacatttatcaggaaataatcatataaacaaggattaaaaataattaaaataattatataaacaagggttaaaacgtatgtgggtgttatggtagaggaatgtgcaaaatgtggagtggggacccatggcgagagccatctttaatatcattggcttgtcaaatgggcagttctaagggagcttggccttacctgctctggggaattgcaggttgccacataacaaagcatttctgtgtgggtacagataaggtggctgtgtctgtgagaaagcctgggaaaatgcaaaggaaaactatgtctgcatagcagaggcaatactgtcacaccactaatccaagctgaagaaactcaattgctgagttctaactttttactttacttgtaaattgtattcatgatgatttgtttataaatcaaaaactttaaatggacctatatatttcagtatatcatggaagtttttcgtataattcttgtagatgcttttgtaaagagaaaacattcctttttttcaatattaatttcatataagattacactgattaaacaattttccttataaatctgatttgtaaatgttatttgcttaaaacaaggtatagatggaaaactgaaataagaaatatgacagccattaagcacttatcaagtgtttactatataccacaccttttacaaaaacactgcttaattatcacaacagccttgtgatatatgtattattattattactatttcataaataggaaatcttttcattagggctctgagcgttttcattactcagcagaagttatatagccagcacacaaaattgttcagtttctaagaccatatatgctctttcaactgtgactgtggaagtacataattatcagagtgcttacagtcactttaggcgagataagatttgtgaagtaaacaattatccctctgtagacaggtcattttagacaaaaagactatgaagcaatgtgcgtatataacttaaaatctggaagccatctccagagagtttcataatgtaggaaaagtgattcttttgccaggtaactgcatatcaaatctttatcagttctgaacatgaactttagccagaggaggacacagaaagactgactagcttcctgttgttccactagcaatcttatttttctccattaaataatcaatcaaacatttcttaagcacaggctttggagttagtcagacctgggttggaaattcacctctgccacttactagctctgtgatctcaggcaagttattcatcctttccatgcccctcatctataacatgggtgtaataatactttcctcaagaggttgttgtaatatagatgaaggacctagcacaatgacttaaaggtcacaaatcccaataaatggaagtgatgataatctgctgtggatgtgtaggctttatctcctatccttgagaaaacacatttgaagaaacagaaattaggagtgtagaaagtttaatatcaataaaaatgataaatagcaggggtttttgtaataatgccaacaatgtcaatggcaaaagaatgagggttttagattaaatggtctccagctgctttcaactttaccagtacatgatttttaatgagttctacaggtgataagtgctagagaaattcagaggatggagagaaaattgtcagcctgaatagtcagcggtttcttcatggaggaggcagtcttgatctgggtcttaaaaatgaacaggcttcgcagagttaagaggaaagaaggcatttcaggcaggcataatagcactaaacagaaatacaacggtgtattagagcaaaacatattcttggacagtagatacaccaatttaattctaagtttagtgtttgggaaggaaaatggcaggaaacaaacataaaaacccacaaagattgtgcaggggctaaaaagccagactaatgagtttgaactctttttttttttttttttttttttgagacggagtctcactctgttgcccaggctggagtgcagtggtgcgatcttggctcactgcaagctccgcctcccaggttgacgccattctcctgcctcagcctcccgagtagctgggactacaggcacctgcaaccacgcctggctaattttttgtatttttagtagagacggggtttttcagtagagacggggtttcactgtgttagccaggatggtctcgatctcctgacctcgtgatccgcccgccttggcctcccaaagtgctgggattacaggcgtgagccaccgcgccgggcctgaaatgattcttgaagaaaatgggggtgcttttgaaggtttacgaatctgagtgacaaaagcaaacaatttcttccatgccccaggttttcctcagcaccaggagaggggcttggatcctgaatcgtgtaggggactacggatatcctgctgatgtgttgttctcttctcgacttacacattttatatggaagatctgtggccaatcattagcaaacaaatatttggaaaaaaagataaaccaaaggtttgaccatgaaatgtttggcctgaagcctaaacacaggtatgttcccaggatgggagtgcagggatagtggccaaagcacaagaataaggactcttcacactggctaatagtaaagccacctctacccatacattaagaaaacccacagtggctgggcatggtggctcacgcctgtaatcccagcactttgggaggcggaggcgggtggatcacctgagctcaggagtttgagaccatcctggccaacacggtgaaaccccatctctactaaaaacacaaaattagccaggtgtggtggcacctgtctgtagtcccagctattcaggaggctgaggcaggagaatcacctgagccctggaggcagaggttgcagtgagctgagattgcaccactgcactccagcctgggcaacagactctgtctcaaaaagaaaaaaaaaaaaaaagaaaagaaaaagaaaagaaagcctatagactcatagaatctgaaatcagatttctaacttgtacccacagatgtccaagatctattggtctgtgggtttttaatctagaattctctttggcagtaacccttttctcattcccccaggtatcagttctttttgcatgatacccaacaacaaaatgatagctgaggacagtgcgtcatttactcattgagtacctgttatgagccaggcatcatacatgggcatgaaatacagagagaagacataatagtaatagtaatagaaataacactcacctttctgaggactttctataagataagcacagtgctaaatgagttacatgcagtatctcacttaatcctgacaatagccctataagttggtactatttttgtttcacagtgaggaggtctatgcaaacctaccccaaaggctgaggaagctgagaggctgaagaaagaagctgacagattcagtttcttagaaacatttcatagggacttatgaacagaagccatgtctgtctcaggcagtggtgagacaagatggtagatccccataccattatctcctgacccagggatgatataccacaggggaggggcacacatacttcagagcgaatgggtaggagtttgccctaagggtgggatttacagtaagtacatactattaaacaacagattaactggaaatctcagaggtattcccgaaaccagggttgatcagaagtcaatatggtagattaacttctaagatggagttgctttggcctccacaatttttgatctacattttacaaatataaaaactgagatgtagagaaactaagtaattttcccgagggcaacagaaataataaatggcagactcaaaaaatagatcttaccttaaatactctaatgagaagaaagaggacagattataatgaagaaatacatacagtgttatgaaagtacaaaggatggggtcctcagagaaccagggagggaaaacatttctagaggctgattttaaatttattttccctccaactttttatttttgaaaatgttcagatctacagaaaagttgcaaaataataagtacaatgagcacccatatatccttcacctggattcacctgttaagtttgctatatttgcttcctttccccatctctgtagataggtccatacatatagagcatacatacacaagtacatttttttctgaaaccatttgagtacgttgcagtcattaagacactttaaatacttcagtgtatattgtataagaaaaagggcattctcctacataaccatcatataattatcacacgtgggaaatttaacattgataaaatacattaatacattggcaatatccccagttgccccagtagtattttttatagctttaaaaaaatctttttaaatctagtatcctgtcaggtaatcaatcacaccattacatttagttgtcatgtctctttaatctctctttttatatatatatatttttattatactttaagttctagggtacatgtgcacaacgtgcaggtttgttatatatgtatatatgtgccatgttggtgtgctgcacccattaactcgtcatttacatcagatatatctcctaatgctatgcttccccactcttcccaccccacaacaggccctggtgtgtgatgttccccttcctgtgtccaagtgttctcattgttcagttcccacctatgagtgagaacatgcagtgtttggttttttgtccttgcgatagtttgctgagaatgatggtttctagcttcatccatgtctctacaaaggacatgaactcatcattttttatggctgcatagtattccatggtgtatatgtgccacattttcttaatccagtctatcattgttggacatttgggttggttccaagtccttgctattgtgaatagtgccgcaataaacatacgtgtgcatgtgtctttatagcatcatgatttataatcctttgggtatatacccagtaatgggatggttgggtcaaatggtatttctagttctttttgaggaatcgccacactgtcttccacaatggttgaactagtttacagtcccaccaacagtgtaaaagtgttcctatttctccacatcctctccagcacctgttgtttcctgactttttaatgatccccattctaactggtgtgagatggtatctcattgtggttttgatttgtatttctctggtggccagtgatgatgagcattttttcatgtgtttttggctgcataaacatcttcttttgagaagtgtctcttcatttcctttgcccactttttgatggggttgtttgtttttttcttgtaaatttgtttgagttcattgtagattctggatattagccctttgtcagatgagcaggttgcaaaaattttctcccattttataggttgcctgttcactttgatggtagtttcttttgctgtgcagaagctctttagtttaattagatcccatttgtcaattttggcttttgttgccatggcttttggtgttttagacatgaagtccttgcccatgcctatgtcctgaatggtattgcctaggttttcttctagggtttttatggttttaggtctaacatttaagtctttaatccatcttgaattaatttttgtataaggtgtaaggaagggatcaagtttcagctttgtacatacggctagccagttttcccagcaccatttgttaaatagggaatcctttccccatttcttgtttttgtcaggtttgtcaaagatcaaatagttgtagatatgtggtattatttctgagggctctgttctgttccattggtctatataagaaataattctctctttgacatgggctttctttttaagaacccaaggcattgttttgtagagagtctctaaatttagacttgcataatttttttcctttattatattcaggttaaatgtttttgacacatatactacataggacatgttgatcttagtgggtcacatcaagaaccacattatgtcagtttatctcacagtaataatgctaaatttgaccacttagataaggtggtatagataccatcaagtttctccactataaagatattttttcccgttgaagttaatcagtggggtgacatttggagactgtgtttcctaaaaacctttcacctaattattttagcatgcatgtttttggtggttgcaaaataaattgaggctttgttgaataataggagatagccaaacaaatagagcaagggtatagcattctaattataaagacaaagtcttggaacagcaaaaaatacattatgctccaggacttgcatgtagtctggtatggctggactatatagcaaagatggaagagtgactgaatgtatctccaggttcatcaggcatgaaaacctttggttcctccgcggtcttctgagcggtcacgtgaacggcttcctgcaggctggccatggcgcttcaagttcccaaggctccgggcttcgcccagatgctcaaggagggagcgaaacacttttcagaattagaagaggctgtgtatagaaacatacaagcttgcaaggagcttgcccaaaccactcgtacagcatatggacgaaatggaatgaaaaaaatggttatcaactacttggagaagttgtttgtgacaaatgatgcagcgactattttaagagaactagaagtacagcatcctgctgcaaaaatgactgtaatggcttctcatatgcaagagcaagaagttggagatggcacaaacattgttctggtatttgctggagctctcctggaattagctgaagaacttctgaggattggcctgtcagtttcagaggtcatagaaggttatgaaatagcttgcagaaaagctcatgagattcttcctaatttggtacgttgttctgcaaaaaaccttcgagatgttgatgaagtctcatctctacttcgtacctctgtaatgtgtaaacaatatggtaatgaagtatttctggccaagcttattgttcaggcatgcgtatctatttttcctgattctggccatttcaaagttgataacatcagagtttgtaaaattctgggctgtggtatcacttcctcttcagtattgcatggcatggtttttaagaaggaaacagaaggtgatgtacatctgtcaaagatgcaaaaatagcagtgtactcttgtccttttgatggcatgataacagaaactaagggaacagtgttgataaagactgatgaagaattgatgaatttaagtaagggagaagaaaatctcatggatgcataagtcaaagctattgctgatactggtgcaaatgttgtagtaacaggtggcaaagtggcagacatggctcttcattatgcaaacaaatataatatgatgttagtgaagctaaactcaaaatgggatgtctgaagactctgtaaaacagttggtgctacagctcttcctagattgacacctcctgtccttgaagaaatgggacactgagacagtgtttacctctcagaagttggagatactcaggtggtggtttttaagcatgaaaaggaagatggcatcatttctaccatagtacttcagggctctacagacaatctgatggatgacatagaaagggcagtagatgatggtgttaatactttcaaagttcttacaagggataaacgtcttgtacccggaggtggagcaacagaaattgaattagccaaacagatcacatcatatggagagacatgtcctggacttgaacagtacgctattaagaagtttgctgaggcgtttgaagctattccccgtgcactggcagaaatactctggagaaaactctggagttaaggccaatgaagtaatctctaaactttatgcagtacctcaagaaggaaataaaaatgttggattagatactgaggctgtagtccctgctgtaacggacatgttggaagctggtgttctagatacttacctgggaaaacactggtctatcaaactcgctgctaatgctgcagtcactgtacttagagtgggtcaggtaatcatggcaaaaccagatggtgggcccaagcctccaagtgggaagaaagactgggatgatgaccaaaatgattgaaattggcttaatttttactgtaggtgaaggctgtatttgtagtagtattctaagaatcgcgtgatgttttcttattctccttacattaagaggtattttgtgtttgtattcttggctggatgttataataaacatattgttactgtcaaaaaaaaaaaaagaaaacctttggtctactaaataaaaagtatggaatgaagacagtccaaagccattcaaagatttaggcaagtgagtaacataatcatacctacattttagaaagaccattttgaaaatggtgtgggagtgggatgagacaggaggtcctaaagacaattgtatcatctggttgagataacaaggagtagataaaactatcttggggatgttaagaggagaaagggaaaaggcttggtgaccagatatataactcatggttttgtgggttgggcaactatatggatggatggtggtactgctggtgaaaaggagtaggtttggagaaaaagatgaaatcatgaggttggaatgcagaacacaatcgacctagtgtcaaagcataactaaatgcaacaaaccagtagtggtaatttaaacatataaaattcctgaggccaggacagctctgtctgaagatgagttaatatagtattcaggcattaagactactttttaggccaggtgctgtggctcacgcctgtaatcccagcactttgggaggctgaagtgggaggatcacgaggtcaggagttcgagaccagcttggccaacatggtgaaaccctgtctctactaaaaatacaaaaattagccaggcatggtggcaggtgcctgtagtccaagctactcgggaggctgagacagcagaatcacttgaacctgggaggtggaggttgcagtgagccaagatcgtgcgactgcactccagcttcggcaaaagagtgagactctgtctcaaaaaaaaaaaaaaaaaaaaaaaagactgctttttagaaagctccacgatactagaaaccagccttattattattaaaagtaatggcaaaaaaataagcaattacttttgcaccaacccaatgtttccagtatccgtatcctacgctgtccctaggaaacaataacaagcccgaagtataccaagataattcactgaaaacaactttgagataaattctaaaatcctaggctgtgtatcattggacaagtcacataacttttctaggcctcaatttcctcatttataaaacctggataatgacacctattctgcttccttcatagagttttgtgagagtcaagttaatgcatgtaaaagcaacttataaactgtaaattgctacatacatgtaatttatcatacagtttggaaaacagtggcctaaacctagctcttgagcctttgaaactggaaatgagactgaacagaatgttgacagcttagttctgtcagacttcttggtatgagaatacaaactattgacctgtggccttatcatatcacacacagaatattattgttacttgagaaatcatatatgcactcctcaaacaacactcttccttcactcctccaacactctccctttcagtgcatccagggtccaacttcagatctgatcttgatctgtgccaacctagtataaattagaccttttccaaacttcatgcatagaccaaggggaagattattggcattctgtttacctccaccaaagcaaaattttacttatgtggtactgatttctctttctctcatttctccacttgatctttgtcacgactcacagagctctgagtcagcatccaaccttaaatgatgacctgccaaatcgtatcatttctggcttggtgaaagtgaaaggaaatgtgaaggaattcacggagacagctgccatatttgaggatggctccagggaggatgacattgatgctgttatctttgccacaggctatagctttgactttccgtttctggaagattccgtcaaagtggtcaaaaacaagatatccctgtataaaaaggtcttccctcctaacctggaaaggccaactcttgcaatcataggcttgattcagcccttaggagccattatgcccatttcagagctccaaggacgctgggccactcaggtatttaaaggtaagtgaccatgcaaatagactacttaattacttggtgatatgtttacctctgtttaggtacttgtttttaaatagctagagatagcatgtatgattacaacagtgcctagcacaaagttagtacagaaaaatatatttttgagtgaatctaaagtagcaatttataaccatggacatacatcatacctgggaaatttttccaagctatgcatgctttgacaccatccttgctgatgcttatttagttagtctggggtggggcagtcataacatctttgagaaaaatattccccagtaattccaatgtgtactccaaattagaatttactcatctagattttaggcaactggcatatgtttctgaagtaaaatagttttatcttctttcattatagataaaaataaaatatagaaatagtatgactttatttcggccgaaaattaagacctggttgcagactagtcaatattgtaggatattcaatcccccaaattctcacttttctccttttatgtcccctctttcagttttggctaggaatatatgaaaaaaaaaaggggaataggtttcatatgagtcagtagaatgatatagcttccaaagaaataattaaatctagcatcattaaaaaactataatgttctagaacattacaactgttgttctctaaactggccagaccacacctaatgatacattttaaaagtgaagctggagtgcgtttaataaggagagagagaaaaattttttaagggatttgaaaacatgccatctgaagtacaattgaaaaagccggagagagatttagcctggagaagataaacttcaggagagatatgagaatttccttcaaatatctgaagggaaggcacatggaagaaggattagatttactcagtatagcttcaaagggtcaaaccagaatcaaggagtgaaatcttgagggttacacatcagcttaccattaagaaaaaaatccaaaacctttttcctatcagccaatgccatttcatgatggaaccagctgcctctgaaattctaagcagaaaaggaaaaggatgccaaatgactgaatgctcactgggccggggcaggagagggggaaggtatggagtagattcaagcctcaggatagagagaaacaagatgatgtttaagggtccttctaaagaagaaattcactgattctatggttgttataacaaaatttgctattgttactagcatttaattaaaactactcagagttcctgttggaattacaccttttttgttttcactagtgaaaatcttcacagttgcagagaaaaaaagaaccaatggtattacagttgatagttcaacaacctttctaaatttccccaaatttctattacttccagtcctatccagcagattatgtactacctgagagaactatacaagtagtcaaacgcaaatagcccattaagttggcctaattctagtcatattaaagtgatcttttaattgggtcaattacataagcggagaacagttcattaaaacaggccacagcatcttagtatactttaagcaactgggactcttttccaagaccaagtgaattcttgagaggaaatagagaaaatgagtatttgcaagagtctgcattatggttatgagattatgggatcttagggaaaatgtacaaaaagcccagcttcctatgctagcagaagcctagtgctaattcctccagcttttttctaacacctggaaggaagaaatcttcagaattctctaactttaccagacttccaacaggaactctgggttttttattctgtccatggccaatctgtctgcctcccacattcttgcctttctcttccctgaattatcccttcactatgccaattttaaaccctttggattagcttgtttttcccatttttttcatgtctgcccaacaaagcctgcctccttccttgtctgttccctaccaagccccattttccttcttcttctgttctctggaattattgttctcttgtcaagaaaatattctactcttttctagaacactgaatttacttccttgccttgactgaaatgaaacatagtttctgttttgattgcgtcttttgcagcccttgcaagtgttttattttcactcagcaactttctttccttcaaaactatatcaagttacaccaaatctctggatcacaagaagtcattatgtcataggctggcattaaagttcctccacaaattggatacaacctccaatttcaggcccatctttctttctttctttctttctttttttttttttttgagatgcagtctcgctctgtcgcccaggctggagtgcagtggcgctatctcggcccactgcaagttccaccttctgggttcaggccattctactgcctcagcctccccagtagctgggactacaggcgcccgccaccatgcccggctagtttttttgtgtttttaatacagacggggtttcaccatgttagccaggatggtctccatctcttgacctcgtgatccgcctgcctcagcctcccaaagtgctgggattacaggcatgagtcactgtacccggcctcaggcccatctttcactagtctttaccatacttcctacaatactctagatgcactggatgacgtacccactaagcagcaaacacagcaggtacccttgtaccctgtgcttttgcttccactgtgctttcttcttgatatgccctccttttactttttatttctataggaaaagtctatgcatatttcttccctccctttgtaatatagtgatagctccttaagtaaaggactcatgtttatttgcctttgtattgcaagcctagaccactgcctagcacataagaggtatctaataaacatctattctaagaaatgtcagtttagccttgaggtaaattaaattctaaattctgatgtagaaacttcttatttgaggatctcagcttatgggctaccttagccaatttccagttatgttaaaagcctgaactggactgaaattgcagaatgggagccagatctcttttctctcataacattagctatacactgaaatatgcaggagcaagtcaggattacacagatacaacctgctttaggctgacagcagactgaaggcctaccaccacagaactctaattcagactgtcttccttcccaccttgtcttggaacccttggaagatctctgaacttcagttcctcactgttcttcaacattcttcagataacatatactgaccttttagtatgtaccaggccctctgctaggggctggagaagcaaatatgaccatacagaaaatccctatctttctggaatgcagagccaagcaaggaagactgtgttagcccattctcatgctgctataaagaactgcctgaggctgagtagtttctaaaggaaagaggtttaattcactcacagttctgcatggctggggaggcctcaggaaacttacaatcatggcagaaggaacttcttcacagggtggcaggagagagaatgagtgctgagtgaaagggaaagccccgtataaaaccatcagatctcgtgagaactcactcagtatcatgagaacagcatgagcagtatgagagtaaccaccccatgattaaatcacctcccaccaggcccctcccatgacacatggggattgtgggacccaaaattcaagataagatttgggtggggacacagccaaaccatatcaaagacagacaagtaaacagatgcttaatgatttgttcattcagcagatatttaactatatcctaaacaagtgctccagtagcaatgcagaagagctgccatgagagcagtgggcaataagtacccaattctccctacaactacataggaatttactaaaaggacaaggaaatattgaccatagaggggaaataatcactactgtttatgcaaagttagatgaaagtgacagaacaaatagagttctgggaactgcaagtagttcagaatgctggtaaagtgttataggaatgaaggaaaatgaaactagaaatattcacaggcaatatcaagagtttgcatttaaggtacaagttggagaaccactgaaggattttaactggaagaggagtcaaatcagatctccagtttagaagatatgttagagaggagtgaaatgggaaataggtcagtacgagcctgtggtaaaagtctaagtaagacagcatgagagctttaaaccaaggtaatgacactctaaaggaattggaggagccagacttaaatgaaatttcacaggcaaatctgaagaatttggtgacagaaagcatgttggagaagagagacagaaaagaatctgttcaggtgttgaggccattcattggaattgggaaactaagacagggagcaaagacatggagggagataagaaatatggtaaagctaatgtgtctaaataaggaaacactgcaaaaacaaaatttatgaattaagacataactgtaccacagagtatacacgtaaaaagatgtatacatctttttaaaatttttaaattttttaaaattttttcaccccatgagctctagactaagatgtatatacctctttatctatctatatatagacagatagggtaatagatagggttttttgttgtttttttctttcttttatgaattgggtgtctcccacaatcaagaaatatacctcctccttcatgtttctagctaatagaagtaaaacttgtggttgtgtagaagtaatttggaaattgactctcaaaacgcttattttgagtatccgaagagacctatgattaagcttaaatgaagcatttcagtgtttcctaattgatttatgacgataaataataattcccatggctaaaatgtaaaaacacatggaaaacaacagaaggctatttgagagtgatgaacttctgagttccatattttaagagggatacaccaggatagttattagagtatgcttagtgaagggcaaccaagatggcagagaatgtgaaaaccattatatgggaaacatgtactgtttagcctgataatgagaagacttaaaggagttatgacaatcatttccaaatgtttcaagagctgtcatgtattaacattaaactctgtggctccagaaagcagagcttggtccagtggtgcaaatgcaaagagtcagatcttggggtcaataaaaacaataatgttccagcagccagagcagtcaaataattatataatcacctcagatataattattatagatacccatcaccagtgatgtttaaagaggaatgagataaccactaggttagagtacttgtagaaagaatgcttgtatcaggtaaaatatattgccattctgaaattccatattccacaattttatggagtgacaccttaggactggatgtggccaaaatcttctacatggcatagtccctagttataggggcatacaactaattgtttaagcttagcattgttcatactggcttaaatactattaagccttagtctagccctgtccttggtgtataattcctacaactggaactgtttgtgcatcttacttaaatttatcagttaatattaggtattatgagttccccttggccttaacccctactcttatcaaagaaacatgtttagaaaatgaagcttatcttccacaggactttaggcataaaatgtgattaagatttattttggctgggcgtggtggctcatgcctgtaatcccagcaccttgggatgcagagacgggtggatcatctgaggtcaggagttcgagaccagcctgaccaatatggtgaaacctcgtctctactaaaactacaaaaaaaaattatttgggtttggtaggatatcagtgatggaagatgaaaggaatgaaatgaagtgagaagggaagtttagagaaaaaagaataaaaagaaacgaacaaagcatccaaggaatatgggactatgtgaaaagaccaaatctacgtcggattggtgaacctgaaagtgacggggagaatggaaccaagttggaaaacactctgcaggatattatccaggagaacttccccaatctagcaaggcaggccaacattcagattcaggaaatacagagaacgccacaaagatactcctcaagaagagcaactccaagacacataattgtcagattcaccaaagttgaaatgaaggaaaaaatgttaagggcagccagagagaaaggtcgggttacccacaaagggaagcccatcagactaacagcagatctctcggcagtaactctacaagccaggagagagtgggggccaatattcaacattcttaaagaaaagaattttcaacccagaatttcatatccagccaaactaagcttcataagtgaaggagaaataaaatactttacagacaagcaaatgctgagagattttgtgaccaccaggcctgctctaaaagagctcctgaaggaagcactaaacatggaaaggaacaaccggtaccagccactgcaaaaacatgccaaaatgtaaagactgtcaaggctaggaagaaactgcatcaactaacaagcaaaataaccagctaacatcataatcacagaaccaaattcacacataacaatattaactttaaatgtaaatgggctaaatgctccaattaaaatacacagactggcaaattggataaagagtcaagacccaacagtgtgctgtattcaggaaacccatctcatgtgcagagacacacataggctcaaaataaagggatggaggaagatctaccaagcaaatcgaaaacaaaaaaaggcaggggttgcaatcctagtctctgataaaacagactttaaaccagcaaagatctaaagagacaaagaaggccattaaataatggtaaagggatcaattcaacaagaagacctaactatcctaaatatatatgcacccaatgcaggagcacccagattcataaagcaagtccttagtgacctacaaagagacttagactcccacgcaataataatgggagactttaacaccccactgtcaacattagacagatcaacgagacagaaggttaacaaggatacccaggaattgaactcagctctgcaccaagcagacctaatagacatctacagaactctccaccccaaatcaacggaatatacatttttttcagcaccacaccacacctattgcaaaattgatcacatagttggaagtaaagcactcctcagcaaatgtaaaagaacagaaattataacaaactgtctctcagaccacagtgcaatgaaactagaactcaggactaaaaaactcactcaaaaccactcaactacatggaaactgaacaacctgctcctgaatgactactgggtacataacgaaacgaaagcagaaataaagatgttctttgaaaccaatgggaacaaagacacaacataccagaatctctggaacacatttaaagcagtgtgtagagggaaatttatagcactaaatgcccacaagagaaagcaggaaagatccaaaattgacaccctaacatcacaattaaaagaactagaaaagcaagagcaaacacattcaaaagctagaagaaggcaagaaataactaaaatcagagcagaactgaaggaaattaagtcacaaaaaacccttcaaaaaattaatgaatccaggagctggttttttgaaaggatcaacaaaattgataaactgctagcaagactaataaagaagaaaagagaagaatcaaatagatgcagtaaaaatgataaaggggatatcaccaccgatcccacagaaatacaaactaccatcagagaatactataaacacctctacacaaataaactagaaaatctagaagaaacggataaattcctcaacacatacaccctcccaagactaaaccaggaagaagctgaatctctgaatagaccaataacaggctctgaaattgtggcaataatcaatagcttaccaaccaaaaagagtccaggaccagatggattcacagccgaattctaccagaggtacaaagaggagctggtaccattccttctgaaactattccaatcaatagaaaaagaaggaatcttccctaactcattttatgaggccagcatcatcctgataccaaagcctggcagagacacaacaaaaaagaattttagaccaatatccttgatgaacattgatgcaaaaatcctcaataaaatactggcaaactgaatccagcagctcatcaaaaagcttatctgccatgatcaagtgggcttcatccctgggatgcaaggctggttcaacatacacaaatcaataaatgtaatccagcatataaacagaaccaatgacaaaaaccacatgattatctcaatagatgcagaaaaggcctttgacagaattcaacaacacttcatgctaaaaactctcaataaattaggtatcgatgggatgtatctgaaaataataagagctacctatgacaaacccacagccaatatcatactgaatgggcaaaaactggaagcattccctttgaaaactggcacaagatagggatgccctctctcaccactcctattcaacagagtgttggatattctggccagggcaattaggcaggagaaggaaataaagggtattcgattaggaaaagaggaagtcaaattgtccctgtttgcagacaacatgattgtatatctagaaaaccccattgtctcagcccaaaatctccttaagctgatgagcaacttcagcaaagtctcaggatacaaaatcaatgtacaaaaatcacaagcagtcttatacaccaacaacagacaaacagagagccaaatcatgagtgaactcccattcacaattgcttcaaagagaataaaatacctaggaatccaacttacaagggatgtgaaggacctcttcaaggagaaatacaaaccactgctcaatgaaataaaagaggatacaaagaaatggaagaacattccatgctcatgggtaggaagaatcaatatcgtgaaaatggccatactgcccaaggtaatttacagattaaatgccatccgcatcaagtgaccaatgactttcttcacagaattggaaaaaactattttaaagttcatatggaaccaaaaaagagcccgcatcaccaagtcaatcctaagccaaaagaacaaagctggaggcatcacgctacctgacttcaaactatactacaaggctacagtaaccaaaacagcatggtactggtaccaaaagggagatatagatcaatggaacaggacagagccctcagaaataatgccgcatgtctacaaccatctgatctttgacaaacctgacaaaaacaagaaatggggaaaggattccctatttaataaatggtgctgggaaaactggctagccatatgtagaaagctgaaactggatcccttccttacaccttatacaaaaatcaattcaagatggactaaagaaactaccatcagagtgaacaggcaaccaagaaaatgggaaaaaattttcacaacctactcatctgacaaagggctaatatccagaatctacaatgaactcaaacaagtttataagaaaaaaacaaacaaccccatcaaaaagtgggcaaaggatatgaacagacacttctcaaaagaagacatttatgcagccaaaaaatacatgaaaaaattctcatcatcgctggccatcagagaaatgcaaatcaaaaccacaatgggataccatctcacaccagttagaatggcgatcattaaaaagtcaggaaacaacaggtgctggagaggatgtggagaaataggaacacttttacactgttggtgggactgtaaactagttcaaccattgtggaagtcactgtggcgattcctcaggaatctagaactggaagtaccatttgacccaaccatcccattactgggtatatacccaaaggattataaatcatgctgctataaagacacatgcacacgtatgtttattgcggcactattcacaatagcaaagtcttggaaccaagccaaatgtccaacaacgatagactggattaagaaaatgtggcacatatacaccatggaatattatgcagccataaaaaatgaagagttcatgtcctttgtagggacatggattaaactggaaaccatcattctcagcaaactatcacaaggagaaaaaaccaaacaccgcatgttctcactcataggtgggaattgaacaatcagaacagatggacacaggaaggggaacatcacactccagggactgttgtggggtgggggtagtggggagggatagcattacgagatatacctaatgctaaatgacgagttaatgggtgctgcacaccagcatggcacatgtatacgtatgtaacaaacctgcacattgtgcacatgtaccctaaaacttaaggtataataataaaaacaaaaaatttatttttacttcattctctttctgttgatataaggtccctttgttatcaagaatacaggtgcagctgtgttttcccactcccctgccctttaactttgtaactaattttccatatacctttaagtccattttctcatgtccatatttcatttcccaactgaaagactacattagggaggaggcaggtattggttggaagtcagagtaggggaaatcccttccaaagacaaagaagaataggtagagtaagctgcagatgttaatattatattgtggtggtggtaaggtgatcaagtgaattgtaacctccttgagtacaggaaacttaccctgtatttctttgaattctccatagcatagtaattgtttataggattattgttccttctgaggtaattttacagttaaaatgttaatttttgtttttaggtctaaagacattgccctcacagagtgaaatgatggcagaaatatctaaagctcaagaggaaattgacaaaaggtaagaaactctcccaggaagatatatggttacatttctacttatttcttaataaaagaaatattgtactgtatttaactgcctcatgttagcttaaggatttagattctattatgaagaaaaaaggaaaaataatttgtgacaatagaatggagaaatagcactagtagtctaaatatgggtaagaaaagagagaaaagttttaggtgtctaaaatcatatgtttaatgcctaaaaaaagtcacataggaaaatgcatatggaaataaaatcagaaggcagaaggtatattatttttgtgaggattacttgaagtgctagtagacttgccagaggaaggaagagtgacagtaaatgaatgagaggtagctatgggtgaattacaaatctgtaggtagatttacaagtctgcagtggccgctttgctggcaatgctcatgtgacagcacactcaagtcacagtggctcatggtatgaatagtcactgtgagttgggaacatggtaacagccagctgcttagtgttttgatgaacacaatcatttagcagtctgaatttcagaacttaagctcaatcgctgggtgttttttatttggacaaagtggaaattgatggtaagtctctaaatttctgtggaaaactgagagacacaatcattccaggcctaaagaggtggttatcttcaactgatgatacttgcataactttcctttgtgtgggaggaggagaaagtaagtttttatttaattccgttacaacttccaggtgctctcctattttcctccttcctttcactgccaaacctctgcactaaattttctaaattctcaccttttgctgcctccctaagccttctgcattgttaacttccatccttactccttaaactgccttttttttttttagacggagtctcactctgtcactcaggctggagtcagtggcacgatcttcgctcactgcaacctctgcctcctgggttcaagcgattctcctgcctcagcctcctgagtagctaggactacaggtgcacaccaccaaacccagctcatttttgtatttttagtagagatgggatttctccatgttggccaggctggtctcaaactcctgaccttgtgatctgcccgcctcagcctcccaaagtgctgggattacaggcatgagccaccgtacctggccggaaactgctctcttaaaggtcacctgtgaccaacttcattttccttcttctcactactgagtttggtgcttttaaacatttcttccttcttgcagtgctttcttttctggctctaaagtatcttattttaactttcctcctctctttcctttgacttatttttgtctaaccacctcctgaacctgagtagtcagtaacccaaggatataatgtaaccttttttttttttaacttctgaaatagtaaatatttatttatttatttattttatatttaagttctagggtacatgtgtacaacgtgcaggttttttacatatgtatacatgtaacctttattaaaggccgactatgtgtatacattgttttatatgagtttatttaatctgcataatcaaggcaggagctagtgaacctcttttgtgaaaccttcatgaatactatagctctttttttttttttttttttttttgatatggggtctcactctgttacccaggctggagtgaagtggtgtgatcttggctcactgcaacctccacttcctggagtcaagcaattctcccgcctcagcctcctgagtagctgggactacaggcatactaacaatgcccagctaatttttgtgttttctgtagagatggggtttcgccatgttgcccaggctgatctcgaactcctgagctcaaagtgatccgcctgcctcggcctcccaaagtgctaggattacaggcatgaaacaccacgcccaacctcatgaatagtatagatcttgacctactattataggataaataaatgcatgtctacaaactcttgagccaacatattgttcataagggaaagctctcaaattctttactgttttacctttttctctcctaaatctagtcccatttcaataaattcctacttgaccctctatcaggtcctctgaaattccatctcaccagttctacctcaaatttattttctatcatttttttcctgtccctgttcttggattcttcaatctcaattggcttgacttggcttttctcttcctctctgtcctacagttctttcttttcattacagaaagtaaaaagtgaaagtcactcattagctcaccaaatcccactccaccacacagatatcactgttaatcaaccacattttcccctttaaaaagcccttttaaatctttaaatctgcacttggtgtaataatttcatttgtctccatttggagggctacttcctcttgtggaataaatcattctccctcatcctttcaggattccaaattaacattggcgctgggaagtcctgccctgtggaccctgtcaccactgccctcatcaaataatagaggatgccatacttgagaatttttgtgatgggttttctctttctcataacatcagagtcctttgtatctagatgtgctatacctgcccctcatcttatctgtatctttcacatccttcaagaacctaacgattacagctctcttttaactatcccctctccacatttctatttggcagtctgaaaccactcagaagtctcgcttcatgtttatctgtcttatctccttttgtaagtcctaagatccttaaggacagtgaccaatgttttatctttcttctctatattccacagctcctagtctgatattgagccaatagcaggcactcagaaggcagtaattgattgactgactgattgaattattgacaggccatggtttctgtcttttctactttaggtatgtggagagccaacgccataccattcagggagactacatagataccatggaagagcttgctgatttggtgggggtcaggcccaatctgctgtctctggccttcactgaccccaagctggcattacacttattactgggaccctgcactccaatccactatcgtgtacagggccctggaaagtgggatggggctcgaaaagctatcctcaccacagatgatcgcatcaggaagcctctgatgacaagagtagttgaaaggagtagttctatgacttcaacaatgacaataggcaagtttatgctagctcttgccttctttgctataattatagcttacttctagttgtcctattgtcactgccctgtttttcattgggaagcttatctacagatgccttcagaatctgacgagattgactctcagtttcatattgcccagaaatctactttaatgtctctttcgaaagcattaattcactttcctttttcctacaatgaaacctgttttccatttgtattaactcatctcccttccactcatgatccgtcactcttccttgtggtaatccctagactgggagctcaggtactcttttagtcatctttgtatgtctttagcagagttcttgacatgtggtaggtgcttaataaatgtttgttgtttatcaaattttatggtagggagagtaagtcagcatcggtataaaatcgcttactccacgtaactcttcttctgatagggtttgattttctattagaagctcaattttagttttttttcatattataactaaatatgtttcctgagagataagagaaataatgttcctacaatagttgtatgtatctaagataagacatatagatgcttaagacattttgtttcacttgctattcactagtgtacttgaaacatggtcatttttagcccttttccttaggaaccatgtctttattttctcaataaagaaattactttcaactttctaggctcacagtcattcagatcatctaccatctgccaatgagatcaacttggttgagaattttgggattttaaattagctgtcctacctttttaaatctcttttaaatccttcccatattaggatccaacaaaactttatcttaggaaatatgataagtagcttccaattgttgtagtgtggtctacaaatgtgatttgattcatcttcccccactctaattttctccccttttctcctcccttacatggagtctaagtaagtatttgaacaagtcatttatgtattaaattagaactgatattaactaaaggtaggaacattctgcttataccagtttttctcatgtcgtaaagtgtagttctgaaaaacagagcaaatgaaatgcaaagcaggtacttgggtttacatcccagtgccactgatgattctgttttctcatctgtggaagtttcactgttcttgtttcatggagaaattaactaagtgtcagctgtcaggcacactgaactcaggtgatgttcattaatagctgttgtacaatatgtttgtatttggattgctgcttattacttaacaacaggataaacctgaacaatggaaaagaccaacattagagagtattatctttccaaatacacacacctgtaagagaactggaaatgtgagaactacaacttcttcttatttaaacatttgaacaattgccggccctttcaccgaatttacctgtggaatgccttttgagagttagagaactgagaactggtattacttttcaggtcttttgctttccctaatccttgtgatactggagatttatcatctattaaaatggacctagtatttttaaatctgcatatcaaaagcaaattgaatgtctcttgcttccttttaatttcttttaacatataaatttctcttttagcatgtaaatttgttgaattaacagccctttgataatataattcctagttatcagcaataagtacaccagtttcttttttaaattaggagtatgtaattctaaattaattgattctctcattgtacatattatatgcaaggttacaaaaaaaaatcaatggttaatgattttttagctcaaccaagctaaaagatgtgaacaagaaattgaactcaaaacaacttaagatacaaagctcttgttactgataatgtctaataatattcatcaatttaccatatcttgctcttatattaaaatgttctatcattttcctaattattttaaagtcgattacaaaaatatatatatattcttgtagtgccagaaaattgaatacattaataaatggggtagaatagatgaatctcccatgaagaagaattccaaataatttatgaactctgccctcaaggatatggagcagaacttcctacttctctagtgtgagctgaatagtgacttccttccaaaaattacatatggaaagggggaaaataactttgtagtggagaaatctgataaacactatctcggctaggttatcaagattaacactaacagtaataagtcacattgatagtatgtacctttgagatgaagtgatgagaaggccactttacctctctgttgtattcctctcaaaaaccataatgcagtctaaccatgagaaaaacatcagacaaacccaagttgaagaatattctacaaatacctgactacctcaaaactgtcaagatcatcaacaaagaaagtctgagaaattgtcccggaataaaggggcctaaggagacataacatctaaatgtaatgtagtatcctggatggactcctgcaacagaaaaagaactttaagtaaaaattaagggaatattaataaagtatgcattttggttaataatgtatcaatattggtttattagttgtgacaaatgtaccagaggaatgtaaaatgtcaacaataaaggaaattggatgtggggtacatgagaatgctgtactatttttgcaacttttcttaaatctaaaactcttataaaatttaaaaataaaaagaaatgtggagttattattattattttttggctcaggatttgacccagagctatggtctggcagaattttctcagaggaggaatactggctagtacaagtcattcaaattactgtgtttttctatgatttctccacaaattaagttgctttaataatgcataatgtaacttaattcagcagttttgcttcctttgctgagtaagtatagactataattatagagaatgtaaaatggtgatataaagtcaaaatacacaacttcttaaaatcacttagatatgttctttattgaagctgtgcacattaacccagcagaccccactagcaaatttatgatatgttgatgtcatgtacattcataaataagattattttacttaatactgggcctgttacttttgttaggagtaatacagcatttaaacaacctccagattgcctaatggaatttctaagagtgccaagtttttccatgcttttatacacattcttgtgctgtactttcctcttgataaattctccactggcccagctggctaacacctataccatcgtccagattcaggtcatctgttttctcttcagggaatatcttcctgaccctcagtatcaaataggtcaccttcctctgtgctctcattacaactagtgttcttctcaattacattttatgaatagccttatcataatatataacaatatttggttctctcacctgtttcctccttgaactagtaaactcctcaaaggaatacattttgtacttaatctgtgtgttcctagtgcctaatgtagtggctgaaacatagtaagacctcagtaagttaagaattaattaattaaatgaatacattcaatatgggaggtaaatagatgacttttaaaggattaaatcaaacagtgaataattcttttagaaaaagtgacaaaggagattaaagggtgattaacattttgaaatgtctgcaggacaagcatgttcttccaaaaactgttctgagtcattgatctgaatcagtatgttatctttttttttgagacagagtctcgctctgtcgcccaggctggagtgcagtgacgccatctcggctcactgcaagctctgcttcccggcttcacgccattctcctgcctcagcatcccatgtagctgggactacaggtgtccgccaccacgcctggctaatctttgtatttttagtagagacgggtttttatcgtgttagccaggatggtctcgatctcctgacctcatgatccacccacctcggcctcccaaagtgctgggattacaggtgtgagccaccgcgcccggcctggtatgttatctttaatgtttagttgtggtttaaaacacaagtgatatgtcctcgtctataattcatttcctcaatcaaacataagacataacaagccaagatcttggtacaagaaagaaggtagggtatatatatgtcatccttgaccctcatttcactgctgttctgccttgctttcccaaattccccagctcctttgacgcacccataacttctgattgaaattattagcagaattgttgactccccttcattcagtaaagattttagcaccaagctctctgcctcgctataatataaaactactcctgtagttggttttaacactgatgtaggtaatactttcaccaatccaatgtcttagtcaggattagcttcagctacatttaacagaaaacctcaaataacaatgacttaaataagatttaagtttattttcctcttatattaaaaaagtctggaagtagatagtcctgagatgatataacagttcttcagcttctctttttgctccactatcttcagcatgtggaccttatacttcatggtccaagatggcccactgtagctatagccattatatggacattctacacagaaggaaggagaaatgtaacaatggcacaccccttttcttttaaggagactttacaaaagttccacataacattttcacttagtcttattggaagaacttagttacttatctagctactagggagactacaaaatgtgtctttatacagagaggcaatacctcaggaaaaaaatcaaggttctgttattaagaaggaagagagaatgaatgttgaggtagatctctaacactctgctatctggccttttagttatgtgatcttcttactccagtgattttataatctgcctcatctcaactacctatacccacatggacatatctaagacattgtcatgaataaccgcaacaccactaaagtctcaatttcaagcatcccactctctaaaactctctcctaccttttcagttcattcactctggtactccaactccagcagttctttgactccactgggctgcccatcaacctgctgtcttcatttcccagcccacctcatttaaaatgcatggcccaacattataatcacaccctaccacgcactctcaattactttgttgctctcctccatacttgcttagctaaacttcattttggttatctgcctgcatcaaaacagctaaacatgacaagagaaaaatactagtatggtgacttgccttttctgaaattcataaccactgaacataggtagaccttcagtgctactgccaatcatacttcatttttctagacaattctctgtcccacctttctagttgattactgcatataacctatctcctcaaacctcaaatatgttgtctcctttcctcacagtcagctaatcatcttctctttttttcctctaagaaaatggaaacaatcaaaagactttcacatatcttcactctgtgatgaggtttttagttggggctagtcacataggcaccctctgcttagcacatatcagaattccagactcccagaagaaaagcaagtgttcagcataaatcacattgtttgtacaaacagttttaaaaaagtgagccactcttatcagttaaggtggtaagaaacctcccaaaatccaagttcccaaatcccacccatgggccaaacttgcaagctaaagcagtcacaagcatggagttgtgctctaattccttgagggggcaatagctacataaattatttggaattctgtatgagagacttgttcccacacatcctagttgattttaattgtttattttttaggtatggcgaagcattattatggttctaagagtcagcaaactcctttctgcacaatgccgtttactggggatcttgaatactcgtctctagacccttgtctaggccgcgtttctcaaaatgtggcccttgaggcagaaacatcagccttgtacttgacacaagtcctcaggccccactccagacttacagaatcagaaactctgggtacacagaccagcaatctgcatatttgaccctctagataattttgatgtatggtaaagtttgatttagtcaaaaggagaggtggacctgtatctgttctgtcaggccgctcactgatccttaggcctttattgtactctattatctgctagtaccaatagcttctgacttgtgaaaattgggtgggtaggggtgagaaatggcatggagctggggtgtgttcaaactggcatcttcctttctctgagaattttaaataaacttattttaaggctcttttcaggccggacgcagtggctcatgcctgtagtcccagcactctgggaggccaaggcgggtggatcacgaggtcaagagatcgaaaccatcctggccggaatggcgaaaccccatctctactaaaaagtacaaagattgactaggcgtggtggcacacacctgtggtcccagctactcaggaggctgaggcaggagaattgcttgaacctgggaggtggaagttgcagtgagctgagatcgcgccaatgaactccagcctggcaacagagcaagactctgtctcaaaaaaaaaacacaaaaaccaaacaaacaaaaaaagttcttttcagagtcttttttctctatttccctgggtgcaaattctctcatttgaagaatcttctgactatacaacatgacactggacttcctcatgtactttattatttttattactttagttatttttaagactatttatttagaaatgattgcagtcctccacaaaagttacaaaaacagtagagttcttatatattctttcccaggctccctaaagagaatatttcacacaacattatgacaattatcaaaataagaaaatgaacactgatattatacgattaagtaaaccatggaccgcattcctattttttttttttttacagtttaaaggggtcttatttattgtcactgttccaaatgcacaaaaaaattagaaaatacccccaactcaacccgactcccacaacatttcccccaacacaaataatttttcccaaaaccacaaacataaactggtcctggtatttccataacagtgcagctaagaaatggcttagagaaaatttaacaggattcagattatatccattctgtcctctcggccctgagacgtaataattcccatatgggtcctagtcctccccagtggttttcccatctctggtggaagagtccttttacaaagtggtgtttgcctactgctttagagatcctcctgtgccttcttcttcttgggtttttcttcttgaattacaggggggtttgtagcttctcgttgtagatagctaataaaatcacttaattcatggccaccttcatatttctttggatttagcttcttgttggctggagagaagtatatggtaggaaaactctgacttcatatggagaaggcacatcattggctgtggcatccatcttggctatgacgatattcaggtctttgctgagcttctcgccaagttctttatacttgggctccaggttcttacagtgaccacaccaaggggcataaaattcaatcagcacatctttattttcattattcactatttcatcaaaattctctgctaccactaccttcacaggcccatcattgctctctgggataggttcagacttcaggtatctcttcagattgccatcaaagtaatcctgcaggaacctctccagagcattcccatcacgcgagaaatcctcctgcatgacaaacttctctcctttagcagttctgatagcaacaacaggaatctctccagcagtgctctccaagccaaaatcagaaagttcatggctaaaggttttgcggctagctacagcaaagttgagtttgtgcccagcatccaggaatttctttgccaccatcattaccctgtttctccagtagttggaacctttagcattcttttcatagtccacatcatagtaagcaataagtaagtccttgccctgtatcaaatctttattgtcttctgtcatgtgagggcagataccaaaaatgttttcctggataaactttttaattttgccactggtcattttttgcactgtatatgccacagtcttgtcctccaacttgttagtgagatgtgaaggacgaaataagatgataccatctccgttatcatcatactcgttcaccagagactcaacattcgtatgtgcaaatcggtagttatccctcaagttgctggctgcttttaggaactcggagtgagcttcactgaatgaatcatcgaaaaaacctactatagaggcatctttatcactaatgaatttcttaaattcttcctcagtcctgagaggcactgaagctgggcctgcctgcttcttcaggtggctgacaattccatcagcagtcctaggtccatcataagcacctgcttcttcaccatctctaaacatattcagggttggatatccactgactccatatttattacaggtgttagtgttggcagtgcaatcagcctttgctaatgggactattccttttaatctggtagctgcagcttcatactcaggagcaagtctcttgcagtgtccacaccagggggcgaagaactcgacgagcatgaggcccgcagagcccgtgtcggagatgcgactctccaagttgtcgtccctgagtcctagcacgtcggaggcagccgcgaggcgggccgcggcgagaagcagcgccacgcccgggaacagcgctgggcggcggaggcacatggcggcgaggtggggtgggggcagccggaagggtcgcggctcgactgggactgcggcggtcgggcgcgcgaccacctattttaccacttttctactaatttagtttttgtgttccaggatcagattcagggtcccattttgcatttagttgttaagtctccttagtgtcctctaatcgttgtcagttcttcagtcttttgttgtcattcaggacttaggcacttaaaaaaaaagaagtttcatactcaagtttgatttagtttaacctaatgttctttttctgtcctgggatcccatccaggatatcacattacatttagtcatcaccaggctcttctagactgtgacagtttcttatactttccttgtttttggtggccttgatagttctgaagagtactggttattttgtacttaatttgagattgtctgatatttcttcatgattaggctggggcaatgagtttcggggaggaaacagatcaaagatcaaatgctattctcatcatatcatatcaaggttacatgccactaatgacatactagagatgttagccttgatcagctggttgaggtagtgttcttcctcctttccatactgcgctctttgaaaaacatttactaggctcgactcatgcttatggggtggagaattatgttccatcttctcgagggtagagtacataaattttttggaatttttcaatatgagaattatctcccaattatttgtttcttcaatcatttacttgtatcagtatgaactcatggatcttattttataatttgggttaaatccaatgctgaattacttattttttgaattattctagctttagctattgggatctcttttagttggctcctatgtcactttgatataccatcagttttttgtgtctttttaaagcacttgtttattttctggcactataagatgtttcagactcatcttgtatatcccctgccccagtcctagaattaggcatttttctcaagggctctggttccctttgttggagaacagtattagaaacaaaaaactggatgctgggtgtgctccttgcttctgcttgtcattgcttctaggccttcggaggacagaacttggaaatatatgtgtgtatactaatgtattaaacatgaatccacatgcatttttaagtatttctatatttacccatctgtatctatattaagctaaacatttcatattgatgcctcctaccgtaacccaggatttaatgatcacatgcctactcctctcattttacagatgagaaaatttatggctaaaaagataaaagtacttgccctacatcaaataattttagagttggcagcctatttgtaccaaattaatactcacatggtgatgatatatacatagtagattcatagttaatgaagatgttgagatactaattattccagtaatgtatatctataattttagaggaaatttgcagtgaatatttagtcacagtatcactatacaccatatctatttagagttgtagtagtttccttagagatttccagagcatgtgctcctctagagcaggggtggctcagcaaaagctcaacaagtactggggccctcaatcaaggtttgttgaaataaatggactatacttatcaagaaatactggctaaatatttaacctgcacctcatttataaaatggaatatcatggatcatctgttctgcttaccctcatagggtggttctgaggatcacatgatagaatttacatgcaaatcctttggaatctgaaaggaaaaattatgatactatttggggaaaattctgtacctttgaattgggtctatcttcctttaggtgagcagaatcactattatttctctgcctgtataaaaactataaaaagattaaaatcaatggtatttgtttaaaaataattagtttacccaatggttgagtagtctcttgtgtataaactcatatattttgctaatgctgattttattaatagtttttaatttaggcataattttcatacaataaaaatttactttttattgtacagtttggtaagtatcaataactccactgcagtcaagatacagacctgttccatacctccccttcaaaatttcttcatgcccttttgtagtcaatcactccccaccccccacccccaagtcctggcaaacactgatctgttttctgaccgtatagtcttcctttttccagaatgtcacataagtggagcctggcttcttttacttcccataatgcatttgagattcatcaatattattgtatgtatcgagttattcttttattactgagtagtattccatttatagctatgctacattttaattattgattcaccagatgtattagcctattttcacactgctataaagacatacctgagactaggtaatttataaagaaaagaggtttaatttacttatagttctgcatggctggggaggacttcagaaacttacagttatggtagaagggaagcaagctcatcttatgtggcacaggggagagacagtgagtgtgtgtgaatgaaggaagaactgccaaacacttttaaaaccatcatctctggtgagaattcatgcactatcacaagaacagcatgggggaaaccgcccccatcatccaatcacttccctcccttgacacgtgaaggttataggtccttccttcaacacgtgggtattacaatttgagatgagatttgggtggggacacagaaccaaaccatatcaccaggt

SEQ ID NO: 597 - DNA, 7219 bp, Homo sapiens
ttcacctttcttacacaggtgacattcccagaacctggaggccaggctatgacacagagtcaatcaataaccagggagatctgtgatatagcccagtaggtggggccttgctgccatctgccatatgacccttccagtcccaggcttctgaagagacgtggtaagtgcggtgcagttttcaactgacctctggacgcagaacttcagccatgaaggtaacaggcatctttcttctcagtgccttggccctgttgagtctatctggtaagtgttgcatatttttcaaatttaaataaaactgttttgacctgttgctttgtgaagcacattatcttctagacttttgatgtagtctagtcttcgagagatgttttggacctaatgagatgaaataaaatcaacaggtaagaattattttttaagaggaatttttaacctactataaggaaaacaattctactagtaagaaattcccagaaataaaatggttttcctctattgatgtggctgaccctttgttgggatatggtagagaaaaaagggtaaaaatattttaactttaagtatacttctcattctgtaaatgtgtaaggccaaattacaaattttaaattctcatgggattgcataaaatagataaatggcttccagttattcagtataaaaggcataatttgactgattaaaaatttatttttttattgtataggtttcagtgtacttgaatcatgtatagtttgtcagatttatccctgaatagctaatatatgtgatataaagggaattttttattttcaattcctggtatttcttattagtatctggaaatacaaaaattgcattttgtgtatttacattacacattttgaatgttttgaaagaaaatattctgcttgaatagatggtgcacatatacctccaactgcatcttgacaatgttgacagacaactctgaacccgcagagccaagatcagtttcctttttatcactggaaatggttaacattttcaacttcacctctcatgtagtgaaggatcctgtggagagccaaatcagcactttgctaagaagaggaagaatattgtttgttttatttgctgaatatttatggcaacagtcagtgttccctttccccctcctcatgcatgttaattaatacaaatagatgcctgtgatgagcacctgctcttcagtttttagactcaactagattctaaaagccagtgggcccccaacaacatcaagttctgactatcccgggggaaattctccaagctcatagatgcctcactaattttcattacatttagatacaaagaactacctctttgctcagatcacctcaaagattgatgatattaaaattaattttcaggaatgtttccttatttgattgctatcatattagttccctttcccttccatgaacttatccacagttatcatttcctatatgttgtcagcaaaacctctgctattttctgggggaatagagattagctattttgactacctgtaaattcaacaaatgtgagttagacccatagtccatatgatgcaattgttggaaatagctctttgggaactgatagtgagttggcaaaagaactctattttttcaacaatacttacaaaagggaatttaaatgtaattgaaaaagctaactttgcatcagaagacctggttactgcttatgataactgtttcacagctagttataaaaactctccatactttcatctgtaaactgagataaaaattatacttcactaattgtgagattaaagatctagtaactggttttgagaatgtttgtgagtattcaaaagataatttgctcagtgcctgattcatttccagcagtaagtgcataatttctgttttcaaggaaatagatcaacttcctaaaacatcaaatcgagatactttggtcataatcaaagttttactcaaactttttaaggttttgccaaggaaggggtacaggaaaatcagtcagatacttttggaagattagagaaatcagaaagggtggggaatgaaagagcctagtaaagaagtcacagtctgcaatgaaagcagagaattctgatgaagaatagatctgacttctttcatttaggacccaacttaccatatctgatttatttctaggtaacactggagctgactccctgggaagagaggtaaagagatatttgtaatttcttatttctcagactggaacagtttgatccaacaaaaatgcagccttgctgtcacctttcagtttagcctgaagttaagaggagtatgaatgctagggagggttaacgtgagaaatgcaaatggtagtagtagttccaacccacaggcgtatattgaaggacaatttcactgatgtataagcaagttccatatagtcctacagtgcttgctgtgaaggggtttttatatagactagtgatagctgtagacaagtatttggggtggaagccttctcaacttcactccaagtagcccttcctccttacagccagtttgaccatgttggcatgcagctctcccaatcaccaaggtgtggctctaatttataatgaatgacagaaaataataaactaggttctccttctagaaaaatattctaactctaaccttttcatatttttttgtttaagaggtaatttcagtaaatttggagaccagaggaagaagtgtccctgttctcagtacatttatatctagtcagagacagctgatagaccaaaagttcatgaatgaatgcaatattacatttgtgataagtgttatgaaaaagttctgctgccgttaggaacttagcctagttagaaaaatcagggagggtgctccgaagtaactgaggggttattttgagccaaaaaaaaaaaatgagtgttagtaaaacaaaactggtggggagatgtagtagaataaagtacttaagagctaaagctcaggaactctgactaggtttgaattctgaatttaggaattccttagctgggtggccttggctaattttattgctttgtgcctcattatcttcacctgaagaagaatataatacttagttcacaggatagttaggaggtttaaacagaataatatataaaaagcactagaacaatgtctaggacaatgacaatcatttgatgattataaactcttactggagtagaatgcaaagacttccaacacccgacaatgcctagtgcctttaagtgcctaatagaagaccagtgtgtgtggactacagtgtacaaggaagaacgtgccccaagatgtggccaacctgagagatgccagcacccgcagtaattgcaaacttgaacattatctcacccatccatgtaaatctcacaacaacactatgagataggtgggaaatggtaatatcatcactgttttgcagatgaactgactgagtttcagaagggccataggacttactaatgtcacacagcttagaaatagcagaggcatgacttaaaacaaggttttctgtctccagatagtaggttatttctcttacaacacacagtatcattctcccaatcacagttattccccagagaaataaaaccatttcagagattttgctatgaactcaagaatggagaataatgggaaatgattctgtttaattccatttttaggccaaatgttacaatgaacttaatggatgcaccaagatatatgaccctgtctgtgggactgatggaaatacttatcccaatgaatgcgtgttatgttttgaaaatcggtgagtacaaacttgagtttcttttaaactatatattttaagttagttatcttcaagtgtactgataatatgaatctcaccccgagaaaagcaaactatttactttttccaaaaacagttatctctttcttattctcccttttatatatttagcattaaatattattttttagaagtcacttgtatgataaaagcctatattttttacagcaaaatagtcgatagcttggatttttataaagtacacacaaaatacctttaattaaaaaaattattagtggttgcaatgattgtgttttttaaagccctcagttatgcaaatataaattgtatagattatataaccaaaaatatatttttacttatggatatgaaagccagtttcagtaaagcttcatttcctcagtgaccataagtaggtgatgtgatacagagaaatagattcaacacagatttcctatctcactcagcaactgaaaccttagcatgtctcaagcatcatgctaatattccctgtcttacttgtgcttatgactaagaaaacatcatgagcatgtataggatggcttcttataacttggggcaaatgccagaagatgaggtgtaaataaagtgcaacaggagtgaagcagagatacatattttttattaaaaggggccaagaaaggatccatgaaaagaatagaatgccagccgggtgcagtggctcactcctgtaatcccagcactttgggaggccgatgcaggtggatcacctgagaccagcctggccaacatggtgaaaccccatggtggcgggcgcctataataccagctactcaggaggctgaggcagaagaatcgcttcaatctgggaggcagaggttgcagtgagctgagattgtgccactgcactccaacctgggtgacaagagtgagactccatcttaaaaaaaaggaaaaaaaaagaatagaatgccatttaaatagagttctgaattttggcaatatcaaaagagcatgccaggttaaataaaggtgtggaatgaacaaagcaaataaaagggattccacgagtgactttagtttttctgagattgacttgatattaaagactttgactcaggctcaaatgactgtgtaaatttccattatattctactgcataaattcccttttctgtaatgcaaaccttcttcttgggctgttttaaaccattttggaaaattctcagagtttagcaagtattgtggaaataggacctctggatgagaggtctaatatcctgaagttttagacccaaaacattaggtattctactttgtaataaatctgtttccataattaagacttgtaaaaagaatttgaagccacctgttagttttctcatgacccatgttcttgacattaagctcaaacatcatatttccatccaatgggaggagaaagcaagagaacaacagctttgagacttgggaaatttccaagtgccgctcaacatttacagtgaaacattagaaaaatattagtagagggctggaacaccctatctgcttagcctctgaaacctccgagtttctgcttattctttctatttgttcaaaactatgtaaatatgggaggcacatttgtatgctagaaaacatgacctctcttcctatatttctcagataagaaaatttaggtctagagacaaaatgttgctttctcaaatacaacatatttcctaatgtatgacattgcctttttcactgttgattaaaagtcccaaacttattacctagtaactaaagccagacgctgaccctagtttgagacaagtagataataccaaacaagggcttgcaaatcagtctttttggtgattatgtgcttggcaaatatattcaataaacactttttctattccttctacgtcttcaaagggaatctgtaccggcaaattcttttccataaacctgcatctccaatagaaccttctataatgatggaaatgttctatgtttatgctgtctaatacatagccactagccacaaaacagtagccttaatgtggctaacactaacttaaatgtggctagtaaaactgatcagctgaatatttaatattatctaaactaatttacatttacatagctatatgtggatagtgaatatatgaaactagagtgaacagcatagcaactcttgtttattctgtttaggtgtgtgtgcttatgtatgctaactgatttggaaatcagtattaatgagcagttaatgattgtgggacaagaaagcattaaaaaatcttaaagagtttggctgggcatggtggctcatgcctgtaatcccagcactttggaagtcccaggcaggtggatcacttttgttaggagtttgagaccagcctggccaacatggtaaaaccccgtctctactaaaaatacaaatattagccaggcatggtggcattcacctgtaatcccagctacttgggaggctgaggcaggagaatcacttgaacccgggaggtggaggctgcagtgagccaaggtcacaccactgcactccagcctgggcaacagagtgagactctgtcttaaaaaaagaaaaaaaagaaaaaaagaaaagaaaaaaaaaagaaaaaaaagtatatggaagtcagatgtccttcagtaatagagaagtagaagaatttttgtaagcccgtacattcaaagaaaaaatggttagaaaaattaaagacctggaaacagtcttctagggaacaattataaaatttagagatatttagtttagggaagagaaaactagtttggtaatggtagtgtggggcgaacagagaggttttatctggaggggaggatgtttagaactggcaggaatcatgtggaataaatatgtgatttacttttgtgagacctcacagatacgaatccccagagctctaagatgaaaggtcaatcaattagaaggtccaacaatagctcaggcatcagctgagatggaaacctggtggcgaaggcagaggcatcaggagcaaaagatgcaacaatagttttgagtttaatttcaggggttcactgtaacaccccacgagatctgtaaaaactgtaaggacagatatttttcctttctgttgtatccttagtgtattcaacagtaatcaataaatatttgatgaattaatgactaagtgaatgtataaatgaatgaaagacagagaaaagattataaatctcaaacctctccaactttaaatgaagctgttatttttccccctgtttttctcccatagtcactttttcatcagtgaagtttaagctgatatattttttttaatctctactgcaggaaacgccagacttctatcctcattcaaaaatctgggccttgctgagaaccaaggttttgaaatcccatcaggtcaccgcgaggcctgactggccttattgttgaataaatgtatctgaatatcccctgttgtttccat

SEQ ID NO: 598 - DNA, 83944 bp, Homo sapiens
gaccagagagaagcgtggggaagagtgggctgagggactccactagaggctgtccatctggattccctgcctccctaggagcccaacagagcaaagcaagtgggcacaaggagtatggttctaacgtgattggggtcatgaagacgttgctgttggacttggctttgtggtcactgctcttccagcccgggtggctgtcctttagttcccaggtgagtcagaactgccacaatggcagctatgaaatcagcgtcctgatgatgggcaactcagcctttgcagagcccctgaaaaacttggaagatgcggtgaatgaggggctggaaatagtgagaggacgtctgcaaaatgctggtaagaaaatgttaatagaatcttcctccactctgttactacctctggggacaaaatgttgctaagcaaagaccttgtgttctttgatcacacaactttctctaaggactgtccctaaacccctttctatttcatgacagtagctccttagagagaagaatttgaaccctattatgctgtgctcactcacacttcaccttgctctgggactagccctgactcaggaaatgtaaagtgttcacggcagtgaaacgtcccagttaaaactgggtttaggccagatgtggtggctcacgtctgtaatctcagcaatttaggaggccaaggaaggagggacactgagcccgggagttcaagaccagcctgggcaacatagcaagactccatctcttcaaaaagaaaataaataaaaataaactcagtttattgcccggttccaggaaggcattatgtttccttctgtactcagaggtaagatttggtctagacctaagatttcacagggatactaatcaagaagatgaattaagacagtcaatttcacatagacaccaaatctttctctgggccttttatccagagaaagacatttgtctctggcctgttcactcttttttttttttttttttttgagatggagtctcactctgtcacccaggctggagtgcagtggcacgatctcggctcactgcaagctctgcctcccaggttcacgccattctcctgcctcagccccccgagtagctgggactacaggtgcccaccaccatgcctggctaattttttgtatttttagtagagagggggtggtctgttcactctttacatttcctgtggctgtgattactagacatagttaatataaaacatttgcaatcaaattcattgttgcagttcttcattgtaccttttagttataaaaataaattttataacattacatgaaatgtgtaaaataaagggggaaaaaaagcagccatgattcccagccacctggatgtttccagtctgttttcatgtgcttcttagcttcctgtttttaagaacgtggttggtgatcactatggcatagaaacagttttggatccttctggttcacttcacattattgcacaagtgactttcctagagcgtcatggcctttctagtcatcatgtgaattgatatataatatccgccagatattataatatccagtatgtattatatccactggatataaattacctaatttgggggatatatatgataagatatatataaaataattctctgatgtaggatatttcatttgttttaaatttctcattactattttcataatacttcaatgaacattttcattttctgcattccctgagattagattaccagaaatagacttattgagtcaatgagtatttaatgcatcttaatggttatttgtggttttaaggatggtatgtcttaattttctctatttaaaattctgtggaagtagggcagctgttcagatatgaataataagttacttctgtgcacacacaacatctctccaattctgaaactagattcacacataagtgaacggatttgatctagagccataatggaacaaggaggttatttagtgaagtccccttatttaccgaggcagtgtggtacaatggaaagaacacttgatttgtcctttgaggacctggactgggatccctgccccaaagttttctctctctgtgatcctgggttagtctccctgagccttggtttcttcagttactaagtacctatcatggggtagctaagttctaggtacttcaattacatcacctctttaatcaccacagctctgtgaggttagcatggttgacactggtttcacagcaggggtttaacaactttgctaaggtcatataggttgtctgtttgcgggtcactctttggaatccattgtaatatctttacccagtgtgaactaagtttctaattaaaacaaggcagtggaacattatggttagaagcagatatttggaacctgacagatcttgatttattttccagccagaccattcacaacaggtatgaccttaagcagctagttaaattttcggaacctcagttcccacacctataaattagaataagtggtagttacccgatatgaatagcatgtggattcaatcagaaaactcatataaagtacctccttcactgactgaaacatagtaagaactcaataaatggtagttgttgctgttgttgttattgacattaatgtagttgttcttattgtttctgtgctgttgctactgctagaacacattaccaagcacctaaaataattaaatagtatgttagttagagccttggtccctgatgcatacaatctgaatttgaattcctgctccattatttacagttgagtgacattaggtgagttatttatcatctccgagtttcactcaagtcatttgtaaaatagttattagtgggcaggttgttaaatggatcatttaagtggagagctctatggagatgaaggaataagctgtgatgcccagacttttacatttgttagtgcattttgttggatgaatatgcatgcatagtaaacacaaaaggtacaggtttttggggaagagatagctcatgttctaaacatgttgagcatcattatttgggaaaaattataagacaatatatctcagggttacattgaggaaaagtaaaagttcaagcgttatatgtgatgttcaaagggaaatgatcaatattttttttaggaatcaggaaagctttgagggtcttgaagaacattcaggatctagtgggaaagaacatgaaaaaaagagattccttcgacttcatgacatcacctccctgaggctgtatggttccaaggctaatcacatgacccataccctgtgtgtgctcccttgtgctgagctggtcccactcctagaccctagcaccaaggttttagcttcatgttggtccacgttggtccaaccccatccttaaacccttagataggaagagagagttctgagctcgccccatattgttcagctttccatccatcctcccaggaatgagatatcattgtggggtagagagtgccggtaggaaaggatgaaaagtagcatgggggaaatggcttattttaaaagtaaacctttgatttgaagttatgtcattgtctgaaaaatgtttagtattttctagaaaaatcacttgagttctggagtgataaaagggaagacattacccccaccaaattaaaaataagagaaagcagtacacataaaagtaaaatattgagaggcagcatattatactatgctccatagaagccattctcaaatattttggtattaggacctctttatttatttatttattcgggacagagtatcgttcttgttgcccaggctggagtgcaatggcatgatctcagttcaccacaacctccgcctcccaggttcaagcgattctcctgcctcagcctcccaagtagctgggattacaggtatgcatcaccacatccagctaatgttttgtatttttagtagagacggggtttcttcatgttggtcaggctgatctcgaactcctgacctcaggtgatctgcccgcctcggcctcccaaagtgctgggattataggcgtgagccaccgcacctggcctaggacctctttaaactctttaaaattaatgagggtgctgaagagttatgtttatgtggctacatatatcagtattgattgtattgaaaactaaactgagaaacattttaaacattttttataaattcatcaaaaaaaataaatatctgttagcataaataatatttttattaaagaaaacctatatttctcaagccaaaaaagaaaaaaaacaaagcgagtgagaagactggtttacacttttgcaaatgtctttaatgtcaagcttaatggaagatagctatattctcatattggcttctacattcaatctgttgcaagaatatatgtgatatagcctctggagaacttatcatatgctcatgagagaaggagagtagaaaaaaataaggaatgtcttagtataattataaaaatgactttgacctcatggatcccctgaaagggactaaagggtacctcagtggctcatactttgagaactgctgttctacagcatatcaaagttctagaattagacttccctaggttcaaatccctgcgctactacttgcaagctgtgtagccttaaacaagttaatctacctctccagacctccattttctcatgtttaaatgaggatgacaaaatattaccttgaaggattcagagaggattaagtgaaataatacctgtaaaaaatcacagcccaaagctaggcatatagtgaaagagatcaactggctctattctattaacaagtggatgaggaactggggcccagtagggaagtcacttgtctgaggtcacactcaacagatgttggttccctttttcccaggcactgtgccagggtttctacttgagtttagctgtatcagtcatgggctgccaggagcactggatttttaagtgtcattttcactgtccctcatggtggtaggacagaacaaagccctcatagaggcaggaggtcaagagagaggagctgcaagtgtggccatcttcatgtgactgtgtgctaccctccacgtcactttctgactcctcttgcagtgttccaagaccctctctaaccctattttctacagttcctcacatgccctctctcattcccccaggtccactgtagcctcattcattctgttctcctggtttcaaattctctatatcctttctattgtcatgaaaattaaataaaaggcatatggggcttagtactgaagctgactcgcggttacactcaattaagtgtgaactgctattaaacccatcactccccacttctcttccattagatatctctgactggtctaattacattgaagtctcctatttggctagtcctaccaaagtactgacatctctcaatcagctatcttactgaataaagtatcagtgttttcgaacttaaaaaagcaaagttggtagacatctctcaagtggctgtagaagtgcaaagactcctccattctttgaaagaacaagtctctacctttaaaaacattcttatttgttcagaagaacaacttctattatagacatgctttgctcttttaaaggtgctattaaaaattatcccattttacaaacttggttttaacctcattttacatgcgagaaactaagtgagagaaattaaaatggcttgtacaagaacacataagaaatcactcataatgccggactgtggactgaggtttccagactccctctagacttggcaaacttaagaacatccctgcagctgggcacagtggctcacgcctgtaatcccagcactttgggaggccgaggcgggcggatcatgaggtcaggagatcgagaccatcctggctaacacgatgaaaccctgtctctactaaaactacaaaaaattagccgggtgtggtggtgggcacctgtagtcccagctactcaggaggctgaggcaggagaatggcatgaacatgggaggtggagcttgcagtaagcagagatcgcgccactgcactccagccagagcaacagtgcagactctgtctcaaagaagaaaaagaaaaagaaaaaaaaagaacatccctgcttaggaatcagacatttgtcctgattattttttactggaaggaaccaaaatttaatagattgtggtcaaatggttctgctattcccttctaaaacgtggtgcctagcagtccccagggatatcgccagcaagacccttgctttcatctaaatatgggagttctccattatacaaagacctcaagccaggatgaacataattcactttggctttgggagtagcccatagaggaaatgcctaacaccaggagtggtgttctggtcagtaaggccagccatccttgtgaccaaacagatattttgaagagaaacttgttttcaattcttgtattgctttctaagaggagaaatgtgtgagtcagagtgaaatccaaacaaaactctcatctaatttaggacactaatgaacacatttttgttttctttatccttgattagaaacattttaaagtaagaggatgtattttaaagacaaaggggttttctggcaattttgtaatgttacacaatctccttccctgtctactaagaaagaaaacagaattctgcagcaccttctttaggaaaaatagatgataattaactgttaaccattttcatttcatgtgagaagtgtgggtacagctgcagggaacttcctgagggtatgcaggtatttttctcatagactatttactcagtatcttgaatgctccaggagagacagggtctaaaaattgtaatacagcaagattcattgagaacaaacaatcatacccattgataaattttggatttaacattttggtgcatcactaagctggtaaaaggccattccctcatgcgtgagttttcatttgagatatcaaaaatgtacaattggtttgggatgagataatcacggcttccatttcagatcccactatttactgcatatgggactctggtaagacaaactcaataaagcttttgtctcaggctttgatttctagaaaactgaccaagacaccccttttgagcaagaatgataaatctgagccacagatgtgacagctttttatcaataagaatgattgcattaataactatttctgatgggtgtatttcaactgcttagtgtcctctctatctagaagtgtgacaggcatctcacacctgacatgtccacctccatcaccacacacaccacattagcaaacctgctccacccacactctttctcatcttggtcaataggagttcccttcacccacttgctcaggccaaaaatattggcgttattctgagtcctcttttctcatacttcatattgcatttatcaatttcctaccttcaaaatacatcctaaatgcaaccatttttctctacttttgctccaactactgtagtccaatctaacctaggttatgaatcgtgtcttcactagtctccctgcatttgtttctgttccccacaatctattctctgcatcaggatccagagatatcctttaaaaataatagtcagacaatatcatttctctgctcaaagtcctccaaaacatcttatcctggaataaattgaaagcacttactaacgtccacatggtcatgcacggtgtggcctcactctgacctcacatctcacccatactacctctcacttactctgtcaggactacgctggcctccctgttctttctgaaatgccaagaagggtcctgcctgggatttttgcccttgctgttccctctgaccagagaaaccatgtgtcgcatggctaagtcttcacgcaggtcccagctccccctagggcttccatgaccaccctatcagaaatgcattattctgtgtaacacacaaagaaaatgtaagcctattgaaagggggaacttttgttcaatgctgtatcatgagcgcaaagaagagcgcctggcacatagcaggaacttaataactgtttgttgactggatagataaagatcagagaccaaggaagactgcagcctcctgcaagttggcaacaaatagcacctggggaccatgaaagaacaggttatcataatgtttatgtctttgcttcccaacactctccagtccatacaggagacctgctgcatctagggttgtgaaaagatgaagaggtcagtgaacacaatgaaaatgttctaaaactggaccatgtggatggttgcacaactatatatatatttactaaaagtcattgaatcgtaaactcaacatggatgatttttatgatagataaattatacctcaataaaactgttgagagagagagagagaaacagagatgaaaagatacagagagacagagacacacagaggaaaaaagtgaccaggagtaaaacaagggctcaggatgtaaatattcctaggcctgaaaatggatatccattttttcccagaatcaatctcatggctgatataaattactgaaaaataacactagtgttctattttccctcatctctgggcgacaggcctaaatgtgactgtgaacgctactttcatgtattcggatggtctgattcataactcaggcgactgccggagtagcacctgtgaaggcctcgacctactcaggaaaatttcagtaagtatttgcttttgtggatgcagctcatggcctctgggcacaggataatcccagtgtgaaatgtaggcacatgaccatgaagcagctctcccatcatctctagccacatagctgaatgagtggccgagtaccaggcaggagactctggctttacccctacagattacctaaatgacaggggccctccatgaatccagaaaagtgaggaaagccttggctatgtactgtgtgtacactttcatttgtaaggagaggaattcttttgctttaaattgttttaaaaattttgttttgttttgtttcttgggtgtttgtttgtttgttttttgagacagggtctccctctgttgcccaggctggagtgcagtggcataatcatggctcactgcaggttgagctcctgggctcaggtgattgtcccatctcagcctcccaagtagctgggactacaggcatgtgctaccatgctcagcaaatttcttatattatttgtagagacagggtttcaccacgttgctcaggctggtctcaaactcctgagcttaagtgatctgcccccattggcctcccaaagtgctggaattacaggcatgagccactgcgcccagccagtttttaagtttctttatttaaatgttagtataaactggtttgcctttgtatccctcaagaaatacctgagaaatcatgtttaaaaacatatttcaaggccccacaccagaaatctctgtttcaagtcatcaccatatatcaggtcatagttaattgcttaagcgttgaatctgccacctaacttaaagtagtaacttcaatgtcaaaggatgaaaatgggaagagggagattcttgcctagttcctcctcctaatccccaaaccccaatcccaaccagagctttaaggaaataaagagggttaaaagctctctagagacaagcagatgtgcaatgcacccccttaatacagaaactaaagaaaaggctgtcttagcagcagagcactgggagtagagccacggctctaaactttaatcaataacatcacaccaaccaggcaggccacactcccatcaggaacaatggctaccacagcagtgattctcaatcttgggaaggtaaggtgtgcacaagcatagttcaataaactccacatcacaatttcagaaatatatgctgcttttctctgcctctacagagagaggtataacctggttctccaaaaccagggatgagatggtcccaaccagattccccttaagaaataggagaaaataagatcaataatcacccaatcaattgcatagcattttactcacttcagccctgttttatagttctctctacaactgaaacttgccctctcccttcaaagcacctccaaatctcatctcaccactatctggcctacagacactactaatgctacagcctcccagtccctcttctgcctcttcccatcctgcattgagaaggaagccaggttcacctccagtcagctcacctttgtaaaatacctttcctccctgtagtgtgttttccctctcgaacctctccatgcctcagttgatccttgtccagaccaaggcaccctatgttgctctgagtttgagcattttgggaggcccaactttctaaacctctgggagccttccccttgctacttctttcctgtccactgagtatttttcttagttctaggaattcattgttgttttctctcctacagaatgcacaacggatgggctgtgtcctcatagggccctcatgtacatactccaccttccagatgtagtaagtaatactactgtgaactgaagtcaggacatgatattgcaacttaaaggactcatcaaacaacagtctagtcaagccaacacaatcagaggtgttgaggtctagtattttgccatctccccataactgtcattctcttatccaggtaacttcccttgctcagcatggagtgaatgtctgtagccattcaggttgagtcattaacatctgaccttgagagaaaacatggtatgggtaaaaagtcagagttttgagagaaagcaggaaagacagtgaaattggataatttgaggcgtttaataaataaaatattcacaaaagtatgggtagagggttgggaaacacaaaagaaagtgcaacaccccagggtactagtagggttctgttctatcctgtaggtctggtaaaagtggggaaaataacaatatatttagttcatgttatttgagaattatataaatgacatgttaaagtcctttgtacagtgcccttactatcttagaacaaagctctcagtatattctagaatgaatatatttttctggctctgggaaaatcaccctcatctcttccattcattttacacaatgtaattatcaccaaaaaatactttgttctgctaattacaccttccctaatcaaaatcctgctcaagttccttttttgtacctgttcaatctgaccctgaatcaagaatcacgcttcatcgacacagagaaaactgtgcagaatatcacttgcaatggattttggagagtaaacattagacctctgaaaattctgttgcaaagtttgcttttgtcacctcacacccaccattacaaacagcctcagatgctcaggttcactgagcactttttcagcttctcttccataccaaaatgcggacagatccagaatcttactcttccttgtatttgttcccaactgtcatctaacctgatcacttactaatattgctacagagtatgctcaaaaggaaaggaggattggaaaaattgattcaccatttatgaagaccttctacgtgcaaagcattttagctgtggcagagtagagagaattaagtaaaacacagcccctgtccacccaaatagagaaggtgacaaggactctcctgaccaatacaaggcacagtgagatcaatgccatcagggaaatggaaacaggaaactgcagagggcagggatcagtggcaccagcctgtaatgccagggctttgggaggccgaagcaggaggatcccttgagcccaggagtttgagactagcctaggcaacatagtgagactctgctctccagaaagtttaaaaataaaaaaattagccaggtgtagtcatgcacgcctgtagtcccagcaatgtgggaggccaagatgggaggatcacttgaaccgaggaggtcaaggctccagtgatccaggatcacaccactgcactccagcctgagtgtcagagtgagatactattaaaaagagagaaagagagaaagaaaaggaaggaaaggaaaggaaaggaaaggaaaggaaaggaaggaaggaaggaaggaaggaaggaaggaaggaaggaaggaaggaaggaaggaaggaaggaagggaaagaaagaaagagagagaggagaaaaagaggaagggagagagaagagaaaagaaaagagaagctatagagtgcacagaagggaagggtcacctctgcttgaggggactaagcttcaatggaggaaaaaactcttatgaaggagatgcgattgtttgcatgttgaagaatgggtaaaattttaatgagtagagagatgaggagatgagctttctagccaggcagagggagagaagtacatgtaaaagcaaacaagcagggaaatgaagaactctgtattaaccagagttcaggaaatgtataggggaataatagagataagactaggaaaattaagtaggaccatatttggaagttcatgggaggaaagtccaggtgaaggaagttgcatttaatgagactcacatcagaaatcactaaggttttaagcttgggaatgccatgagaagcagccaactttcagaagaatgattgaccacagtgtataggaaagacacaggcagactgatgacaggaaagtcagcagagaaggagggcctggattaggaagaaggaagtggacatagaaagggaggataactgcaaagatatttgaaggtagaatcaatcaatggtatgatgctggggtgagagatggaaagtagtcaaagaagcctttgcaatctcaaaacactaaaataaatgaaaaaatctcaaaacactaaaataaatgaaaaacagtttggaggaacagaaatgaaagagaattctgactgtgaacattgtagtttgagatgcaagcaggaagcccactaaaaccttttgatggagcactgaagatgtaaggggatgctgttttccttccttcgttaaatacatactaagcatctacatacaagcctagatgactggagataccgaggtgaacaagctggggagaaggcaatgcatggcaaagtgtagatggcatctttttggctttacaacaactatggtggctgtggtggtccatcctttttcttagcccgacttcccctgtatcccagcccagatatcatgatgactcactttagaataaatcgaagtaaccaagccacatattcacaaaattgcttagagtgtgcttagaacatagcatgtgctcaataaatgtttttaaatttagctgtatgagaaagacacctatatacatgagaaacctgctttaatgatccgatttcattcttaccatttatacatacatgctgaaacaggttaaagagggatcttatttgtgctacttaagttaatactgataatggcttttttcctcaacctcttgacatagccttgacacagaattgagctaccccatgatctcagctggaagttttggattgtcatgtgactataaagaaaccttaaccaggctgatgtctccagctagaaagttgatgtacttcttggttaacttttggaaaaccaacgatctgcccttcaaaacttattcctggagcacttcgtatgtttacaagaatggtacagaaactgaggactgtttctggtaagcaggatcattaatatttcactagcacttgccatggagagaagccataggatcatgcaggccacctagttattaccagatgcaccttccactggtaacagcattgggtatagacatcagttcattttctcacacataaataaaagcaaaggggaccaagtaaatatagagttgtaaaaataatcagtatagtttgcatctgcaacactctttactgttttgaaagtacgttcacatcagttttattgatttcctgcagtacgttatctgaagaaaataaaacaagtaataggatccctattttatagacaaggaaaatgaaagccaggagttaatgttttcacattcctgtgtaagaaacaataccagagaacatgtatcttgcctatacctacaattagttagaaaaaatgatctcacacttcttcagagaaacaagaggtaggggagaaacaggaataatgggtattgtattaataatagtttgttttcatactgctataaagaactgctcgagactgggtaacttataaaggaaagaggtttaattgactcacagtttcgcatagctggggaggccccaggaaacttacaatcatggcagaaggcgaaggacaagcaaggcactttcttcaaaaggtggcaggaaggaaaagtgctaagcaaaaagggaagagccccttataaaaccatcagatctcatgagaacttactcactatcatgagaacagcatgggggaaaccacccccatggttcaattacctccacctggtctctcccttgacacgtggggattattgggattatggggataacaattcaagatgatatttgggtggggacacaaagcctaaccatatcaggtatcattactaaaataaaatggaaagattcattcaactccaacaaaggtggtagaagaaatcttctggctgggttgctgcctgtacttccaggatgctgcttaattctgcattctttctccatctaagtaagcaaaagactaagatgggataccaccagggatgcacgtctagagacccacaggaatcaacccacagtatctaatgtgaggtttaaacagaagcagaaaattattcctatcaactctgcatttttgtactgtagattcaagggtttcaacttatctataatgggactagtttatagagcagagcagaaccctcttcctgcaagcagccagaaaccatcacaaatgactcaccaaatgtcagatatcatgacaactcactttaaatcaaagtaaccaagccacatattcacaaaattgcttagagtgtgtttagaacatacactgtgattatggggataacaatttacatgtacacatgaagatccctaaaagttcccccatcctttcacgaatttagatcttacaatctaaactagtggtatcatggtgtgtgctgtctattgtgttaatagcagaaatgaattttagatgaacaaatcccaggatagatctgcaaataagaagtgaaaggcatgaaaggccatgagggaagtaagctgttttagtttctctttttcctattccaggtaccttaatgctctggaggctagcgtttcctatttctcccacgaactcggctttaaggtggtgttaagacaagataaggagtttcaggatatcttaatggaccacaacaggaaaagcaatggtaagaagacatgaagataattgttttttgctaacttcttctttatgactaccacctccttataagtcatttcaacaaatcctccactgcagagctatcatccttactcatacatattttgtatattttgggagatctataattgcatgcaacttcattatattgttcctttcattgactaaaaaccttatcctctgagagaaaatacctaagtattattgagtaattatattaacataataacgataatgctaaaatccggcttttataaacccaaatgatattatgacccaccctcagcagactgtttttttaaattcacctcaatccaacatattattggatttgtgaccaatcttcacacattctgagccccagtcctcctggtgaccaagaggatgaatttattgattacatagcttcatgcaaaattacaacgtaagcaaagattatctcactttcctattccttctgtatctcacctgcccagtgatctaccagctagagaccaagtaggaaagcctaattggatataaaattatcctcagataaatgaccacacattgggtacagcgtacactgcctaggagatgggtgcaccaaaattttagaaatcaccactaaagaacttattcatgtaaccaaacaccacctgttcccgcaaaaatctattcaaataaaaagaagtcatcctcactaagatattaggggatttgttgcactttccacagaattctcttgacaaacaagaatgtatcaggggcaaaggaatccattgtgagaattttctacaaggaaagatacttgcttggtggatttcctgatattcaaatcatcatttattgccattatcaagcatttgttatattaatggcctaccagttgcaaaaacattaaccaagatatggtgggaaagaaatatataagtatttatgtccctaaagagtttacaattcaacagggcagcataatggcacagcatctaaaaagatctaatgaagtctcccccaactcctctcactcataaaactgcattcaggatagctagcagaaattagtggtagacttcagactggactctggcattggagttactaagatgaagttttgagttaagaggctacagataaagcccaagttgcttagggagactttataaattcttctcagttctcacttttataatatctttttcaaccacttttacaaatggtgaggtatacttcacttatctatgacaatatattctgtaattactccagcctggcataatggaataagcactgaacttgactgtcagagctgtctttgtcatctactagttctttgaccctttgacatcttggcttcagcctccttaaatctataaaattaaaagaatgatggacgagatgatttttttaaaaaagatcccattcagctctattctgactctataattgtaaatgaaaaaaaaaaaggaaggaggaatttaaggaattggagtttatctttaaaaaatttaacattaacatactggattcaaattcaggcaactggttccctgcctgtttgtctgtagactgtcatatatttctctccttgtcttaccttctcctccagtgattattatgtgtggtggtccagagttcctctacaagctgaagggtgaccgagcagtggctgaagacattgtcattattctagtggatcttttcaagtaggtataacatttggaaaaaccctcctcctttcaaaaaggaagtattccaaggatttccagaaggcacattctcttttctcttgctttgtacaaccccttatggggttaagtatgatgataatatttgaactctgtcacactgtcattcttatttagctaattgtggctttagcagagatgcattcctttgacaccttcaccatttgtaaatataaaaggtttattatagccccattgaacccacatgtccatttatgactgaggcctgctcagtcaacatagaatcctggctggctatggtcactcacacctgtaatcccagcactttgggagacccaggcaagaggattgcttgagtccaggagtttcagactagcctgggcaacacagtgagaccccatctctattaaaagaaaaaaagaaagaaaggaaaaacatacgatcctgatctctagcctgattttaaagtctttgtccagaaaatgataaatcaactaaagactcaataatactgttcctggtaatgtcagccccatttttctccttcagttgctaatggcctttggtcctagattacttttccttcaaccacctctgataagcttgaagtttcacttgtatgagtctgatatacacaattattcctcaccctctgtggcgtagtcactaggtggtgatcttttcctccacatttctctgagccaaagagaaaaaatgctggagcgtagagagcacctttgttcacatcccatcttttttttaatcgctaattatctgaaatggttggagaccccactgacaagctgtgccaaagtaatatttgagtcaagttaggcttgaagaaggtgtcactgccatgcccatgccccttgcccccagaagccagatcacgtgacttcacttatctgactgggccattaatcattacctgtctgtattcagacaagaggctgctcctgtctagatctttcccatatttgcctgatcatttcacccacactaacgatacttctcacagcatgaatggaaatgaagtataggaactgcaggcctgtttgatggctacacgttcatgaaggtaatttaattaaccaactagactctaaactacagaagtacaggaaagagggcagagttactgatatttcactccaagaacctcattgatttcaatagctgctttacccctggaaggagtccttactgtagccaggttggtataattttactttcagaaatcctcaataaaccaccaaagtgctggcattcctttgtcactattcccaaaggacacctggctatgttttggaaagctaatgagactaaattagacataatgtgttcacattctaattctgacacttctggttgttttgactcttggatttttttagcattttaagattaaatcttcccatttgtaaaatgagaattaaaatgtcctcttcataagggtacttctaggattaatgtgataataggagtaaaatatccaatacagttctcagcacatagtagatgtgttcaaatattaaatatgctgggcacagcagtgcatgcctgttgtcccagctgcttgggaagctgaggcgggaggatagcttgaatctaggagttcaagaccagcctaggtaatgtagcaagaccttgtctcctaaaaaaagtttttaaataaaaacattaaataatggtcagcctaattgcagcagttcaaacataccagattcttttcaaatctccaaataataggaagcttagaaaccacagcatttgaggctgggtgtggtggctcacacctgtaatcccagcactttgggaggccaagacaggcggatcacctgaggtcaggagttcaagacctgcctggccaacatgctgaaaacccgtctctactaaaaatacaaaaaaaaaaaaaaatagctgggcgtggtggtgggcgcctgtaatcccagctactcaggaggctgaggcaggagaattgcttgaacctgggaggcggaggttgcagtgagccgagatcatgccattgtactccagcctgggaaatgagagtgaaactctgtctaaaaataaaataaaacaaaataaaaataaaagtaaaaataaaaataaaccatagcatttgcagagcaatcttagacagtactgagagtctacaatgtgccaggcattgtctaggagttgaggatacaagaatcaataagctaatgttccatatatcaagaagcttaccatgttagagaagacgtttagtctttttatgcttatgtttcaccatctaaaacataagtttagtgataaaatttctctctaccatgtctcaatatctctaaattgttaaaagcacttaaagaaagtttctacctataaaccaagccttaaaagcaagcatgagctcacatgtccatagcccccccaaatctcaaagaaatcaagaaatatctgtattctgattttcttttccttttgtgtatgttaaccacaattgcttaaattctcttatttaacctaacaagcacagaagaaaacaattctatctggggaaagtagaaagttttgcagattaatgaaaaaaaatgttttaaactattttcaatgatgatggtatagtttgtgtgaactatagaagatgcatctctatttttcctaattttcatgaggaacctgtgctttttattacagtgaccagtactttgaggacaatgtcacagcccctgactatatgaaaaatgtccttgttctgacgctgtctcctgggaattcccttctaaatagctctttctccaggaatctatcaccagtaagctattattttatgttatagtataaattatatattattattttatttgtcaagggtaagataatttttctccatttaggacccaaattctaaaatgagcaattatttttacttgctctaattcattcaacaaatgttaactgaaaccaactacatgtacagcattttgaaacagcaggatccctatcaaagctcttaactataggtcactctgctagactatagaacagtacaacagtggacacatccaccacattggcatgaaagtaacaatatggaaagacaggaagaagccctgctattgagggtcaatcttacacttaaaataggtagaaattaaataatgtaaaataaagcaagggttactggaaagttccctatgtcctaaagcaaaattttcctgtcactgatattaaaatcctacctttagaaatgtatattcctaggttaagacattgtcttccattataattaagttgaccattgtccaaatttgcccaggagagttttggtgtattcctgttattccattatgccatctggtttagcatttgtgcaggaaaaagagcctccatttggacactaaatcatggccaccttattataatgcagggctcctgattctaatagtatattgggctttgtcagtccctgtactttcatatgattaaatctattagatgcattcttcccacagagacaaaccattgagagcaggctgggatgggaggaggaggaagaggcaatgctgatgaccttaaacaactttgggatggcaagtcaagggccaggcccaaaaagctgcaaagaaagatggatacctctggggtgtcacagtttttcccagctagaagttctaagtcctctcatttacgaccgtgccaaaattagggactgcatcctcttttggagctgggtcttaactggattctttttacctcatgaaatgttttcagcaaaagaaactgaaaccaatgaaagttttatttttccagcaaatataattctgagtgtaatatctggatattacttgaccatcttcatggttctagcaaaaatacgattctttgcaaatgggcagtccaacatgccggaggtaatagaacccacttggtctcagttcagcaagggcttttaattcatcactcagccctgtgaaggtcaccattctccagctgctgaggcacagcagttctgaccctctccattatttttcccaggacaggcatttggggcatgaagtaatatccaatcagaactctattcaaagcaatttcagtggcatcatccaatcaaaactgctcatgttccactcagaatacttaaacgcagggattgtttttggtttttgatttttgggtttctcttttgcactttaataaaaacaatcaactagaaactaacattatttctatataaaatcttataagaattatgaaaatgcttcatgttgcctttcctggttgcatttgtatgtttttcatcatgggaatgaagtataactgcttatagttgcttccctcattttattgattccaagagaagacagaattgtgacatgggatcataaagaacactgacccaaggaagagttttttttctttctttctttctttttttcttttttttttttttttttttttgagatggagtttcactctgtcacccaggctggagtgcagtggaatcttggctcactgcaacctccacctcctgggttcaagtgattctcctgcctcagcctcctgagtagctggaattacaggcatgtgccaccacagcaggctaatttttttgtatttttatagagatggggtttctgcatgttggacaggctggtctcaaactcctgaactcaggtgctccgccctcctcagcctcccaaaatgctgggtttacagacatgatccacctcacccggcctccaaggaagagttttctaaaagtctcctttaataacatcccttcaattcccctgatatccctttaactttccagtaaccctgctgatcccaacaaccttttgttctaggctcaagacaagattcttttttgaaggacccgttttaatattttccttttttatttagacaaaacgagactttgctcttgcctatttgaatggaatcctgctctttggacatatgctgaagatatttcttgaaaatggagaaaatattaccacccccaaatttgctcatgctttcaggaatctcacttttgaaggtactggtctactaagagcaaataaccccaaggtgaagaaatgtaggctttctgagtggatttggggcaacaaagaaggtttagcaatagatgattccacagctaaatccctttgaactcaactggatgcaaacatcattacataaactttgagggtgctgttattgataactgaactccggtttatgtttcagtcttttagaatctttggatgtcacagaaaagggcaggtagcgcaggttctgtacttatgaacaagctcatcataaggcattttgagcagtaatgtcctgactgtgcttggagactaacaagaggataaacatttgcagtttgatttgggtccttccatatctccttttctatccttcaaggatctgggaccctgtgttaaaacctttagctatcaaaactccacaaaataataccctccaaaacaacacaaacctcctgagctgcatggatcaatgttgccctttcctacaagcccctagtgaaactcccatctttcgtttcccagatctcatcctgagactatgaagaaattttcctctaaatgtaatgtatactaagtcaaagataaatgacagtggccttttctaacttgcctcagagtcttactctatgaaacctttgttttactgcagtgtaagtgactttctctgtaggcttcggagggcagcaggtgcccagcattaggactgagggctgcaccaggggctatggtgtatgacaatggcaggaagagatcacttctgcttcactgaagatgcagggagggagacacagtaatttgttggtcatcccatgtgtcccaagttctaccaggcactttatatgcactcttaatttcctcacttccatgaccacggttgagcattttaatggattagcacaggcttaacatttggcttaacatttaactaggaaacaaacaaatgtttgttcccgccacctaccagccgtacgacccttaatatctctgactaaataaattatttctcaccaatataacggagataataatagtttctatatcatgatatttcaggaagaataatatgataatgcatataaatcacttagcacagagcctggtatattgtaaacaggaaataaatgttcattgttatgtcgaaacatgtgaagttactaatttgatcacttttttttacctaaatagttttatcttatattgctatttaatagatgacaaaactgaaactcagaaaacttaagtaattttattcaatgtcttcagcaaatgagtgacagtgaaaaaattttgatcttcctacaatctatgttaagattgtgcagtgaccctatacactatgctaggagttcaggaaatattcttagcaaaaatgtgtcactaataatcgagggacttattgactcattacatttagtgccaccctaaatgcaatgaaaaggttttttgctttttctaaataaatacatctcccataaaaatgccctccagagatctctgggctaagaagccaatccaggtgccatctgattagactattaatgtcaacaatgttttcagtaaatttgaaacagagctatttgaacccattttacactctctgtcatgatccaacttatctgtcaggcaaaaatcaagaatggcctctaacatactctgatcttgccctagggtatgacggtccagtgaccttggatgactggggggatgttgacagtaccatggtgcttctgtatacctctgtggacaccaagaaagtatgtctcactgcttatcagaaaattcagggtgctgtgactgggtgaggaggggtaacttggaagaggagcactagcaaaagaattagagaaattatgtttaggatctgaagacagttcatttcaacttcacaattacgccccacttagggtagtattccttaagcattttgacccataaaacttcttactcagaatatccactgtatttactattaatatatctatacctctatatcaatatccatatagataggtatagatattttaaatatccacccagaataaattacataatataacaaaaagactattgatgggataccaatgagaggatcacaagtctttcctaagaattgtttactcattttcacaactaaagatttcaatgaaatattccctgttatctccatttgaactctcaggaaaatcattaaatgtgtaaacctgagccccacataaacagccctgtaatgctatgcttttattcatattatattcacttttttttcctcacccaatagtaggttctttaaagaaaataagtggtctactcacctctccatcttttcagtgcatagcttcttatctggcacaccattgacggctggtcagcatttaatcacaaacaaacaaaaacaaaacaaaaaaaacacctgtcttcatgtcatccaatgttgtatccatccaaactataaaagccactgttccagccaaccaagtggtcagtaaaaaggtttatataggaggtcaggtcctgacataacataaaatttattcatttttttttcattttccaatgtgagtgttatgacagtctaagtcatatactaaatgtgtacatcaacccagctttgtaaaagatatctgcaatggaaaatgtgaaaagctagagaaaagatgtccacgttgagaaagctaaaccagaaatttgctagcagcattccataaatgtaattcgtagtttctagatactatattgaaccttcaatataatgttatgtttcgcatacattccgtaagaataccttaacataagatcccatcaatacttcagttactaatagcgattacaaaggtacatgcattcctctctgagttatttgcatctgggatgatgcccatgatcttcacagagagaggcagaaacgtgtgagatctaatgtcagtctcataactatacttcaaaatggaaaatgttgctctgtgcatttattctctctataagcaaattcgggtgaatttttcaataatgtagtaccatcggttgtgctatataacatgtatatttgggaaaatcagagatcttctcaaaatgtaaggttaaagggatgataatctatatccaggataggtctcaacagagattcaatatgccacatcctaacataaaggaaaaagaaagaaagagtaaagttatgaaaatgtaacattgggcagggtgcagtggctcacccctgtattcccagcacttttggaggccgaggcaggcggatcacttgaggtcaagagtttgagaccagcctggccaacgcggtaaaaccctgtctctactaaaaatacaaaaattagccgggcatggtggtgcatgcctgtaattccagctacttgggaggctgagacaggagagtcatttgaacctgggaggcagaggttgcagaaagaaaatataactttgctgtccagaacattttgagggtacactggtaaatttaaaaggatggtcactgatatagtttggctgtgtccccaccgaaatctcaacttgaattgtatctcccagaattcccacgtgttgtgggagggaccaggggaggtaattgaatcacgggggctggtctttcccatgctagtctcgtgatagtgaataagtatcacgagatcttacgggtttatcaggggtttccacttttgcttctttctcattctctcttgctgccaccatgtaagaagtgcctttcaccctccaccatgattatgagacctccccagtcatgtggaactgtaagtcaaattaaacctccttttcttccccaaaaaaaagagaaaaaaaaaatttttttcagaggtttcatggactccccagcgaggctggggaggcctcgcaatcatggtggaaggtgaaaggcacatcttacatggtagcaggcaagagagaatgagagccaagtgaaaggggaaacctcttataaaaccatcagatctcgtgagacttattcactaccacgagaatagcaggggaaagaccggtcccatgattcaattacctctcctgggtccctcctacaacacgtgggaagtctgggagatacaattcaagttgagattttggtggggacacagccaaaccatatcagtcatctttcagatctcccttacaaaattgactcaatatatgcagcagtaatttaaggatatattaatatttccattggcaaatgacttgaaaatgaaatcttttattttagaaactaattaatgtcatgtacaagaaaagcatattagagccaaggaatagaagagattagaaaattaagtaatggatagaagttaagaaatgtagttatttcagggccccttgatatgtatcaaaatgacataatggattttagctctgctgcattttcttgagagcttttttcaaaagcaacttaatattgtggaaaacactagtctttcatttatcatgtgacttggagctagccatttaatatttcttagcctctagtttaacatttgaaaaatgaaatacttgaactgattcactaaaggcccacagaatctgtgctggacagacaggagttaatggtgtagtgtatgagcataaagaaataggaaactaatcggtccatctgaagttatatctgtgttcatgctgggaatcaataaatgatcctaactagctggttaacagttgccttttttcactgagaattgttatggaaatcaagcgtcattgtgtagaatcattaatctcaccataatttgttctataatgttttactgttcatcctttttcttttttgtgccctgacacagtacaaggttcttttgacctatgatacccacgtaaataagacctatcctgtggatatgagccccacattcacttggaagaactctaaacttcctaatgatattacaggccggggtaagatatccctaatgaattttctctccctgacactgttttcctggtaagaaaagtaaagtctattgtttatgtaattagcctgtgctttttgctgtgttttgtctgctgtcccagtttgatttcctgctgtccagtttgtaaatgtggtccttacttccctgcacaatgaatgatattatagttctgattcaacagtgatttctggccaggcatggtggcttatgcctgtaatcccagcactttgggaggccaaggcaggaagactgcttaagcctaaaagtttcagaccagcctgggcaacatggtgaaactctgtctctaccaaaaatactaaaaaaaaaaaaaaattacccaggcatagtggcacacagccgtgttcccagctacttgggaggctgaggtaggaggaccagttgagcccaggaagttgaggctgcaatgagctatctttgttctactgcactccagctgggcaacagagtgagatcctgtctcaaaaaaaaaaaaagaaaaagaaaaaaaaggaaagaaagaaaacattcttattctaatttagctatacctatctttaaaatatgtcctaccatttgacataaattattccacagaaaaccgggtttgacaactggcaaaaatgagcacagagacatatattcttactccatttacattttactgcaataagctaaaaggttgtgtatttcagcaagaaatacttgacatatcaggctgaggggtgaccagtgatcctggcctttacagtctcccctgttcccatactggacacatatttgggttgcaatgatagttacccacctacttaagattaggtcctatcatgtcatgaatagccctaacatgacttggccagctttcacccgtgcaagctgcacactcaccatcagcagcaggcagggccactcaggatctcctgggcaacgaggcctcaggacaatctgtccatgactggcttggccagggcttgccataatgagtggtaattccatgtgactaggaaaaatctttaagaaaaagtcttaaatctggacagatatttagcccaaagatttaaaaaaaaaaaaaaaagtagaaataccatcaataaaattatttagagccaagcgtggtggctcatgcctgtaatcccagcactttgggagactgaggtgggaggattgcttgaggccagaagttcaagatagcctgggcaacacagtgagatcccatctctacaaacatttataaattaaggctgggagtggtggctcacgcctgtaatcccagcactttgggaggctgaagtgggtggataacgaggtcagcagttcgagaccagcctgaccaacatggtgaaactccgtttctactaaaaatacaaaaattagctgggcatgatggtgcgtgcctataatcctagctactcaggaggctgaggcaggagaatcgcttgaacccaggaggcagaggttgttgtaagccaagatcacgccactgcactccagcctggggaacagagcaagactccgtctcaaaaatatatatatataaattagtggacatagaggtgcatacctgtggtcccagctactcaggaggctgaggtgggaggatcacttgagcccagtaagttggggctgcagtgagccatgattgtgccactgcactccagcctggatgacagagcaagaccctgcctcaaaaaaaaaaaaaaaaaaaaaagaaaattattatatattcacaaatggagcatcaggcaaccaattaaaaataattatttatgaagaatgttaaatgacatgggaaaacttatgatgtaaagtaatagaaaagtacagcttcttatttaatgagattctaactttgtaaaacaatgcatagaaataagactggaaagaaatatgttaaactgttaagagtggtgtcctctgactgatgggatcctgcaagattttttttgctttattctatttttctgaattttccaaaatttccacaatgactctgtattagtttcttattttcaaaaagtattaaaaattataagctacaaatatttttataccagccccgctctacagccagaaactctgaaaatttgatctgatataaagggaacatttctggtttgaagggcttgcttgtgtcagagctatacctgcgtttctagttttctttcactccatgagtcaaattaagtccaaaatgattcctgtacttttatccaacaggtattagcagctgattaacgaaatgagggaggggggaatgaagatggcattcttctagacaataagcaatcctgagctgacttcagatttattgctatgattgctttttaaagtcgagttttatttaataagcttttaaaactttctggaaccatcttcaagctttctagttttaaaccaaacttgacttctgaaatatatctcttttctcatgggcttctgcaactctcaacttcttttgtaactttttgagttcaaattattttttctttcttcttaattataactgtcagtgacaaagttaggtttgtgtttttaatgtatttccttcaagttttttggtattttggttattcaataggtctgtgatttctaaagtgctgaacttctcaaaaagtactttttgagagagttctctttacttaaagagaactgacttcctcaatggttgaactagtttacagtcccaccaacagtgtaaaagtgttcctaaagtgaacattaaatattcatactatatcctacagggacgttatattatcctgagcaactttacttcagcctcagttaactaacaacctcagttagccagagcttttcaatacttaactgttacttactacatttagctctaaactttaccaatgaagcaataatataggagttaaaaagaaattatttaggcaggtagcgagggtacaggagtcctcagtaaggctttttcttttcttttcttactctttttttttttttttggagacattgtctggctgtatcacccaggctggagtacagtggtgcaatcttggctcactgcaacctctgcctcccggattcaagcgattctcctgcctcagcctcccgagtagctggaattacaggtgtttgccgccacgcccggctaatttttgtatttttagtagagacggggtttcgccatgttgggctggctggtctggaactcctgacctcacgtgatccgcctgcctcggcctcccaaagttctgagattacaggcatgagccacggcgcccagccaggcattttcttttaattgaaaacagtctccaaaccatttcttttctagcaaaaagcagcctgaaaagctgaactgcaagcataaataagcaagctggaagcttgcgtagatgaatgcccgcagctgtactaaaagccaggtccacccaatatagcgatttcccctcccttttctttgtagccatgtgtgggggtgtcattgtgccggccgggtaaagccacatgtgtgggtgtcatggcgccagccaggtagaggccgcatttgcataataaaagattagggtgagagggccagtttcttcagggctatgtaaatggcacactggtcaaaccaatcccctgggccctatataaatcagacaccgcctcctgaagcctccctatataacctactgcttcccaccacaagcatggttttttcccttcagagccctcctacctctctaccggtgagctgttctcttctttcctgcctattaaactttccgctacttgacccgctccgtgtttgcgtctgtgtccttaatcttctcgtcacgcgatgacgaaccttgggtatgtccccagacaatgaagccgcttcagcaactcaacctttgaaatagtatagaaatacgatatgcatgactggaacttgcatctgtgtgtacacagctactaagtaacaaaacatttcaccaagagattacaccatccctgttctttcatttatttaacaaagatatttatttaatgccagacaatgttctgagcacctgggaaatagcaatggacaatgcagatttggtgcccgtcctcatccaagtcctcagcatctgcttcctgtatcacaaaaatgacgtcaaactgacttcctgcattagtcctgcccacttccatccaacccatcctgctatcagaaagaaagcacaagtccaatcatgtcactgcactgttgctaacatgtcaattggcaactctgctttacctacagaatacagtccaagttacttaatacagcacaaagtgcccgtaatctccctacttatcttttactcacctatcccttccccatgctctcagcttcctccctacttccttaaagcgtcatgcaaatttatgccgctgtgtccttatttatgctactccctcggaatagaatttatcacttctccatagaggtgggaaacatctactcatcctcaagatttaaccggaatctcaactttccttagctttttttttttttttttttcctgagacggagcctcgcagtgttgcccggcctggagtgcagtggcccaatctcggctcactgcaacttccgcctcccaggttcaagagattctcctgcctcagccttccaagtagctggaactgattacaggcacctgccaccgcggccggctaatttttatgtttttagtggagacggggtttcaccatgttggccaggctggtctcgaactcctgacctcgtgatccacccgccttggcttcccaaagtgctgggattacaggtgtgagacaccgcgccccctcagggcttattcttattcatatttccttgccccaacacagtgccttggaatgaataaatgaatgaatgaatgaatgaatgaatgacaacatgagataactgaatatatttctactctggactccagcactcatctatactctgttaatttcagtcaatttatttctcttttctaagtgtgagtttcttcccctgttaaatcaagaagtttatcaggttccttccaaccgtaatatcatatgaccttgaggttataaactctcattcattgtgagatgagttaaatagaatgtgataactacagcagccaccagaaggcagcagaagcttaaccttggaatttagaacttgatactgcgtttatctaaaaggcaaaactgaaaagcatgtttaattaaaaatgactacatttaaatagtatatttaaatactatatataaatattataattatatctaatacagtgagatgttcatactgtaggaggcagagaattgaggtgggctgaggagtccccatattccctccagtttatactctagtctaggggatgtgcaattttgatagaccagtgagtgggattatctacactgttgaaaatgtatttcttgtactcactttcgttttctggggtttagggcgtgagaatggtgggagtggcaatagtggtgatagtgatggaagtggtgattgtagtaacaaacagaattcaccagttaaatgtgcccataatgcaagttcaactccaaagtatgaatttatttctgccccgatgagagtagaaatccaaagttcacattttcaccattgaaaatttcccatgaacacaaaacaaggtaatagaggcaaagtcacatgtctgcaaagcataaacccttcaaattcagcccttatacaaaggagctgtagtgtttaccccaagctaaaccatctacttcagaaggacataatatgattaaacaaaaacagttttaaaatacatatgacatgagacccctaatggcacaggagtctttctatatgaatttatttatgtattttaatgtccaagcaccttctccttgcctcttctcaggcaataagatgaccagggccaggtttttcttctattattttttattagccatttttattgatactttaccaggtcttgtgctgggtgccaaaggtgtaaggatgaacaggaatgaataagtaggacatggactgtgcccccaggagtttagattatggtgtcatgatagagaatacagtgtgaaggtttaggattctgctttcataaagaagtcctaaaacctcattttcggggcacctacatcaattatattttagcacagaaaaattcacacatggctgggcacagtggctcacgcctgtaatcccagcactttgggagaccaaggtgggctgatcacctgaggtcaggagttcgagaccagcctggccaacgtgatgaaaccccacctctactaaaaatacaaaaaattagctggacatggtggcgtgcgcctgtaatcccagatacttgggaggctgaggcaggagaatctttgaacctggagggtggaggttgcggtgagccgagatcgtgccattgcatgccagcctgggcaaaaagagcaaaactctgtctcagaaaaataaaaagaaaaattcacacacatgattttaaaatccagtagcagatgtgttcataatggaaagtgaatgcacctgatcccacctctgtgcatctctgctctctcagtcacttctgcttttactgttttgcatatctaaataatatgcttctatttcttgatttataagctttagcagttatctattaattttttgtattgatacatgaagatttagctcatcttcgctagccctctttctcacttcttcccatatagttatatcttttttgtcggtacaattattgaacacctttttcattttaattaatatgcatgagcttctagtgttgtcctatcaattgtatataaaatatcttgcctcccactttgtaagatgaagatgttagtgccacaattctttcttctacctccttcccatctccaaaattctcctatatttttctttgccagggttgataatatttatttggtaaccaaaataaagacctctgttctttacctataacttgattctataagttgaaaacaaggaaacattttcattatgtgaatattatttatataaagctaaattgtataccgtgataacatctttctttttttttttttttttttgagacggagtctcattgtgtcgcccaggctggagagcagtggtgcaatcttggctcactacaacctccacctcccgggttcaagcgattctcctgcttcagcctcccgaatagctgggattacaggcacccaccaccacggccagataattttttgtatttttagtagagatggggttttgccatgttggctaggctggtcttgatctcctgacctcaggtgatcggcccctcagcccccccaaagtgctgggattacaggtatgagccaccgcacccggccaacatctttctatatagccccaatgtctcccttttgtaccacaaaggaaaattgattttctctccttttttaatacctaattctcaaagtcagggcacattttactttgtttcatttttggattatgccttccttgaacattttttccttagaattcctgattggatttctcttttctttccttgctgtataaagaaacatgtcttcttcaccatactcctatcacttcccagcttcttacacattctgtctattgcttggaatctattccattttttcttcttgaacctactgacttcctaatagggaattcattgcggcatatatgaaccacgactttcccgtgcagtcttcttgttgctgtccttctctgtgtaggagtattcctttgtatactcagacactgcttcagtgcttccttgggttggatccacattttcctggattccacttactcttctgagagtctttccacttactccatctatacaactccacccacccactagtgttctagtaaataaaatcccattcttcattgacttccctcactaacccaggagagcttggaaagaaccagcatgcaacactgtcacttaatattctatactgacttacttttcttccggcatgtgctctgtatttaaaaacaagttgtcttagttgggtatggtggctcatgcctgtaatcccagcactttgggagactgaggttggcggatcgcttgaggccgggagttcatggccagcaacatggcgaaaccccatttctacaaaaaatacaaaaattatccgggcatggtggcgcacacctgtaatcccagcttctcgggaggctaaagcaggagaatcacttgaaccagggaggcagaggttgcagtgagccaagactgcgccactgcactccagcctggatgacagagtgaaactctgtctcaaaaagaaaaaaaaatacatgtctcatcctctatgaacccttcttaggtatattggtttcaaggacaccaggtagacttctaccaccaacttttttgtacgtgctctaaactattttatgtttgtgtaacatttggtgattcttattagaaagaatagagatgtatatgctgtcagaatagccaaaattaagccactttccctgggtacaatgccagacaaggctgtcagagagtagggacacaggacttatattaccagagagaaattaataaaaaataaatttttttaaagggttctcttttcccttccccaaattacattgtacagctagaatcttggaaatgcttttgctctcttgtctaaggtccttcctaacgcattttccgccacaggccctcagatcctgatgattgcagtcttcaccctcactggagctgtggtgctgctcctgctcgtcgctctcctgatgctcaggtacagccgcctctatcatgcctgtgttcggtatccagagaggcaggaagggaaagtgggagaggtctgttgtctgttgatgatgatgaatattcacaaagaagcctgcagactgacctaagataatgaagacattctgcatcaaagactaactgaagggcagaatattattgagtgaatagattagggctttgaagccaaagatgcctgaactcaaatcccagttctttgagttactagttctgtggtcttaagcgtgttacttagcaacttaaacaggtaacttagcttcagtttcttcatctgagctgttgtaaggattagaaatggaacatgtatacaaactaccatataataagcatatatagataaaatagttatttttattatgctgttatattgtgggagacatcaaactcattaaattacatatttagactgggagaggttttagaaacaatttattccaaatctcctattttagcctgaggaaagagaacccagaaagtcaaatggcttctctagagtcttatcaccaggtagtgggtggggccagaactagaactcaagccttctcaccatcagttccatgatttttctgctcaacttgggtctgccaaatgcctagccagagacattgtgtgtactaagaaatatttattgaatacataaatgagtgagtaaataccacactacatcctaatctgcatatgttaaatgccaaacttataatactgtattatattaccaggttcacttgcacttcctagctaaacaagacaacagttttatctgtgtattacacactttggtctgtgtgtcattatactttctcatgtgaatgtccagcctgccatatactggttgatgttttctccagaaaaggaagtagactattttcttcaatctgacaacaccgcttggctcctgtaactgtgttgctcagaaatacaggtgatggtctacaatgtgtggtgaccatttagtgaagagtgagaagaaaccaaaattttcccccaaaagcaaatctaaatgggaatcactttaagatagggtaaatcacaagatcaaagataataacaggtgtttctcattgtctctaaacatggcaggcagagatggggcttcctaatgaccagtgcaatgctatgcccatgagggggcctggcagacaggtggtacacatgcagtttgccattacaacagcctatgcaagaaaactagcaaaccatttaagaaatcccctaattcagtatgaatgacagttggctctgctgggtcccaagagtctcctggggtacagagctgagaacccaagagcctttaaggtcttgatattcatcctacttgcctccaggtcttagggtcagtaatatgctattttacatgcatttacttgaagaatactcagacttagatggaagcatacaaagagaataatcatttctgcttaggggacattaaggaaggcatggccttgagaaggtgagaatgagtttgtcaaataaccaaaaagcaaaggcaaacagggacaaaacaggtcaatagaaaagaatatcagttccagaatcagatacaagcaagaacttataatatgacaaagatgacagtatgtgacagctaagaaataatgttggtggccgaacacagtggctcacacctgtaatcccagcactttggaaggccgaggtggctgaatcatgaggtcaggagttcaagaccagcctggccaacatggtgaaactccatctctactaaaaatacaaaaaattagctgggcatggtggcaggtgcctgtaatcccagctactcaggaggctgaggcaggaagatcttgaacccgggaggcggaggttgcagtgagcagagatcgcaccactgcactccagcctgggcaacagagcaagactccgtctcaaaaaaaaaaaaagaaagaaatgatgttggtaaggtaggctttccacatgtaaaaaacaaaattaaaacaggtaacttagcttcaatttcttcatctgagctgttgtagggattagaaatggaacatgcacacaaactaccatatactaagcattatataaatgaaaatagttatttttattattatattgtattatgttgtattttattattattatatatctaaaataatacacaaagacatagtttactctgtggagttttaaatgttaatgcatagtttatgtggagttttaaatgttttaaatgtttgattatgtgaaaatcaagcttcaaaacttagaataaattaataaaaatgactttttaaaattatttttatttttttgagaccgagtctcactctgtcactcaggctggagtgcagtggcgccatcttggctcactgcaacctccacctcctgggttcaagcaattctcgtgccttggcctcactagtaggtacaattacaggcgtgtaccaccacacctggctaacttttgtatttttagtagagatagggtttcgccacgttggccagcctggtctcaactcctgacctctagtgatccacccaccttggcctcccaatgtactgggattataggtgtgagccactgtgcctgtccaataaaaatgactttatgatctcagtttaggaaagtagttctcagtcaagataaaaaaggaaaagtcaaagaaaaaatacataaatatgacgataataaaatcaaaactttctgtaaaacaaagttaaaggaagtcataaactaggaaaaggtatttgaaaactaaagggacaaaggatttatttctcaaaatatattaagaacttatgtaagttaacaaggataagaaaaatatacacactaggaaaaaatgagcaaaattataaatacataattctatataattctgagtctatatactctattaaatagctagaaaatatttgaaaggataatatcacttgtaatcaagaaaatgcaaagtaatgcaataatgaaacactgtttcaccttcatcataaaggttaaaaaaaagtttatcaataccaaatgttgacaagaatatagaaaatgggaattctcaagataagaaggtaaattaattgataactactgctttgggaagcaatttggtgatatctgcaaagtcgaaagtgtacatcgtctatagcccaagaattctgcttcatctataccagcagtccccgaccttttgacaccagggactggtttcatggaaaacaatttttgggggtggggagagttttgagatgaaactgttccacctcagatcatcaggcattagttagattctcataaggataaggagtgcacaacctggatccctcacatgtgcagttctcaatagggttcgcggtcctgtgagaatctaacgccaccactgatgtgacaggaggtggagctcaggtggtaatactgacctctcacctcctgctgtgcagcttggttcctaacaggctacggaccagtaccagtccatggcccaggggttgggggcctaatccccaacctacactatctggggaccgatactatctgaaggaaactatacatttttaacattttgtagttgagataggtgttgttacattttctctgtacttttccattttctttaaacatattttttgaaaaggcacagatgggtaagaggaactggcttatttagggatctggtgtattctctctggattaaaaattaacatttttgcctctcaatgtcaccaactttacatttttttcctgtattttttcctcactccttctatgtcatcagtttaaatcctttagtattgtgaaggactgccttagtgaaaaacctaggaaagtgaagtgaaaagaaaagaaagactaggaaacaggggtccccaaaccccagtccatggcctgttaggaaccaaccgcacagcaggaggtgagcagcgggtgagcgagcggtaccgcctgagctccccctgctgtcggatcagtcagggcattagattgtcataggagcgtgaaccctactgtgaactgcgcatgcaggggatctatgttgcacactccttatgagaatctaatgcctgatctgaggtggaacagtttcatcctgaaaccactccctgccacctccatggaaacattgtcttccaggaaaccagtccgtggtgtcaaaaacgttgagggccaccgctataaaagcccatcagaaatccttgcaggtccactggcagtaagcgcttttcagtttggaggacatggtgttctgtcattgggctaccttccctcacacatatctacctgagcataccagggttctaaacttcacccagtcttcagaagctgaatgacatggatattaataaaaacctattgaccagttttattcctttcacagaaaatatagaaaagattatgaacttcgtcagaaaaaatggtcccacattcctcctgaaaatatctttcctctggagaccaatgagaccaatcatgttagcctcaaggtaaagcctaccttacctgttgaagaatgggttcaatttggcaggtatttgacaagacttaagtagcattgcaggatatgtgccaagtagggatagttgttctagaaagcaagacttagatgctttctaattttcagctctctcccttccccttgattctccattctcctacatgtcaactagttaatccaatgagcacttccctggaggctgagatatggtgtgttctcgttctttgcatcttatccagaatagaaatacacatattgggaatttgccatggaagggatgtaggaatgggcagagcatttgagttcccctaaaccttggatgctaatctatccatactaagggcctatgacttgtcttactcattcctgaagaaagaggcctctgcttatatttgctcacatttaccttcaaccaggaaatagcagcagccaataataacttactccatttaccacagtcaatgcaggacctatgctgtctcatctattcctcacaggaacccaaaattaagctttattatcataattttgctgatgaggaaactgaaggacaaaagattaagaaacagtgcagggacacatacaactaatgagtaagataactataagtaataatagctaacacttactgagcacttataatgcaccacatgcattaacccatttcatcttctcctgagcactgtgaagtagcagggtggaaattccaggaacacagctacaatttaaacccagtctgtctaactgtaaagccagagattgtaacaccttccatacaccatataattatcctagtttttataccaaagcgtattaagagaatatggagacccaagacctccacagatgggaattcgtggactccttcagagtagggccaaactgatagtgtagtgtgatttgagatgcttccttgcttaaaatcagcaggaataaaattgcatttggcttaagtttgtctctggaacctctctaccagctcttgaccctcctccccaagtcctgtgtgctgccctctaatggctccaatcccctcatgtctatccaaagaccaggtcttcccttctttcagaaatatgacatgctccaatgtgaccctcctggtgcattctgaacctcaacagaaaaattctattcacaaagaccaatctgtctcagctaagtgtcaggatgaaatcaatttaacagtaattcacagtcaggtgtaaatgaccttaaggctactgaatttccaaagagagaatttgttgacctaaatgacaaactggaagtacctagtgttaaaagaaaaacactggacagacaaaatagaatttatttgagcaaaaagtgattcatgaattgtgaagcactcaaaaccaaaagaggttcagaaagctccactctgcagcatgggcagtgagctttcataggttgtacaaggaagtaaagtacacaaataacttgattggttacagctaggcatttgctttatttgggcatggtctgttcagttagcttcctgtgattggctgaaacccagccatttgttacaaaaatagactcctaaattagttttcagtttgtctgtatactaagttaggttgcagtttataggaactcataatacaaagacagcctcatgccaatggtctcctgcttatttaatataacactaggaagaggagaggggactttcagaaggagcgtgtgcacctctgtctctcatcttctcccagatgggctcccacacgctccacctctgcacaagtccagccttggtgtcattcctcaagcacctccccactgcctcaaaaccccatatttcatattttctcttttggagtaagcccaaaacatgtgtcaccgtatgttttcttaaaatataaatattcctagaagtataattcatccatttcttgtcagtttctttacaaaatttttatgagtacagattagttcatcggaatgaatgagtcacctgaccaaggaaataggtctttgggacagtaaactcaaaggagggaagttcaaaattattttgatcatgtgatcattgttactctgagttttagacaggctgggaagcaggtggatcagaaattggctgtacagagagctcatcaggtgctaagagtcaggtagacatggagaaaacccaaggtcacccgaagtcagcaagggtggaaaatacctacaaccagacaggtagtggttcaagtttggatactcactgaatgcagaaataaggaagcaagactaagagatgagataatagagagtcaaacatcccactgctagaacaggaagggtcagaatatcagaccaaagattccagacaaaagaaatcaggcaagtcaaagggatagagtaacacagaaaaaaataatcaagatgatcattcatttgagggtaaaaagagaagtattttagctagcaagagaatttcacaaaccttgtctcatttaacccccagctatttctatgagttggaattgtgcagtaaggaactgaggtccaaatagtttaaatgatgtcatcaaggtctgaaataataaaaagagcattaggcaagaagacaagcctaggttctgccattctctttttatgtgacatttaatgttatttaacccttctatacttaatttgttaaatgagaagaaaatgaaatgatgataactgacatttgttagtctgcaatgtgccaggcatcatgcttggaccttcagagagtcatttcactcgcatttcaaaatggccttgtaaggtacattttaacaaagataataacacatctcaggtttttatgagaatcacatcaaaagatgcaattgttcccaaccttttctctgtctttggaccagaagtcattaactggaaggccaagagccatatgtggcctgcagttgtgagtgcctatgtgtgtgcgtgtgttttgttcaatatttgacattttaaaaattaattgccaacatacaaatgtcacgagatagcatataagaattcttattaccagctccttttgataaataagatgatttagcaacttcgggctgaacccagagctgacagtactgcttcccttagacacctggcccagttttatcatttgcattgctacttgggcctttaggcatgagtgtgcaactcaaatgtacagcatccttccccaagagcatctatctgtagctacaggcaataattcccacaaaaacagggttggggtgaagggagcaaaggaaatccctggttgaagtagggccacaagaggaagggaggaaacccatagctaagcatgagcgcagtagatacctggaaacacgttgctggagtccaattagtgagagggagcaagtcaattacaacagtttttctggaagcctgcttgcccagcatgttattgaggaaacagatgcagcccacctggaagagcctctcagcctttgacaggcagtgagtaggatgagatatggagcttctggaataattagccttttcttgtgccagatcgatgatgacaaaagacgagatacaatccagagactacgacagtgcaaatacgacaaaaaggtgacctctcccacttctctgaactctccactggggtatgctctgggccttttgacccctcattgccctggcccctgatgtcagtatcacaatggtgggagtccccagtctgttcctaggggctattcttagagcttcacagggatgggcagggccctgcttcaagggttacaaaactcacaatcctggggaaaatggaagacaaatagaatgttggggaagggtggagtgtaggaagaaaaattaaatatcaaagatattcagagtagtccagggcaaccctagtattatattttggctcattgctgagaaatacaacgatctcatatgagagctttgcatcttatttccatccttctttcttccctccctcccttctgcctgccttccttccatttagtcattcttaaagaaacattcgagactgaacttaccatatgccaggtactaggcaccagggatataaacatcagtcaaggctgggcacaatggctcatgtctgtaatcccaggactttgggaggctgaggcgggtggatcatttgaggccagaagtttgagaccaggccggccaacatggcaaaaccccgtttctcctaaaaatacaaaaattagccgggcatggtggtgcatgcctgtagtcccagctactggggaggctgaggcaggagaattgcttgaacccaggaggcagagattgaagtgagctgagattgcaccactgcactccagcctgggcaacagagcaaggctctgtctttaaaaaataaataaataaataaataaatataaaaaatcaatcaaatactgtcactgctctcaaaagtttatagtctagtgagacacacaaacaaactgttataatatgcatgtaaagagttacaccacaacactgtctcctaaatttcattgatttttgcagcgagtgattctcaaagatctcaagcacaatgatggtaatttcactgaaaaacagaagatagaattgaacaaggtatgtagcccttacttcaaacccttgagaaataacttcacttcatttcctctaatcactgaggttgctggtggagtaagaggctgacagaaaagccctcaggccaagaaatggtgactatatttcttgttgaaaattctaccaagagatattggaaagtgaggttgacggtgtaaaaaattctggaaatctactagtctttcctggaaagtggacctgatattatttgaaagtaaagtttatattcaaggcctcttactgacaaaggaaagtttgttgaatgagattgatataatgtgtgataagcaatgggtactgacattcaatttgttaagacaacacatcttctcaaagatctgaaacaaaacacattttattggcatattaatttttactttggcaccccattctgcctaatttgctttgtaaacaaacacgttcttctagttgcttcagattgactattacaacctgaccaagttctacggcacagtgaaacttgataccatgatcttcggggtgatagaatactgtgagagaggatccctccgggtaagaaaccatggtcatttccaattttctaatcatataaaaatattcagcaggccttttaaaatatttaccgagtaaaataatattagagaaaatcagggaaagttggtggggtcacatgctttccaaactagatccccgagattttttcagtcttattatgtttttataaacaagcaaaaaaaatttcaggaaaaagataatagatttggggaggggagtaaacagagaatggaagtggaaaaatgagtgattacctccaaatacattttattttccatgaatacttgcttttgtattaaaagagaaatggataatcattatgatagcgccaaataagcattagaagacttggtcatcattcttggttctgctgctgtccaaattattactccactcttggactgaggatcatctgggagttgccagatgaggtcaggtatttggactgagcaagtccaaagcaaacagaggaactaagaaaaaaagcaagaatattagctttcatactatgcggtataaactcaaatctaccctccaagaaaaaaacatagccctatatgttactatctcttttaaaagttatttcatgcttgttattctaacatctgagggctctttctttggattaatccctatgaaattcaacagtggtacaaggaaaaagtgacacattaagccattaactatatttaacactttgagaattcatttgctgtattgcagaagggaaagcaagcccgtgagggactaatgtaatggaatgtggtagagaaatcttgagcagggggctggccaggagaattaagatcacagaggaaaatggtgctaaggtaaaagttcttaaaaaataataaacaaggctgggcacggtggctcacgcctgtaatgccagcactttaggaggccgaggcaggcggatcatgaggtcaggagatcgagaccatcttggccaacacggtgaaaccccatctctactaaaattacaaaaattagctgggcatggtggtgcatgcctgtaattccagctacttgggaggctgaggcaggagaatcctttgaaccagggagtcagaggttgcagtgagccgagatcacgccactgcactccaacctggcaacagagcgagactccgtctcaaaaataaataaatgaataataataataataaacaattgaagtatctaatgcaaactttagaagaataactataacataaggaaaggaaactattaaatatcaatcattttaaatcaaataaaataggatagaattttaaaatgcacttgctacttaaaaaacaaaattattaaagcatacaagcctttcacttctagttattatttttaaaacaaacatgcaaatacacgaaattgggaataaaaaagcagtgaaaagatgttttaattgtgaaagaatacttcatgactattaaattgtaatctttaaaaagggaaagtttcagaagcaatataatcatgaaatctgtttcaaaaaaataaatatttaattaggccaattctgaatcagtttcagggaataataagccatgtgaaaccctttgactaggctctattaattggtattctaaaatttctgtctcattgaaattaaatgaggtctagacctcatgtgaaaaacgtttctaattttgaaagacctgaaatagttattattattcctagaaatttgtatttattttatcagtatcaattaaaatgatcactttaatcatccattaaaatgctcatgtggtttttctcctatgaccttttgatttggtacattataataatattgttccattcatagaattaaccatatccaattatttgtgttatgctttttgtgtatacaactggcttagcatttctagtattttagtacgtttcttcatctatattcacaactatagattttagtttcaatcctatgctgactttgttcaatgttaaatgaatttggagtatgttcatgtttttgtttaagtttaaaatagtttttatatagataatgagaactactgttactaaacttcaacgttagaagaattaagctgaatctggtattctttctatgggaattataatttcttctattgttactaatgtaatattatgatatagtaagaaatatattttgtcttcattcttggctcctaaaacacctgtttttactgggtggtgggggtgagaaaagctcttttgttatttatagtaaccccctttcaaacatacctgagtcatgctacttaagatatgatagccatggaagacttctctggcaagatgacattagagtaagacccacatgaaatgaagctgtgaaaccatagctcagggaagaggaaaccaggtttagtatttgcaacctgttctcaacaaggaaaacagcaattaaagggtgatatgtcagagaagtctcagacctcatttcagaaatattcctaggctcccccataataacaactcttgtagagttaaaaataaaacaatacttccttaacattgcaaagactgtctatcataaaataacaactgacttcatctgtattaatgcaaagactccctagtcccacccctgtactactattagttaacttctgaaagttctaaccaaagcactaatgcgtgaaacagaaataagatatacagttattggaaggtatcaacataaataacaaatagagagtggctctctgaaagaaagatatttattcggaaaagaacattgtaatgggaatacatatgccatcgtaaattatgtgcacattcagagagataaaggaagacaaaggattttaaggggaaaaaaaacaaagaggattacataattgttgtgttacaaagatcagtagcaaggatgatgccagtcagaggttggacaggcagttgttgggcagatgtccttgtataagtactttttgtgtgtgaggttgtgatggcctttgtggaaggttgaggtttctgtagagtcttttctgatagtttttgtaatgaaggaaggatacaagcatgacaaccctctttttcatggccttttctggctgtatgtgtcaggattttttcaacatttgtgactccattctgattttgacaactttcacaaaaggaatagatttttttttttttttaatttaaagatgaggctaggtgcggtggctcatgcctgtaatcccatcactttgggaggcagaggcgggtgggacacgaggtcaggagttcgagaccagcctggccaacatagtgaaaccccgtctctaataaaaatacaaaaaattagccgggcatgatggcgggcacctgtaatcccagctacttgggaggctgaggtgggagaattgcttgaacccgggaggtggaggttgcaatgagctgagatcccgccattgcacttcagcccgggcaacaatgcgagtcttcatctcaaaataaataaataaataaataaataaataagtaaaaagatgatatgattgttttcctagaaaatgcaaaagcctcaaatactaaaaattataagaaatttgtatgatgactagaaacaaaataagtgtatagaaaataatttacatatataatgtatatatcatatatattagccaaattggtcagaaaatacaactcaaaaaatcctccttaatatttttaacaaaaatatttatttgaaaatactcaacgtgaaatgcaaagaatcagttaagaacactgaaagttttctaagacattaaataaatcttaacagaacttagtcaagttcttagataggaatcaatgatgtgctggaactggctggtactagctcagagctgattgttaagttattcaagaatttgccagccagtcagtgttaaacttttggaagctgaaatcattcagggtggaaatatttcacatcgtactcagcaagcatattataaatcagggctgttgctaacagagagccgatttaccgacaccctataccgacaaattcacattgaaaatgtataaattcttctgaaaaccacaaacttgcaatcaaaggcaaagactttgcttaattaacagagatcatcaggaaaaacatatacatacacacatatatatatgagcaataataactaaaacagttttgaaaaagagaatgaagaggccacttgtcagaaagttattataatcaaggcggtgtagtgacagctcatgaacaagcagatgatttatggaagaaaaacacatgggctaagaataccattaagtatatgacaaatatgactaaagaagggtaattttaaaaatggtgctcagataataggaccttttcattctctcttccacaaaaggttcttttcccatgctgttccctcttcccaaaactcttgcctcccttcatttgatctcagctcaacagccatttcctgaaggaagccatctttaatcttcataacaaaccccagattttaggggtcaaatccccagattgtaggcaatttttcttcgtacttatcacagttataatcttatgtttatttgtctgattattttatgagtgtcagtttccttcaccagactgtgcaccctataacaggtcccttataatcccagcactaacacagtccctgctctagagataagactcaataattttaaagaataaatatgcaggtcacctattaaaattgctcagaaaaaaacatataaatctgcatatacattatgatcccacttttataatatttattacatatactttccatatctacattaaagaagactaaaagaaaataccagaatgagaataaattagatggtgcaattagcaataattttatattcttcttttttatattgtgcaattttttcacattttttatagtaaacttgtattccttttatcatcaaaacagaataatatgctttttacaatttggcagatgagaacagggtaggatgggtgaatggtgcgctaaagggagagaaggcatagaaaagaattagtctgtctgcccataactcccctctgtcaacttggcctggtacccacagcccaaccagccttatctgaaatgattaaggactttagacccctccttggaaattcttagtacagtgcctgagttaaaactaaaaatcaaactgggctttttcctaaaataagaaactattgttatcagttagagtcctgtttagagttctaccgtgaagaacagttatgtattagcttaattaaaatcctgcaacttggtagaaccatcatcatattaaaatagtgacttgaaaattccagatataggcggggcgcggtggcttgtgcctgtaatcccagcactttgggaggctgaggcgggcagattgcttgaggccaggagttcgagatcagcctggccaacgtagcgaaaccccgtctctagtaaaaatacaaaagttagctgggcatagtggcatgcgcctgtaatcccagctactcagcaggctgaggcaggagaatggctggaaccccggaggcacaggttgcaatgagctgagattgtgccactgcatgccagcctgggcaacagagcaagattctgtctcaaaaacaaaacaaaacaaaaaaaaacaaagaaaattccaggtcatacaattcacaaaaaaatccaagatctctcttattgacagaggacttagtaaactcaaaaaaaaaagagcaattaagctaatttatataactgattatgtgagtaaaaacacaagcctaatgaaggaattttcttatagcaattgcctgttttaaaacatgggtccaatttagatgagacagaacatgcagggcagtcacttgttaagcagtctccccgcctgctgcttattcctctacacctgtctgatggaagaactgaaatttgggatgctatgggtacctcctgctcatatccaggtggcaaaaaccacccaatgcttcttatgcagaaaaggaaaaaacacaggttcatgaaatcccagacaatggaattccaatttgttcctgatcctaaggtttcataatttgaagatcattatttgtttcataatagtctctccacaatatcctttcttgcaacaacttttcttcttcttcttttttcctattcaggaagttttaaatgacacaatttcctaccctgatggcacattcatggattgggagtttaagatctctgtcttgtatgacattgctaaggtaagagaaacacacacacagaaaatatgaaaattaaatataagaaaacagatctaacaagttattcaaccttctgtgcattggtttcttcatctgtaaaatgataataatagctatgtcatagggttgtaggattttaggttatgaggattttgtgaaataatgcacgtgcttataacaagaccaggtacaagtacatgttcaatatatatctatcagttattattattttattatattctttgtagtctgggtgtgaggcatgcagtttcacagattttccagaaatcaaaatcatataaaactacaagaaagacaactgggctgggcgcagtggctcaagcctgtaatcccagcactttcggaggctgaggcaggagaattgcttgaacccacgagatggaggttgctgtgagccgagattgagccattgcactccagcctgggtgacagagtgagactccattaaaaaaaaaaaaaaaaaaaaagacaactgaatcctcaactttacaagagaaaatcttaagtacaggaaaccatcttgcaggaatcaataataaatgtggacatgcatattttgagacgtgataggaaaacagagtggacaccagtaaccagggcctcattcaagaatgaagacaagttggttgtgagagggagctgtttgatacagtcttaactcacctgaaagttatatgggttcagaatcagtttgaaaaatgtgttatgaaaatcgatttgccacacacgtcactcctgtgatccaggctgaaaatcagcttcagctgagacaccctctaaccacaagagagaagcacatcagccaaaaacaggcttcctctttttttatttttttattttttgagacggagtctcactgtgtcacccaggctggagtacagtggcgcgatctcagctcactgcaacctcggccttccaaattcaagcgattatcctgcctcagcttcctgagtagctcggcctcccaaagtgctgggattacaggcatgagccatcacgggggccaggcttccccttttgaaacagaatgaatgaaacattgcttcaaaataggatgaaaccacttccactttaggaaataatctagcctggcaccctgcccctttggaaaagcaaggcactattattcatatttttattttaaattcatgtaaaacaggaccagagacctacccagggtcacagaccaaataagtggtaagcagaaacacttaaaaaaaatcaaccctttgcctcatattatacacaactacttaagcagatattttagacaattcccttttactctgtcatttaaacagactttgaaactagatataaagtgtaggcaaatattagggcttcagtaatattgttaaggtaaaaatagtgggactaaaattaaaatctgatggtgtgaccatctgctgaaatggtttccaaatgtcacttttttctttaaaataatcaagcagctgaagtgtgtcacatttctgtttttctatcatctaaaaaattacagggaatgtcatatctgcactccagtaagacagaagtccatggtcgtctgaaatctaccaactgcgtagtggacagtagaatggtggtgaagatcactgattttggctgcaattccattttacctccaaaaaagggtctgtaatgaatgaaatgttcactagtttcctaactgatttttttttcaaacccatgtagcgtggtcaggaaattgtaatactgatcagaagataagcacttaaagccacaagagacaacagctggctcattctccagaacttcacacttgtcagtcaacgagtatttcctgagttaaacaaatgtcctctgtggatttccttcatccatgcgtcccttgctacactgagaaatcatgaataacttaatggcttgtgggagcagaactagctgaaaaaaatatagaaggttagagcaggaagagaccttagacatcgtctaatttaagctttttcctttatagaggacagcactgagactcagatttgtccaagaaggtagagtacaaaccagaagacccatttcccattcaagacatcattcatttatgtgtggtaataagaaatgttaaggaaaaaactctaaccagtaaaatatattcttacctctttcaggattgtggtgagagtcaaaaaagataacataaagaaaacggatttgtaaagtataaagggcttttcgtgttgaacatttaccctttcttgactatgactcacagttaaacagactcagatatctagaactcatgttgccttaaaatactacctagatccaaacaccaaattatatttctaattcaactttgcaatcctttcgtttttccttaataaaaggaaaattgcgattctgtccctacatccacagccatttcaagcataatatgatattgaactcaatctaataatttcttattgaagacctgtgccaagcctggttcatgacatagtagtacaaatcgtcatcagataacctagcatgacacaaatcagataaattacaggtcaaatcctatcatcttaaacagcactcgcttatacctacctacctatggcatcagttacctaaaattttagcataagtagatttacttaccttttctacaacccctaacctttatgatcaactatgcatgaatcacaattcacaaaaattcacaagacacaaattcaaaaaggtgatgtacatttggacagagaaccaaataaggaaagtgtgcatcatcataaacatattattgcacctaacaacatgaaactatacatgtttcattgaaactggtgaaggtaagtcttaaaaagtttataaggagctaggtgatcctgaaaaacttacgaagcatgttgaagaaaaattaattgcatgcccgttattactaaataaggtgtgtaataaggattcaaaactcgagtatctataggagctaaatacagcattgcactcatgtgaagtgagtgaactagatgtaagcactagggagtggcagggacaggagtaaactgtgagtaaattacatgcgatacttttttaagaatactgtgggaaccagcaaaaacaccactgtggaccctagctgagttgcaggctgccagtatgttatgccttgaaaatatcagccatagtctctttgtcttaatgtactgtctttatcttcttttggtaaatttatatttaaatatgcatatacacattaactaataaattataataatttaaataaaataaatttagtacacataaaatttgtatttttttttttgagatggagtctcgctctgtcacccaggctggagtgcagtggtgtgatctcgtctcactgcaacctccacctcccaggttcaagcaattctcctgcctcagcctcctgagaagctgggactacaggcacccaccaccacgcctggctaatttttgtatttttagtagagacagggtttcaccatattggccaggctggtctcaatctcctgaccttgtgatccacctgccttggcctcccaaagtactgggattaccagcgtaagccactacgcctggccaaaatttgtattttgaaggctttcataggttcattccatatgtcccataaactactaaattcctcagcctctcatattctactgtattcattcaacatatatttactgagcatttaccacaatcagaccccattccaggtaaactttgagagttttcaagactatgatcctagcagttttaaataacatattgccatatgacctcacccaaatcctaacatttcatagttagtctaaaaggtgtgtgttctacctttgatcaccaggattagcaaaaatttttcaaaaatttggaatcatatcaattcaaggccacttataagctatcacccatatttagagtggatggtgtagggaattagagagcaaaagcaggttggaggcctatgaaccactcacccccctcaactttgtaatctcaatgtctacatttacagacctgtggacagctccagagcacctccgccaagccaacatctctcagaaaggagatgtgtacagctatgggatcatcgcacaggagatcatcctgcggaaagaaaccttctacactttgagctgtcgggaccggaatggtacatctaaacccattcatgtgtcccctctgggagtgagccaacctgctttctaggcttactgagaccctaatctgtctgtaaccacatcacaattccttcaaatgcaaaattaatgatttcccatctgcattatgcattttataagaatataaggaagattcaatattagggtgcactgaaaagcataagacaacatacactgccaggtgttattattgtcagtatcattgttaacaatcttcgtttacaattgtcctctttccttttgattccaataagagaatgtacctgcttaacatctaaactagatcactctaacaggatgacatacatattttagttcttactaagggtagatgtatagtttttggccacacgtcctctcaagggaaaatgcttcattccattcattcaatcctcacttactgagcatttattacgtgctaaccgttaactgtttggtggggagtagggtgactaagggacgtggagagggtgggtcaaagtatggacagaagaagcctactgaaggcagtggtgcctgagctgagttttacagcgacagtagcattttttctttttttcttttcttttctttctttttttttttttttttgagacagtgtcttgctctgtcacccccaggctggagtaagtacagtggtgtgatcttggctcattgcaacctctgcctcccgggctgaagcaatcctcatggctcagccttccaagtagctgggacgacaggtgcacaccaccacacctggctaatttttgtactttatgtagagacggggtttcaccatgttgcccagactgagctcctgagctcgagtgatcccccaacctcagcctcccgaagtgctgggattacagctttgaggcactgtgccccacctggtagcctatccttaaggtaaccttctggttataagtgggatgagaccctttcactgggtgcctcattgaatcaacacctgtctactgagtgctggtctaggctctgcagcactctcactgagctaagagccatccaggggagtgaatcaactggatttctgttgaaattccttccatttcttcatgctgtattcttctttgtaatttatatttttctcacccaaccagagaagattttcagagtggaaaattccaatggaatgaaacccttccgcccagatttattcttggaaacagcagaggaaaaagagctagaagtgagtatatcttcccgtattcatttccttggcctgctataaaattaccataaatgtaatggattaaaacaacaaaaatttattcacttacggttctggagactagaagtctgaaatcaagtgttcagcaaggccacacttcctccagaagagctaaggggctaatccattccttacttcttccagaagcttctgatggctgttgacatttcttatcttatggccacacaattcaatctctgcctcttgatcacagtttctcttctgtctattctccctctgtcacctttctattaggacatatgtgattgcatttgggtccacccagaaaatacagaataatcacctcatctcaagaattgtaacttaattatatctgcaaaggctctttttccaaataaggtagcattcataggttccaggtattaggacgcagcatgtctttgggagccagcctcagcctaccgcattctccgtgcctttccaccactccccaactcaggaatgagctggcttctaaagcacacatctcattctctattttttttttttttttttttttgagacggagtcttgctctgtcactctgtcactagagtgcagtggcaggatcttggctcactgcaactccggcctcccgtcttcaagcaattctcctgcctcggcctcctgagtagctgggactacaggcgcctgccaccacacccagctaatttttgtatttttagtagagatggggtttcaccatgttggccaggctggtctcgatctcctgacctcaagcgatcccacctgccttggcctcccaaagcgctgggattacataataggtgtaagccaccgcgcctggcctcattctctatttttaaattgatatttgtacatatttgtggggtatatgtgatattttgtcatatgcgcagaatgtgtaatgatcaagtcatgtatttaggggatccatcaccttaagtagttatcatttctatgtgttgggaacatttcaagtcctctcttctagctgctttgaaatgtacaatacattgttgttaactgtagtcaccctactctgctatcaaacattataacttattccttctaactgtatgtttgtacccattaacctacctctcttcattcatcccctgccctacctacacccttcccagtctctggctatcattattctctccacctccatgagatcaactttttcagcccctgcatgagtgagaacatgtgatatttgtctttctgtgcctttcactttacatagtgacctccagttccatatgtgttgctgcaaatgacatgatttcattatttttatggctaaatggtattctattgtgtacacatcctgcattttatttttccattcatccactgatggacatttaagttgattctgtatctttgctattgtgaatagtgttgcaataaatgtaagtgtgcaggcatcctttgatacactgatttctcttcctttggataaatactcagcagggggattggtggatcatatggtagttctatttttagtgtcttgagaaatctctatcctattttccatagtggctatactaatttacattcccatcaacagtgtgtaagggttcccttttctctgcatccttgccagcatctgttattatttggctttttagtaatagccattctaactggggtaagatgatagctcattgtggttttgacttgcatttccctgatgattagttatgttgagcattttttcatattcctgttagccatttataaatcttcttttgagaaatgtttattcatgagttttgcccactttttaatggaatttttttaattgctgagttgtttgagctccttgtatattctggaatatcatccttgtcagattaatagtttgcaaatactttctcccattcaacaggttgtctcttcactctgttgtttcccttgctgtgcagaagccttttagtctaatatagtcccatttgtctatttttggtttggttgcctgtgcttttgaggtcttagccataaaatctttgcctaaaccaatgtcctaaagtcttttctctatgttttcttctaatagtttcatagtttcaggtcctctgtttaagtcttaaatctatcttgagttgatttttgtatatgggaagagatggggtgtcctttccccattgtatgttcttggagccgttgttgaaaatcagttgtctgtaagtgtgtggatttatttctgggttctctattctgttccatttgtttatgtgtctgttcctgtgccagtaacaggttgttttggttactgcaactttatagaacattttgaaatcaggtaatgttatgcctccagctttgttctttttgcttgggattgctttggctatttgggctcttttttggtttcgtatggattttaggattgttttttccatttctgtgggaaaatgacagtggtattttgataggattacattgaatctatagattgctttgggcagtataatcattttagtgatattaactcttccaatccatgagcatgggatatcattccatttgtttttgtcctcttcattttcatcagtgtttgtagttttccttatagaggtcttttaccttctttgttaaatatattcctaggtggtttttttttttttttggtagctattgtaaatgggattgtcttcttgatttctttcctgctgagtttattattggtggtatataaaaacactaccgatttttgtatgttaatttttttttgagacagagtctcactgtgttgcccaggctggagtgcagtggagtgatctcggctcactgcaacctccgcctcccaggttcaagcaattctcctgcctcagcctcccaagtagcagggattacaggcagctgccaccaagcccagctaattttttttttatattttagtagagacggggtttcaccatgttgcccaggcttgtctcgaactcctgagctcaggcaatccaccgtccttggcctcccaaagtgctaggattacaggtgtgagtcaccgcacccagcctgtatgttaattttatatccttcaactgtactgaatttatcatatctaagagctttttggtgaagctttaggttttctagacgtaagatcatatcatctgcaaagagggacaatttgactccctgttttccaatttggatgccttttatttttcttgcctaattgctctggctagtactttcagtactatgttgaataggagaggtgaaattgggcatccttgtctagttccagttcttagagggaaagctttcagcttttcctcattctgtgtgatattggcaggtttgtagtatatggcttttattattttgtgggtgtgtgatatatggctggcctttattatgttgagatatattccttctatggctagttttttgagagtttttatcaagaagagatgttgaatattatcaaatgctttttctgcatcgattgagatgatcatatggcttttgttcttcattctgttgacgtaatgtatcatgtttattgatttgcatatgttaaatcatccttgcttcctggggataaatcccacttgatcatggcgtattatctttttgatgtactgttagattcagtttgctagtattttttttcttggaggatttttgcatctatgttcctcagggatattgacccatagttttccttttttgttgtatccttgtctggttttggtatgagggtactgctggccttgtagaatgaaggagaattccctattcaatttttttgaatagtttgaagagaattagtgttagttcttctttggaagtttggcataattcagcagtaaagtcatccagttctggacttttctttgttgggagactagtgattcagtctcattactcattgttggtctgttcatgtattctatggtattctatttttttctgattcaatctatgtagattgcatttatccaggaatttctccacttcctctatatttttcagtttgctggtatatagttgttcataatagtctctgataatctttcacatttttgtgcaattggtttttatgtctttttctaatttctgattttgtttatttggatcttctctcatttttttcttggttagtctagctaatggtttattgactttgtttaccttttcataaaaacaactttttatttcaatgatcctttgtattattttttcaacctctattttgtctagttctactctgacctttattatttctttccctctacgaactttgggtttggtttattcttgcttttctaattccttgaggtgccttgttagatttgaattttttctgattttttgatgcaggcatttattcctataaactactctcttagcagtactttcgctgtatcccataagttgtggtatgctgtgtttaaattttcatttgttttaattttttataatttctcctaatttctttatcgactcaatggttattcagaagcatgttgtttagtttttatgtatttgtgtagtttccaaagttcctcctggtattgagttctacttttattccattgtggcctgagaagatatttgatataattctggttctttataaatatgttgagactggttttgtgtcgtaacatatggtctatcctggagaatgttccatgtgctgatcacaggaatgtttattctttagctattgaatgaaatgttctgtaaatgttaggttcacttgttctaacgtgcagtttaaatccaatgtttcttggttaattttctgtctttatgatctgtttaatgctgagagtggagtgttgaagtccccaactattattagattggaatctacttcttcctttagatctaatagtatttgctttaaatgtctgtatgcttcaatgttgggtgtgtatatgtttagaattgttatatcctcttgctgaattgagtcctttatcattatataatgacctatgacctttgtctctttttacagttttttacttaaagtctgttttacctaatataagtatagctactcttgcttgcttttggttttcatttgcatggaatatctttccatccctttactttcagtctacatatttctttacagataagatgagtttcttgtaggcagcctacagttgggtcatttttaaaaatccattgaaccagtctatatcttttaagtgaaaaattttgatccatttacattcaaagttattattatgtaagggcttattcctttcatttgattaattgatttctggttgtttatacatcctttgttcctttctttcccttgtttttcattatggtttgtggttttctgcagtggtaacctttgagacccttctcttccctctttgtgtgattgctttactagtgggtttcatactttcatgtgttttcatggtggtagatgacatcctttcacttccaggcgtaggacgccctgaagcatttcttgtaggggaggtctaggggtgatgaatttccctagcattcacttgcctgggacagcctttatttcttcttcatttatgaaagataagtttgctggatatagtatccttaactggaatttggtttttctttcagcactttgactacctcatcccttttctcctggcctgtaatgtttctgctgagaaattcactgttaatctgatgggggtttccttataagtaaccagatgcttttttcttgctatttttagaattttctctttaacttttgacaatttgactataatgtgccacggagaagatcttttttaattatatgtatttggggatctctgagtttcctgtatctgaatgtctaaatctcttgctattattttgttaaatgggttttgtattccttttgttttctcttcgccttttgggacaccaaaaattttaagtatttagccactttatggtgtctatatcatgtaggctttgctcattcatttttgttcttttttctttatttttgtcttattggattatttcaaaagacctgtcttcaagttctgaaattcttctgcttgatctagcatattgttgaagctttccaatatatcttgtgttttattgaatgacttcttcagttccagagtttgttttattcttttttatggtatctatttctttggtaaatttctcattcatatcctgaattttttttatttctttgtattatttttctgtattctcccatatctcactgagctcctttaatattatttttaattatttttccagaattttattaatttccttttcattggaaattgttgctgcagaactactgtgtttctttggaggtatcatatttccttgctttttcatgcttcttgtgtctttatgttgatatctgtgcatctggtgtaacaattacttcttccaaattttaacatttgctttcataggggaggacttttttcctgaagatgtatctatagtattggttgggtgaggcactttggctttgattctgggtgcatgcagtagtgtagtctctacataatttactcatctgtgagtgggtctgttatttccctaatgggttaggatgtcattgttagtggaggcagtagtgacgttttgttgaagactggaatgccaggtgggctggtcctcagggccccttggaggcactggtgccagcataagctgtccttgggccccaggacagcttatctggtaccagcgttagtgggtctaggcagatcaattctttggcctccaagtaacttcctcaggtgccagcagtagcagcagtggcctaggctggtgggtggattcccgggttcctgggcagcaggcatggcatgagtagtggaagtagccatgataggacaagcttctggttcccaagcagtctgcactggtgttggtagtggctgtgacaggctgggcaggccagtctgcaggtccacaagtggtatatgctggtgggtaccagctgtggtggtagcagcaggttatgtggcccccagaagatgtactcaggtgccaacagtggtggactgggctaggagatctctagggcccctacacggtaggctgaagcactgggagggtgcaagtgagccaggtggacctgtcctgagacctgtcttcagtccccaccctgtggtgtgtacaggcactggcttcagtaggcaggggtcattctcaatttttataagctcaatgaacaaggtgtccatgcggtatacttactagacttataaataccatctaatgatttaaaaggaaatatgccaacatctaaaaagaatagagaaatgtacttccactcattttatccttcctctgaaggaaatggagcaaaagctctttacatttgcttttgtaattgtccctcaaaaaggccttgaagccctgtgaaaaatttctaattatttttccttttagcattttacctgagccttaataatccaagaagatagtgagtaaagtattttaagatatttatgatctttacctaaaaccataaaaaccctagaagaaaacctaggcattaccattcaggacataggcatgggcaaggacttcatgtctaaaacaccaaaagcaacggcaacaaaagccaaaattgacaaatgggatctaattaaactaaagagcttctgcacagcaaaagaaactaccatcagagtgaacaggcaacctacaaaatgggagaaaattttcgcaacctactcatctgagaaagggctaatatccagaatctacaatgacctcaaacaaatttacaagaaaaaaacaaccctgtcaaaaagtgggtgaaggacataaacagacacttctcaaaagaagacatttatgcagccaaaaaacacatgaaaaaatgctcaccatcactggccatcagagaaatgcaaatcaaaaccacaatgagataccatctcacaccagttagaatggcaatcattaaaaagtcaggaaacaacaggtgctggagaggatgtgaagaaataggaacacttttacactgttggtgggactgtaaactagttcaaccattgtggaagtcagtgtggcaattcctcagggatctagaactagaaataccatttgacccagccatcccattactgggtatatacccaaaggactataaatcatgctgctataaagacacatgcacacgtatgtttattgcggcactattcacaatagcaaagacttggaaccaacccaaatgtccaacaatgatagactggattaagaaaatgtggcacatatacaccatggaatactatgcagccataaaaaatgatgagctcgtgtcctttgtagggacatggatgaaattggaaatcatcattctcagtaaactattgcaaggacaaaaaaccaaacaccgcatgttctcattcataggtggaattgaacaatgagaacacatggacacaggaaggggaacatcacactctggggactgttatggggtagggggaggggggagggatagcattaggagatatacctaatgctaaatgacgagttaattggtgcagcacaccagcatggcacatgtatacatatgtaactaacctgcacattgtgcacatgtaccctaaaacttaaagtataataaaaataaaaaaaattttaaaaaagacatttataatctttaaacaaaaacatcttttgttccttgtgggataaaaatagaaacattttccttccatttacaaagacactgccagatgagttttatggccagactctgcagggcatgagtgggtcatttttacctctccccttccctttctttttcaatagtaatagtatgttgaaatacagctttccgaagtacagctgctcctagccctgccttctcctcattcctttctttcgtcctgcttttccgaattccaggattcctccacacaatcagcatatcctttctcaagccctttttttctaatctgagtatatccaaatattaaaaccttattcactaaaacagcatcatctttaattcatttgtgtagttggacagttctggaattagaaatgaggaataaaatttcatgtcaagtaactgattccaacagaatacagagtcgaaactagatcactcagcaatgccccagaaacacccagtagagtcgtctctccatccatagggaattggtcccaggaacccctgtggataccaaaatccacagcggctcaaggatctgatataaaatggcatatcatgtgcatataacctgcatacattatcctatgtactttaaattatctctagattgcttataatccctaacatgatgtaaatactatgtaaatatttgtggtactgtattgtttagggaataatgacaagaaaaaaaaggtcggtacatgttcaacacagacaaaaccatcctgttttttccaaacattttccattcccatttggttgaatccacgaatgcagaacccatggagacagagggctgacagtatttcactctgtggcacaggatcggcccagtttgctgtttctgcctattctgctctaaggtagtcagcagatgacttaccaaggcaggagcatcatctagtggtgaatattggcaccacaggctataccgcggctctagttccttcccagggaattgttcagacaaagtacagggacagggattgcatctagtatcacttatgatcttgtttttagccggagtgaaaaacaaagtttatttaaaacaaatggttttcaccacacattttgatttaaaaaaaaaaaagctgcaaacaggtggtagcagatgagcagttgggcttcctcctgtctccctacctcttcctccatacctcccttttttccatgtcacttctctactgcagctgtgcattataatcaccaaagagcttaaaaatctaccactgccctttgcccatacaatatttgcgacatacttatactaaggaattacttattgtttatctgaaatccaagtttaacttgatgtcctttatttttcttgctaaatctgggaaccctactaagaccacttcaaaatatattaaatcagaatgacttagggtggtgcctgggcataagaaattgtgcagatgctccccaggtgatactattgtttgctataagttagaaccatggacagtacggcttttattccatttggagccatttgcctcatattcactgagcctttgttcccccaccaaactgagggttgggctgatatttctcgtggcccaataacaagatgcagatgaactgaggaggaagagagtttttatttctgtaaccagttacagggagaaggcctgaaaattacattttttttcagagcttatataccttcgaagctatatgtctacatgtaagtatgcattcatttaaagacatacgtgattaacttcttttaatctacaactaaggtctgagtcctgaagaccttctcctggagcctcagtaagtttacttaatcgaagtgagtccaggtgctggagtgattacccttatcttgtctcctgctaaattacagaggtttagggagttccttcagacccccaataaacttctttgtggaggcctggggagtttcttcagacccccaataaaagttgtttaatcctaaatgggtccggttaagaagaattccttcgttattttgtcatgttttaaggcccaggaaaggcctaggcaaaactcttggtgggcttttgttacattccagcctttgtataagggcactggcttttaatatttaacttaaccactcagtcagtactaaaacggttgttatggaggcctgccacaccttcactatttttttctctctccaacgtaaaacttgcaagctcttgtaaattcacttagtctcccgtatcaacccggcctcatctaaattggtatcacatatttcattaatttcacccaagggaataactggataagataatgcaggtggtcatgcctgagacagaaaccagagagctggggatctcttgtccgcactgagttgaagatatttttaaactattccttgccttaatcactcccatcaatgagaataagaattctctcttgatttagtttactatccccttagctaatttgcccgtttttttttcttccaggtgtacctacttgtaaaaaactgttgggaggaagatccagaaaagagaccagatttcaaaaaaattgagactacacttgccaagatatttgggtattgctgaaatgtttacttttattcactaattgcagggttttaaaaaaattatagttgacattcagtggcaccttagaatgagaatgtctattccagtgaaaaatcccaggtggcaaccaacaactgcctcataacattaaaatgatatggagactattagaccgttttcccagggaaataatcacttgaaaagttacatactcaaggtcaaaacttttctgattaaaaaacaaactttagctgattataaatttgtctgttaaaaatagagcttctgggtccttctgtgggtaattaggatttagaagtgtagcgtgagtcctgagaatctgtaaagctcctagacaattattaacatcagcatgttcttaggatcttaaagtcttaaaatctccagctttggccctaggtacttaagacatgtcatgaatcagagcataattcaagttgggggagaaaagtacacaattatctggttgagattaatttctagataccccatgttttcagttaatacactgcagaatgagaaaaataacactgaattaagagttaggaaatccaatttctagactaagatctgataagagtttgctgtggggcattgggcaaaacacttaccctcactgggtatcaattttcttgttagaaaaattggattgaacaagatgattcttatgattttttccaggtctttctgtagttctcattaggtcaaaagactcagatacttaatgagactaaaagtctagagctggaggagatgaggtggagtgaagttaatgaacgtgtggtcattaattagtagaactaagctgtcagttgtgggaatggagcaggaaataataattaattctagccctttttttttctcctcgctgtcctgtccggatgagactttatatgtgactgataaaatgtatgctcatgaagaaactgggtccttgatactcagcctttaatgtgtgtgatggttctcaaacttggctgcagcttggaatcacctgaggaactttaaaaatactgatactggggttttaccctagagaggctgatgtaattggtctggggtacatacaggtgtcaggatttttaatagctcccaggtgattaaaatatgcagtcaaaggtgagcaactgttttaattgaatcaattcatcctagagtaagattatccaacttcatctcttacacctgctcccacatccattctacccaactagactctgtactggcagtttcaagtaaaaattccctggggaacttgttaaacaattctgtttcttcattccaagcctagcaattttcagtcacataggtctcgggtagggcacaaaaatgtactggatttttaacaaacatctctccccatcccaggggatgatgatgcaggccatcttctcctgagaccagaagtgattgttattcttgtaatagtaaaatgactgtgatttattcagcaccttcaattgtgccttagatgttatgaacattatctctgatcctcacaatgctaggagaactcaatgtgtctcctccctgacctctgcaccaaggcttgtcatacctcccagtgtcacacaaagctgtcatctcactaagtctccttgatctgacaaaataatccagagttaggaccctggctctctgtaatgaggagataatttaaggctcagcttggcttttctcagtccttctcctttcatttatcactttcttgaccagcttttaaaagattttccttcattgcaaattgtttcttttgtattttagaaaatacaaataagaaagcaagaaagtaaaacgtcacctgtttcccaataggtgaccaccagtcttcaaaaaataaaattgagattataatttttgctattttataaactgactttttcgcttaataatacagagggagtgtctttctgagtattcaactatactaatttgtattttatgatacaaattagaatgttaatgttccattgtcccatcatattttaaccacacttttgttatacatttagattattttcaaatgtttgctgttgtaaagaatactgtgactttttctgttgttaactctaaacacattcatgattgtttccttaggataattctcagaagtagagttataagctgattggtatatgcattcttaaagcttgtgacatatttttaccaaattgctcttcaggaaggttttgtactatatgtatttcctccttctcctacgttgattaccatcattttaacatttgttttcccttttttaatcttattcttgtcctgaggttaagttgggctttttgtttgtttgtttgtttaagacagagtctcactctgtcacccaggctggagtgcagtggcatgatctcgactcactgcaacctccacctcccagtcaagcaattctcctgcctcggcctctggagtagtgccaccatgcccggctaatttctgtatttctagtagagaaagggtttcaccatgttggtcaggctggtctcaaactcctgacctcaagtgatcctcccgcctcggactcccaaagttctgggattacaggcatgagccactgtgcccggatgaggttgagtttttttgttatgtttgttggcttttatttttctttgtttaattatctgttcatcatatttgtccattgttttattggatgttcatgttttcttaataatatataagagctctttatctattactacctacagactttttcatgaccaaaaaaatgaaagctatatggataccttgatccgacgtctacagctatattctcgaaacctggaacatctggtagaggaaaggacacagctgtacaaggcagagagggacagggctgacagacttaactttatgttgcttccaaggtaaggcaagccttgctgatgtggaggctgaaatccctctagcattgcttttcattgtatctatataggatttgtttccttttatatattcttcagtagattattggttttaaaatgcacgtactgccaggcacggaggctcacgcctgtaatcctagcactttgagaggctgaggcaggtggatcatgaggtcaggagatcaagaccatcctggctaacatggtgaaaccccacctctactaaaaataataataaaaaaaattagccaggtgtggtggcgcgcacctttagtcccagctactcgggaggctgaggcaggagaatggagtgaacccaagatgcggaggttgcagtgagccaagatcgcgccactgcactccagcctgggtgacagagcaagactccgtctcaaaaaaaaaaaaaaaaaatgcatgtactttgctaagccttgttccagtttgtactctactaagtaatgttctgaaggtcacccagtgaatggcagagctgggattctacccaagaagcccgagctggagcccctgatctcctttagtaactctgacctcaaaatctcaaacctctgaaagtcaaatcacctgcaagaaaactaggaggcggatcacagcttgggggaaaggagttggaacacatttggcaagtggtgtcttgcaaccttgtgatagaagggcagaacccatgagccctcagagtgcctgggaacagtagggaacccttcatattcacttcaaggatgataatttctatcacagctccataaatattaggtacataatgcataactccttgcctgatctttaatgctgagttgtgacaaaaacaatatcctggttatctggctgccttcccagggtttcattggcggtggttttaaccattaatgtcactcaagtggtttgaatcagctggctcaccatttcagcttttttcctagccttagttcaatatgccacttggactactagttggtagatgtttttattggatttccaaaggttatatcacacaagtctcttgaagagctacaatacaccatggcttcagcacaactcactttggttatttatgtaaaaattttatgcgcaagataaaactaaaacatgcatgagcaataactagaagaatcaaaaagaaatatgtgtagcaaagggcaaataaacttaagattgcatgtaggaaccagatatcacttagacatttatttgaatagtaccccttggggtaaatacattaaaatagaagtttcttcttttttatttttattttatttaattaattaatttatttatttttgagatggagtttcactcttgttgcccaggctggagtgcaacgacatgagctcagctcactgcaacctctgcctcctgggttcaagcaattctcctgcctcagcctcccaagtagctgggattacaggcgcctgccaccacacccagctaatttttgcatttttagtagagagggggtttcaccatgttggccagactggtctcgaactcctgacctcaggtgattcacccacctcggcctcccaaagtgctgggattacaggtgtgagccactgtgcctggccagaagttttttcttctgggaagactttctaagagatctactctgtatactaattttatctatgtcagcaacaacctgttatcaaagctcatcatgttaactcccagcccttccttcgtttatttacaacatgagtttctctctctggataacacactattttccaagtgtaatagtccattctcaccctattataaagaactacccgagactaggtaatttatgaggaaaggaggtttaaataactcacagttccacagggtgttcaagaagcatggctggggaggcctcaggaaatgtacaaccatggtggaagagtgaaggggaagcaagcaccttcttcgcatggcaggaagagagagagagagcaaagggggaggtgccacacacgttcaaacaactagatctcatgagaactcactaacacaggaacagcaatggggaaatctgcacccatgatcccatcacctcccaccaggtccctcccttaacattggggattacaattcagcatgagatttgggtggggacacggagccaaaccatatcaccaaactcatgtgacttttcagatataagcagtacaatgaattgcaaatatggcagaatatccaattttgtcattgcatctatgcagcctccaaaatactatgcactttatacagggcatgtcaagaacaaccactccagtcgtgtacctaggaatccaagccacaccaaaggaatgtttttcaaaggttccaagttttgtcattgcaccaattaaaaaggtttctccggatactctggaggttctccaaatgagtgttagaaatctttgtggttgattggttgttttctttccgggagagcccacctcctttgttgcagtcagcatacctccaaatcttccccatcttcctgaatatccaaggcctgggttgtgcagggagtgtaatgcaaaaaaagactgatgggtgggactgaaggcttcctgaattctagccctggctctgtccctaatcggctgtgggaacttagggaagtcatacttttttagacctcaactttctcatctgtaaaaataaagatttcttttcaatgacttccgtggaacctcccagcttccagtttctgattctagtggttccatactgagggccactacaaagtgatgccaaggacagacagggaccatcccacttcatgtcagccctcacttccttttctcaatgaagaggtaacttggcacaccaagtatggagtcccttcttctggttctcttccttcaatcttgaatctgatatgctgctcctcattcagcaaagatattctaaaagttgctttaatttgacttctacagttttagcatgatttaatttatttacatgattgattctgctttacaaaggacccaaatctggttcaaaatatcaaatgaactctggttcagaatatatcaaaatttatatttaaatgcatcattatttcatagtaatattaagcaatgccatattacatatgccaggaaagtaaaactatcaactttgttgagaaattcagatctgatacctgtggtgatttaagtaataccacactctcctcagcttctgcatgtagagccacatctgtaagaggttgattatcaatagagaagcaaaaagtggacaagtatgtatatgtatgagagttttgaggatattaaagttatctatttatgtgtattaggattaataatcaaacactaagttaatgttgaacctgcttgtattcatctgtgttcacaacatgcattatatgtgtatttgtgtaatatgttcatgtatatgatatacacaacctctgtttccgattcactcaattcactggaagtctcaaattctagaattcttggtagacaatcactactacctgaaagatttatgtgaaacaagaagaaatttgctgaagttgaaggcattttttttcccttcgttcatctaggctagtggtaaagtctctgaaggagaaaggctttgtggagccggaactatatgaggaagttacaatctacttcagtgacattgtaggtttcactactatctgcaaatacagcacccccatggaagtggtggacatgcttaatgacatctataagagttttgaccacattgttgatcatcatgatgtctacaaggtaaccacatcacctaacaggctgaaaccattaattgtacaactcaaggtcatcagagcctgaattggttgtttctgttactactcttgaccgctctagtttcacatttagtgaattggtggttgaatctgagctaaaagtgaagagaagtagaaggattagaggagtgagaagtcaaaattaccattcaactttaagaagcagcaaaaaagatacaacaggaagttcagcaggaattaatttgaagtattaaatttagacaaaatggcatactcttaaatcacctccaaaaaatgggcagtgtttaggctgactgcaaatgaagcagagaagacactggggttataataaatagaaaatcatactacaagaatgtatacaattacatattacaaagtacaatattctgttaaatagtatgttgacatttgctaaaggattaattttcaggaaactaagggtgttcctcaaattacataaaaccattcagattatttatttgaacatttctagaactgtcaccacatctggacaatttatataattatgaagtacttttaaatggctaaattcctttatagctattttatcacccattaactggactataaaaaccctgaagaaatcagcatagaactgatccaactggccccagaaaaagtgtaaagggctatgctcatactgtgttcccaaatcactttttgtgtttgacatgtgattaactgcttctgtttactttctatacttttcaaaggggcagaggcactcatgagaaactgtttccacaggtggaaaccatcggtgatgcgtacatggtggctagtggtttgcctaagagaaatggcaatcggcatgcaatagacattgccaagatggccttggaaatcctcagcttcatggggacctttgagctggagcatcttcctggcctcccaatatggattcgcattggagttcactctggtatggagttgagcatcttagcaaattgggaaccatatgtactgctgtgcaccaactaaatcagaaaggataaaaggtcttcaagtgtgatcgacctcacataatttttactcttaattctttttgccaaatgtgaggtcccactatgcatcctgagatatttagacccagttcctagagaactctaagaacaagacctttgagggcaccactgactgctgacatgataaacaccaaacatgtacgaaaacaagaagctttggactcctatttaaatcaccatacctatgatttcatttatttcctccccattccctttctccccacccccaacttcaatatattttcccactaaaatattatagtatcttaagtggattagattatctacaaggggaaataaagaacagatggtgaaatttctataatatttataccccctcccttccctgccactgcagttatacagaaagtacatgagtcactttcaaagaccatgaaagttacatagccttgttaaaagaaaagcttatgcatattaaatttaacacagtttgattgagcaaagaataattttcaaatcagatggcccttaaaaccagaagaggttcagagagcttcaatgggcaaggtgggcgggcaatgtttatagacagaaaacagaagtgagggacagaaacaacttgattggtcaaacctctgtgttcccctgatttggtcaaagtcccatcagttgacagcctgtgactggctgaagctcagctactgcgattggctgagactcagctatctataacgtaagtataccctagttaggcttttagtttgtttatgtaccaagctaggttgcagtttgttttgtagggacccctaagaggcagcctcaggccaaacttagtttaattcaacagccttgaacatcaaggtttgagatgagttacaggtgttatagaaaaaacacctgtaagagaggaactcagaagtcatctagatgaatctttagccaggcattgcttaaaactcagctttgcagtttttgagttaatctttaacttctgaaactgttaacaccttgcactcagtcattctatgcaaatacatgactgaataacccttatttcctacctaatatgccacagcgcatagtctagcctgggcttttgttctgcttgttggaacctccttgtgccacaggcttccccatccagctgcattcgcctggtccatgaaatgcttacggaaagttatgcctttgtcttgtcttctgtcttccattgtcatggcaccaatcccagaaatgccaccttaaaataaaaataaaacaaacttgagccattgaagcttcaaatctacagtgccctccagcagtgtgaaattcagggttgtgtggtttggcacagtaagcaagcagtggggctcatcttcatccttcctgagagccttctatttaaaatcacctttgtgatctggatctctgaatgccttcctatttgctacaaatgtcgttttctttgcgagagcaaaatactttatgatcgcatgcattgaataatgatgcttcattggattcatccatttaaaccaaaagtcccagctcacatttcacatcctcagctacttctccatgacaggaagtattcaggattgtgaccatacagagaggcttacctgtcttcactctactctgcaatttctattgcctccacttcctgctttctgtccttcatttcaggtccctgtgctgctggagttgtgggaatcaagatgcctcgttattgtctatttggagatacggtcaacacagcctctaggatggaatccactggcctccgtaagaagggagactgtttttctcagaggacaaagatgctgttttccagcagagggcaactgtgagataaaatgcacaataaggagatacaaagtgccagtgagatgtagaataattcttcacattagctgaacacaaacccgtgtcaatccaccttttgctacatttgctttcattgttgtttactgataattattttattcttccacttttgctcagttttagactatttctatatttttggctcatatacaatgaatctggggatattctacttagaatagtcctggcatttaccatagattcatgaaagttaaaaaaaaatcagtaggcaaggtaagaactacacactctggttcacattcctgtttccctcttatttggttttgcttttttgttgttgttttttagagacaggctctcgttctgtcacccaggctggagtgcagtgacacgatcatagctccctgtaaacttgaactcctgggctcaagtgatcctcccacctcatcctcccaagtacctgggactacaggaacataccagcacatccagataatttttaaatttttaatagagactgggtctcactatgttgcccaggctggtctcaaactcctgacctcaaggagtccttccaccttggcctcccaaagcatattcgttttttctggaaattgatttttgtttatttgtttgagatggggtctcactctgtcgcctaggctttggcacagtggcacaatcacagctcactgcatccttgaactcctcagctctagtgatcctcccacctcagcctcctaagtagctgggactacaggcatgccaccatgcacagctaattttttaattttttctgtagaggtgtggtctctctatgttgtctaggctggtcacagattcctgggctcaagcaagtctcctgccttggtcccccaaagccccaaagtgttggaattacaggcaagagccatcatacccaaccaagaattgattttagtaaagaaaaatctaagcatttgttatatacgaaggaatatattgcatttgcttggcaaggtagaggcacaatgtgctgcatgaagtagatgctcaataaatattgatgacagtggtagcagtagaaatatatagaagagagaaaataagcactgggagacatggctggggcttacgaaaccacaggaggcaggatggtattttggtagtgtactgacaatgtgatactagtttgtcctggcaaatcatgctggcaaggaaaaggataaggttggggtcagacagacttgggttacaattgaaattatgttaatcattctcagtataagttgagtagaaagctacctgatccttctagccctcagaaagataaagatacaaattgaaaatggaataccaaccgtgccaagagggtttctgaaataatttgggatgatgtcatgttaagcgtttagcaatcatggtacatggtaggtatacaatttgggattgtcattattcttactgtgtaattgtttgtggtattgctattaggcccctatattgggaaaggtgatacacatcaatggacttgtgaatgggcgtgccctcaccacttcttttgtcaaaggataacaatgttccagaagaaggaaatttgagaaaatcaagacccctcaactctcccgaatcttcaccttgcccacaaggctttagctatttattggaacttttccacagggacccaaaaccaaactccaacacccaagcttggcactacaagccaaatctaaaactaggtcccgcaggctactactctgagctggaatgagaatctatggagaaaaacctagggatccccatcacatcacgcagggccctgaaaactgatgccaggccttctttcttcccacgtgagattatatttcttgtgtgagggcattcttgcattgctataaagaaaaacctgagactgggttatttataagaaaagaggtttaattggctcatggttctgcaggctgtaagggaagaatagcacctgcatctgcttctggggaggcctcaggaagctttcactcatggcagaagacaaagcaggagcaggcacttcatacagcaaaagcaggagtaagaaagagagtggcaggggcaggtgccacacctttttaaatgaccagatcttgtgacaactcagtatcgcaaagacagcaccaagccatgagggatccacccctgtgacccagacacctggtcgggggccaggactccagcactggggattaaaattcaacatgagatttgggtggggacaaatatccaaactataccatttcttatctctctgatgttatttttaagtgttctttcattaaaatagccacaattgtttcttcttgatttaggattcttgtctcaggtgttgttgatatcctgaatcaacgggaaacaaataggctgtgtactagctgggatttttatttgtcaatttgcatttccagctttgagaattcacgtgagtggctccaccatagccatcctgaagagaactgagtgccagttcctttatgaagtgagaggagaaacatacttaaaggtaaggagtccacagagacaatgcataggaaaagctctcagacacgcttgggccacctcctttgagacttggccaggaaagttgagcatgctaatcctcttctgtactcatcacgatgagcaccctccatcctctgcaagagaaatgaccaccaaaaaatgtgaactcaaaacttgcctttactccaaagagcccttttgagattttgaactctgccagcatttcctctgccatatccaggttttgtatccagttcctcctccaaacacaagagctacatacagtctggtccaggacttatttaatttgaatcaaaacccttgtccccccacttacttccctactcttactacacactgctgctatgatctgaggtcacctctcttgccagttgctttactattcggaagctctagaatcacaaggagtgaatgacaaggtgtggccccattctcctcctcttcctcatctggaagcttgttaaaatgcagatgtgtggacactctaccaggcctactatgcaagattctctgtgggcgtagatcagaaatctatatttttaacaagataatgtgtttgtgaccacactaatatttgagaatcgctattccagattcttcatgcagttcctcacatttaaaacagctgccctccatagccatcagttgtctccaaatgcttctcaggctgcttttccaaagttattggaatcttttcacaactggcaaagccagctattaactgtaagttacctgtctccggtagccataatgcttctggcctttacatttggattgcaccttggaaaagtctccttttacgtaaaagtgtcctaacatcacacttgctttttgagtcctccataagtacattttttacaaagaacacttaccccaaaatagaaccagtttatggattgctatggtccaaacacagccagtgaaccactacttttttaaatgagtttaacaatatatatcaattatatatatatatatatcaatcactcatttttaaattattgatatatattatagatatatattattaaactcattttttaaaaatagtggttcactggctgtgtttgggccatatgtattttgtatctctttttcaaataccagctttagcaaaaacagggtttccagtattccagtaaatttccatacattccgtagcctccagatgggccccagaaatgccacttaatgagttcttaattgtgatgtacatgtgtttgtaataagatagggaaactgtagcaaaagttttgtagcaaaactttattgcaaaaagggctagaaggaaatatggacaatgacaaccagttggatttgttgacgtagcagaattgtagatgaattttcttcctttttaagttagagttcttgtgatgttgctagagtgatattttaaaatgtcttttggggaaaaaaaagaaaactctactttgagaaaaggatgtctgctgaatgagaaacttatttttaaaaaggcacttggaaataaaaatctgtctagagataatgcaaatcataacaggaatgtgtgatgtgcttaaatattggcactgatgagaaatgcggaagtgaaacatgtcacagaaacagatcattatggaaacagtggtctacaactgaactgactccttggactccgtggtacgtaactcttttgtcttaccagggaagaggaaatgagactacctactggctgactgggatgaaggaccagaaattcaacctgccaacccctcctactgtgtaagcttctgggtgtggcagggacagggaggaaattagagatcttggctttgttagttacagccaatttaaattggcaaatgccttacaagtggcatatattgcataagaagtaagggactatacatgagaaggtttagaaacctcccttcctagactgcaagaaggggattatcctgaaaccctgcattttcctgagacctcaatgaaacagaaaagtatttagccttggcttccctgtctggaacacagacttgcttccctgaatcagatgtgggggctcagtataaaactacctttttttttttccactgtggatcctttatcccaagagggagcttccacctggaaaagaggaagaatgaacagactatttagaacttgaggagattttgttatttcatttatttcattttatttactggctctgtattcatgatatttttaactgtcaaaattatgttttaaatgccttatctgcattaaagtatacttaacttatagtttatgcagaaaatatactatatattagacaagaatgagttaaaagtttcctgagtctgggtatgagcttctacctattctgtccactttcttagactgtaccagtcatcatcttgttcttgctgaaaaactgactatattgccctgcaataaagcatggcaaagctagcgttgtgttccaggcttgctcgggagaacagaagacactttagagttcacttcatgcatgtcttgttctgacaagagtggagcatactgggggcaaagaggctctctgcattccactcctgtcttcatctttctgttgagttgcctgatgaaaacaggacctgccccaaccccaagactgcggttctgggtcttaacatgaagtctgtgttctccctgagatgaggaagacaaagtttcagggttaactgacaggtttcacttctcctaaaggtgactcaagctgtcacccagttgcctgtcaatacatgttactgcagccatatggccatttccttggcttttgctatggttgagaaactctgtcttgcagaggcctagatgtcagacccagagagatggcaaccttctagaaaagccaaaacaacccaaatcttccctggggcatgagaaacctggctccttacttggagtgttccaggtccattctaaactcgtggtcccctccaccattctaagccttccccaaacaagactcacactgttaagtatgtgtgggaccaatgagttttcagggttgtgtggcaggggcctagcatcctcccagcttcttttccccttcctgcagtggcatatgtaaacctagatcctcccaaccatgcctccaaattccagcagcatattgtttcactttgaaattgaagcctaatttcctagcagagataacagttttttaagctcatcaaaggcagggatcattttgtattctttggatttcctgtgtctagcacagaataggcattcaaagagtaactgactaactgaactgattattctggagctaaggaatattctgtatgaattgctgagaagttctattttctcttcccactctgtttccagggagaatcaacagcgtttgcaagcagaattttcagacatgattgccaactctttacagaaaagacaggcagcagggataagaagccaaaaacccagacgggtagccagctataaaaaaggcactctggaatacttgcagctgaataccacagacaaggagagcacctatttttaaacctaaatgaggtataaggactcacacaaattaaaatacagctgcactgaggcagcgacctcaagtgtcctgaaagcttacattttcctgagacctcaatgaagcagaaatgtacttaggcttggctgccctgtctggaacatggactttcttgcatgaatcagatgtgtgttctcagtgaaataactaccttccactctggaaccttattccagcagttgttccagggagcttctacctggaaaagaaaagaaatgaatagactatctagaacttgagaagattttattcttatttcatttattttttgtttgtttatttttatcgtttttgtttactggctttccttctgtattcataagattttttaaattgtcataattatattttaaatacccatcttcattaaagtatatttaactcataatttttgcagaaaatatgctatatattaggcaagaataaaagctaaagg

SEQ ID NO: 599 - DNA, 15566 bp, Homo sapiens
gcggcgtcgcgggcagctggcgccgcgcggtcctgctctgccggtcgcacggacgcaccggcgggccgccggccggagggacggggcgggagctgggcccgcggacagcgagccggagcgggagccgcgcgtagcgagccgggctccggcgctcgccaggtccgtgcttggggccgggcaggctcgcggaggggtccaacggtgctcgcggaggggtcggggcgcggctgtcgcggaaccacagaggtccctgcagcgggccgggccggggcgcgggcttcccgctccggaaagtttgccgccgccgccgccctgggagggctttgcagcagccagggagggaagggggaggagggagggaccgcggcggggaggaggcggccggcgccaggcggcccgggagccctgggcggcggcggcggcgggcggggcggctgggggtcggaggggtcgggacgcaggagccggccaccgccgctttcgtccctgtccgcccctctaacgagctgccttcctcctcctgtagtctcccgagcggcgcccgcctcccgccggtgcccgcgccgggccgtggggggcagcatgcccgcgcgcgctgcctgaggacgccgcggcccccgcccccgccatgggcgcccctgcctgcgccctcgcgctctgcgtggccgtggccatcgtggccggcgcctcctcggagtccttggggacggagcagcgcgtcgtggggcgagcggcaggtaagaagggacccactaggcacgggagaggccggcccgtgcgggcagaggcgttggggacgggaaccggccccgggtcggaggggccgccgggtgtgagtgacgccccggggttagagcccggattccgctgcctccttgccggagagcgcggccagagctagcgcggcgacttgtggtgcgcccggagccgcagctaccctccaagtgcgaggccaccacggggagccaggctgggggttggcgtccgcagccccgatcccctgcgactccctagccctggcctgtcgggagggcgcggggggccccatttccacgattcccgctgttgttattcgggttctgcgcagacggaaagttcccattgttggcgtccccctcccccgggccccagtttgtggccagcttcggccaaggcgagagaccggacttctaagggtgggtgtgcgcgtcagcgaagcccggcccctgcccgcccgaagaggcagcagcctccagcgtccccgctgccgaccctgcccctgcctgggggccgagggcgcttccccgtgggtgcgcgccgagctccaggcaagcgaggggcgcgtgtcccagcgtcgcgggccctagactgggctggcggtccaggtcccgcgggacgtcgagggtctgaagggaggtcccaaggggcgaggggaggggaaggggcgcccggccggacctgcacacgcgccgcggttcctcgtgggccgggccgagagctccggtgccgccgccgcgtacacccgcagccggctccggacgggcgaggggggcgcgcacagctcagcccggcggccgcgcggagggaggccttggcccggtgagctcgcgccccacccgggccgaggcccgaacagccgcttctttgtacctcgacgcggccacagaccgcgcattgatggcggctcggcggctcgcggggaggtgtgagcgaccgcgggcgcggcgggccggggagggcgcctggagggccgaggcagatggcgtccgccccgcccgcgcccccgcgcccctttctccgtcggcggctgcagcctcccggaacaatgtcattttttttatgaatgaaagtggcccggcgcttgaatgtgcgtgtcattcagcggcgtgacaggggccgtcgggaggtcagcgcgcgcttttagcgtctgctcgggcggccccgcttccaggggtgccggaggggcggccgcggggggagcttggctttcgcattctcattcagataaagatattactccctacggcccgggaatgtcagccagccccggggaagggcggcggccaggctgcggagcctctcctggaccccctgcgggcgcgcggggcctcccccagtcgctcctggaacgccccgcccacccctcccccggggcggcgcccccgcccgcactggagctggtgaaacaggtagtgagttgatcggtcaataaacttaatccggttccttaacaagatgggccgggcagtaaaaatacaaagacctcgtgaaatggactgaggtctaggctggcgcttgcccgggaacataaattatggagccttggctcgcaggggtcaagggcggtgggaaaggttttggccactggactgccctggccaccccaggccctgccaggacagcccccatctccccagggggccgtattcctggttgggacctggagtgaccccccagggtgcagggaggtacacaaggtcggctctcccacagtcccaccccacccagcaggggtctgggggtgcagggcctttcccgaaggtgctggctgcaacctcccccactcctcctctgcagggctggactttgagccgcgtgggcctctgggtggttcattaacctgggctgagcctggcctccaggtccttgtgtgagcctaggaaccccttgttacccaccccccagctccccagccctcaggtctcacttggggctagatctggggctgtggcaccccttgttacagctgagcttgagtgggagcccaggggcttggggtctcctggaggacggggatctaaagtcacctcatctagggaggcatgcagccctcacctgagtgattcaggagtgaatgagccaggagtggagccacctttggtggggtaggggtcagcctggacctctaggctgccagctcaggctcgggtgccctcttcgaacctcagtttccttacctgtccaagagaaccgataatggcaggctgtttgaaggattaggccagataaccctggcaagccctctttagcctgcccagcctccagatcccttttttccggactttattgtgaaactccaggtggggagacagggaggctggacttttgggggccccctcctcttaggctattttatagctcctacctggcaatacctcctgtaccccagagagctgcagagaacttcatgtgcatccgaaaccagaatgtgttgtttcctgaccccaggccctcatctcaccccaaaacccaaataaacccctggggcagccagctccggaagcgagtctggatttgatccttgttctctggggtcaacccgaggggcttatgatggagcaaggctcccccatcctctcagccatgctccctcacatgcactgggcctccactgcagagacccagagcctggagaaaggttccccaggccagagtttggccgtccccagcaccctgcctaatggacatcagtcttggggccagagacccagggcagggagcgcctctcacccctaccctcactcctgcagccatttcagggcctggtgccctccctgagctcctgggcctgtggggtgggatttttactttgtgccacagtgggggaaactgaggtacaggaccagtgagtggcagagttgtggagactctgggacacagcagagggctgtcgttggcatgtggagcccaagttgaggtcggcactgtgtggggttggggcgccggcaggagcacgtgttgtgggatccatagaagggtgggaggtgggacgcgttgcctcctaccccgccttgggtacagcaggagttttgtctccaacgtgtttgggcaccagtgtctgtgtggtgtcagtggggcctcccttttgtggatcaagaaagaaagaacccttcctagggctgctggggggctatagctctccccatgcctggcagctgggtggggtatgggggctccacccaactgctgacttcccagtgggagtcagaccctgaacttatagcacccactcatgccccgtgtcacactgtccttcacctggtgctcgccacccagcccctgctggggtaccctggcctctgctggcacctagcaggcaggcagtggggggggcagtcagggctgcaccctccccaccacacacgggcagatggccactggtgtggctggcctggggctgctgtgtcccccgtccccccgtgctggaccaggctgaagcaaatacttgtgtggatggcttgacctgttgtcgccactcagaccaaaccggaaccaaccggctgttgcccttgggccagggcctgcagctgaggctgccataaccagcctgttctcggccttctggggggcctcgagcagctcccagctctgggtggtccccacaagacactggccaggaccggagggctggaggtcaggccaggagcccccctgactgcggggtccctacaggggcagtccttgagctgtgggtcccggtggggcgagggctccttcggatgcttcaggggatgagtgtgggcccttctggctggcagggtcaccctgggcactaggcgtgtgtggctggatcaggtgggttgggcagaagagggcctggccgggcagccagggactggtgtggccagagtgggcagctgggcccccgaatctaggccacgcgtctgcagaatgacaagtgatggcgcaacccgcccagctgggtctgaagaaggaggctgcctgggggaccacccacccccgtcccggccccaagcccgggacgcctgcctgcatgcattgtctggccctggcagggaagcctaggggcgattgtccccccagccctgcccatggtgtgtccttgggtcacaggctttggtggctctggggagctgggcagctactggggagggacccaggggccacctgcacatctgcccctgtgggtgggcccccaccccagcttctcagcccccagggaggggccagggctgctgacctgccctggctctcacagcttcctgcccccagcctggtcgtcctctgtgagggggccccagtccccctgcaggcagcaggactccaccccccggcccccttgagggcccgcctgggcctccccactccccggcctgtgagacccacttggccggacccagcgccgtgtttgtactttgctcttctcggtatgttttccgtcatgaccgccgtgtggagcttccataggagctgcaggatacagaaccttgcccaccccaaggagcccccacccccgccccggccccctcgcgctgctccggcctgtgctctgaccggtgaacccgcgcatcgccccccagaccgtccacacggccacgtgaccctgcacctccttccttctcgcctgttctgttccctggctgtccatctgaactgcttttcaggctcatatggggtgcgggggctactgaggacggacccctcctggggtgaatctgcaccacgagggggctggctggccaaccctggcaccccctctgagctccatttcagtcagaggccagcaaagggcagcctgtcccctttgcccgcagcacctgcccgtcgtggtgccgcctgtgagacaagcatggattttatgtttccaagcaattgaacaaattaaaagaacgaagagtcacattttgtgacactttgagatttgaattctccgtgtccatgagtgaagcatcatggggccactgctgtggggttggctgcaggttgtgtggggaaggcggctgtcacaccgaggcagaccggagtccttgggacagactggttggcaaagctgaagatagagacctttggcccttttgggacacagtttccagcccctggtctggtgggaccctggatctgggtcagagccttcctcactcagggccgccgaggcttccactgctgtgtctgtaaacggtgccgggtttgggggtgcctgcctcatggttgcccatcttccccacagaagtcccgggcccagagcccggccagcaggagcagttggtcttcggcagcggggatgctgtggagctgagctgtcccccgcccgggggtggtcccatggggcccactgtctgggtcaaggatggcacagggctggtgccctcggagcgtgtcctggtggggccccagcggctgcaggtgctgaatgcctcccacgaggactccggggcctacagctgccggcagcggctcacgcagcgcgtactgtgccacttcagtgtgcgggtgacaggtgagctctggggccacgccagctacagaaaggagccgagtgccgggctccctgagtccctgcgtgggtcaggagcggctgggggtctctctggtcattggtggagaggagggcacccccaggaagtgctgcccaaatgggggaccctgccccatctgggaggggcacctgggggcctcctggggcaggttgggcattggttgcggccatctctgccttgcagacgctccatcctcgggagatgacgaagacggggaggacgaggctgaggacacaggtgtggacacaggtaggagcagggtccagggttcaggccagccggggtggggcccgctgccaccgccaagccctgcccttcacaggcagctgagggactaaggccccggaacaacctccctggggtcaccccgaaggtctggtcccctcaggatacaggaggggctgggtcactgacatggctctagatgccccaccctggtggcagggctggggtgcaaggggacaccgtgttgctgatggggagactgaggcacagggccctgggggttccaggagcaggaggaggccagggctggcctgtggggctctggtgttggctataggtgaggtggaccccgcagacattagcgcagcagggcagggcactcaggtggctgccgtggggtggatggacccggggtgagggcgccggggcacctgccacaaccagtggcgggcagggtggctggcaggagggtggctggtgggtgggctgcggctgtgagagagcagtcggggacgatgcctggcgtcccggcctggaacggtggcaggtggactttgccaagttgtagggtggggaggtggggcttctggttttggagggagctctgaggggagtgcgtgcaggtgagggtcatcgtggcacagacatggggggcagttacgacttgcggactgatggtgtgtgcgctgggtccctgggccagtggggtaagcaggtgaggaagggaggctgagtccatgagagaaacagctgggggaactcaccctgggggtctccaggaggcctgggagggagctcagcaccgtggggtgcctctttccagcctgtgtccacactgctgcttgctgggcctcagtgcccctgatgggcgtgtgcctggagggggctggcagtgagctcactgaggggagggctgcttccctcctggggaatgccagcccatccttgcctggagtcccggcaggaaggcagcaccagccctgaggaaggagaaaaaccagttgggctgtgagaggggtggtgggagccctggacatcgagatgggaggaggcagggcctccagggtgccaccgtctctgggtgcccgccagacttggagctctgcagagggtggtgtagggtcttgatttccgtgggcccatgctgcccagctgcctccaaggctcctggctctgcaggcgactgggctcctctcctggtaaactgctcccaggtcctggcttgtccactagatgggcctgccccctgggtcttcagtctccccgttggtgggcctggccctggcacgcctctctgggcaggtgggctcccctggacaatgccctgtgccctgtgacttcacaggtccgggcagagcaccctggaggggaggggaggggacacacggcccagctctgagaaagccccggggaggggacaagatgtggaggctcctgggaacctcatcccgccctcttcctacacaggacgggaaactgaggctggggatgggcaggggcagctctgggaagggggttgttcagaggggcctctgctcccactcgggtcatggccttcacacgcacctcggcccgcaggggccccttactggacacggcccgagcggatggacaagaagctgctggccgtgccggccgccaacaccgtccgcttccgctgcccagccgctggcaaccccactccctccatctcctggctgaagaacggcagggagttccgcggcgagcaccgcattggaggcatcaaggtgggcgcggcggggtggctctgggcctggcaggcgcggtggttgctgcctccgctcactcacccgcccgcgtcccggtgcagctgcggcatcagcagtggagcctggtcatggaaagcgtggtgccctcggaccgcggcaactacacctgcgtcgtggagaacaagtttggcagcatccggcagacgtacacgctggacgtgctgggtgagggccctggggcggcgcgggggtgggggcggcagtggcggtggtggtgagggagggggtggcccctgagcgtcatctgcccccacagagcgctccccgcaccggcccatcctgcaggcggggctgccggccaaccagacggcggtgctgggcagcgacgtggagttccactgcaaggtgtacagtgacgcacagccccacatccagtggctcaagcacgtggaggtgaatggcagcaaggtgggcccggacggcacaccctacgttaccgtgctcaaggtgggccaccgtgtgcacgtgggtgccgccgctggggctcctgggctggccccaagggtgccccttggctgcgggttgcgtgaggatttgggtctaggggttggagcttcgggggcagaagctgtgggggtgcttgtggggccaagtctcagccaccccacacctcagggccataggcagctgcgttgggacccgtttccgtgtctgcagagggccagcctcagccactgaagtccctgacatggagctgcccacgggcttcttgggggtgggtgcggcttgggcagcagtggtgccccaggacaggagggcagtgtggccaagccctccaggccccctctgggcctcagaggcggtggctgagccccgacctggccgattggctctcgtcagctgtgtgcagtggggcccgagctcactgtctgcccgcctcctgaagcccttagctttgttcccatggctgccgggtgggggccactgaattgggacggttgcgacactcaaagcccaaagagaaacatctgttcagagagaagacggtctcttgggggcggggagcaggcgcagggcgagggtggagtccagaccccgcccagagaggccgcctcgggccctgtccagggtgcaggttctgcaagagcccgggggagggcaggccagtgaccagaggttgtctgagggtctgggctgggttgttggggtggaggcagagacgtgcatcctgtgaaaccacagccaccgtgaagtgcctccacgcctcctccaggcagcctttggggctgacgcagcccagcctcgatctgtaccttgggggtctcccacatcctgcctcgtgcccggcggggctgcctcgggggcgtgcctgagccgggtctcttgtccccgcagtcctggatcagtgagagtgtggaggccgacgtgcgcctccgcctggccaatgtgtcggagcgggacgggggcgagtacctctgtcgagccaccaatttcataggcgtggccgagaaggccttttggctgagcgttcacgggccccgagcaggtaacgactctgtcccatgccggccggcacaagagctccagctccaaggccctggccgcgcgccctgcacgccccgcacgcccagccctgctcgctcccgccccggctcgcgctccactcggggccgcctcggcaaggctggcagctccagcctccacggtgaccgcccgcttcgagccctgtggcctgcgccgacccttcccgcacgcctgcgacccccacaggaggtgcccggtgcccaccgggccggctccgtgccgtctgtgagcacccctttgcgcctctctccacccctgcccgctgcctgctcgcttccgcagcctgtgtgtccctgtgtccatcctccacctgcacccgcccggctctgcgctaacccgcatgctgcctgcccgcctgccgctcacctgggacagaggactcgccggtggaggggcctggcttcgggctcagtaccggtgtaccaggcggagggccctcagccgcgtggcggtgaccaagttggcggtggctgaggagttggtggtggcggcgttttccttgcagcggctggatcctgccgtgtggactctgtgcggtgcccgcagggcggtgctggcgctcgcctatcgctctgctctctctttgtagacggcgggcgctaacaccaccgacaaggagctagaggttctctccttgcacaacgtcacctttgaggacgccggggagtacacctgcctggcgggcaattctattgggttttctcatcactctgcgtggctggtggtgctgccaggtaccggcttctgctgctgctgctgctccgcactgtctgggggacgctggctcgggacacgccaaagctgccaggacggacgggaatcctgtgacttacggccgtcccgcttcttgagccctcactcctggccctgtgcccagtgtggggacaaagttggcctggcccggtcctggtcccagaggggccccctcagccccctcgagcccacttcccatctgggtccccaaaggcctctcctgtggctctggtgtctcccgggcgcctggtggcggtgtgggactggctggctctgctgggctccttctctccagggtctggccctctagactcactggcgttactgactgcgagaccctccagacaaggcgcgtgctgaggttctgagcccccttccgctcccagtggtgcctgcggctctgggccaggggcatccatgggagccccgtgggggggggggccaggccaggcctcaacgcccatgtctttgcagccgaggaggagctggtggaggctgacgaggcgggcagtgtgtatgcaggcatcctcagctacggggtgggcttcttcctgttcatcctggtggtggcggctgtgacgctctgccgcctgcgcagcccccccaagaaaggcctgggctcccccaccgtgcacaagatctcccgcttcccgctcaagcgacaggtaacagaaagtagataccaggttctgagctgcctgcccgccaggcctcctggagccccacctcggcccacgctggtcctgggctgtgtgagccctctctgcagccaggcgggctcccctctcctcgtctctgctcaccatgtagagcctagggtactttggggcacgaaacattctaaaaatcttcattcaatgctggtggaagtcagaacgcccccccttctggcccagcactgacccccggctgtacctccacgccctgtcgcccacgcggcgccaacctgcccctgctgacccaagcaggtgtccctggagtccaacgcgtccatgagctccaacacaccactggtgcgcatcgcaaggctgtcctcaggggagggccccacgctggccaatgtctccgagctcgagctgcctgccgaccccaaatgggagctgtctcgggcccggtcagtggtgctgagggccagcgttggctgtagggggcttggtggtgggggtgaaacagccaccagtcagaggcccggctgggtttaggggccgtcagggatgtggcggatgttgggtgtggctggggttctgtggagatgctcctgggacgggtgtatggcagggactgcccctctcaaggtgccctgtctggaggggcagcaagggcgggaggctgtgggtgacactcttcgtccttacgagcaggctgtagggggagcatggagggcttcctggaggtggtggctctgggcctcaagggctgggccaggctggggtggggaccgtggtgggctgagagtgggcgagtttgcacactcatggtccctctgcctccactgccaggctgaccctgggcaagccccttggggagggctgcttcggccaggtggtcatggcggaggccatcggcattgacaaggaccgggccgccaagcctgtcaccgtagccgtgaagatgctgaaaggtgaggagggggcggccaggggtgcagagcagggctgggggcgccgccgccgcctgacacaggccccccgctccgtgcacagacgatgccactgacaaggacctgtcggacctggtgtctgagatggagatgatgaagatgatcgggaaacacaaaaacatcatcaacctgctgggcgcctgcacgcagggcggtaggtgcggtagcggcggtggtgccggctgggcggccctcctgggcctggcagcccgtctgaggagcccgtgtccccagggcccctgtacgtgctggtggagtacgcggccaagggtaacctgcgggagtttctgcgggcgcggcggcccccgggcctggactactccttcgacacctgcaagccgcccgaggagcagctcaccttcaaggacctggtgtcctgtgcctaccaggtggcccggggcatggagtacttggcctcccagaaggtgggcagggcggcaggtgtgggtggagtaggctgggccctgccctgagatgctgggagcagcggggagaggtggagaggcttcagccctgcctcccaccccttccccagtgcatccacagggacctggctgcccgcaatgtgctggtgaccgaggacaacgtgatgaagatcgcagacttcgggctggcccgggacgtgcacaacctcgactactacaagaagacgaccaacgtgagcccggccctggggtgcgggggtgggggtcatgccagtaggacgcctggcgccaacaccgccttcccacaccctcccagggccggctgcccgtgaagtggatggcgcctgaggccttgtttgaccgagtctacactcaccagagtgacgtgtacgtgtcctgcagagctcaggcttcaggggtggaggcgggaactgggcagagccaggaccccagctgcagtccccaggcctgtgccctggagctcctgggtgtggtttctacccctccctgggggcagcagcgcagccctggcctattcccctggtgcccgcccaggtgtctgtcctgggagtctcaggacagcctgacctcaccttcccctgcagctggtcctttggggtcctgctctgggagatcttcacgctggggggctccccgtaccccggcatccctgtggaggagctcttcaagctgctgaaggagggccaccgcatggacaagcccgccaactgcacacacgacctgtgagtggcatccctggccctccactgggtcctcaggggtgggggtccctccggggctgggcgggggagggactggcagcccttcaggctgttcccgaataaggcgggaagcggcggggctcactcctgagcgccctgcccgcaggtacatgatcatgcgggagtgctggcatgccgcgccctcccagaggcccaccttcaagcagctggtggaggacctggaccgtgtccttaccgtgacgtccaccgacgtgagtgctggctctggcctggtgccacccgcctatgcccctccccctgccgtccccggccatcctgccccccagagtgctgaggtgtggggcgggccttctggggcacagcctgggcacagaggtggctgtgcgaagaggggctcggtggcacagcgctcaccccgcctcccgccagcaggagtacctggacctgtcggcgcctttcgagcagtactccccgggtggccaggacacccccagctccagctcctcaggggacgactccgtgtttgcccacgacctgctgcccccggccccacccagcagtgggggctcgcggacgtgaagggccactggtccccaacaatgtgaggggtccctagcagcccaccctgctgctggtgcacagccactccccggcatgagactcagtgcagatggagagacagctacacagagctttggtctgtgtgtgtgtgtgtgcgtgtgtgtgtgtgtgtgtgcacatccgcgtgtgcctgtgtgcgtgcgcatcttgcctccaggtgcagaggtaccctgggtgtccccgctgctgtgcaacggtctcctgactggtgctgcagcaccgaggggcctttgttctggggggacccagtgcagaatgtaagtgggcccacccggtgggacccccgtggggcagggagctgggcccgacatggctccggcctctgcctttgcaccacgggacatcacagggtgggcctcggcccctcccacacccaaagctgagcctgcagggaagccccacatgtccagcaccttgtgcctggggtgttagtggcaccgcctccccacctccaggctttcccacttcccaccctgcccctcagagactgaaattacgggtacctgaagatgggagcctttaccttttatgcaaaaggtttattccggaaactagtgtacatttctataaatagatgctgtgtatatggtatatatacatatatatatataacatatatggaagaggaaaaggctggtacaacggaggcctgcgaccctgggggcacaggaggcaggcatggccctgggcggggcgtgggggggcgtggagggaggccccagggggtctcacccatgcaagcagaggaccagggccttttctggcaccgcagttttgttttaaaactggacctgtatatttgtaaagctatttatgggcccctggcactcttgttcccacaccccaacacttccagcatttagctggccacatggcggagagttttaatttttaacttattgacaaccgagaaggtttatcccgccgatagagggacggccaagaatgtacgtccagcctgccccggagctggaggatcccctccaagcctaaaaggttgttaatagttggaggtgattccagtgaagatattttatttcctttgtcctttttcaggagaattagatttctataggatttttctttaggagatttattttttggacttcaaagcaagctggtattttcatacaaattcttctaattgctgtgtgtcccaggcagggagacggtttccagggaggggccggccctgtgtgcaggttccgatgttattagatgttacaagtttatatatatctatatatataatttattgagtttttacaagatgtatttgttgtagacttaacacttcttacgcaatgcttctagagttttatagcctggactgctacctttcaaagcttggagggaagccgtgaattcagttggttcgttctgtactgttactgggccctgagtctgggcagctgtcccttgcttgcctgcagggccatggctcagggtggtctcttcttggggcccagtgcatggtggccagaggtgtcacccaaaccggcaggtgcgattttgttaacccagcgacgaactttccgaaaaataaagacacctggttgctaacctgg

SEQ ID NO: 600 - DNA, 43729 bp, Homo sapiens
ttttatgggaaagtaatggcacagctccagctcagcaccaaagtgaagagctctactgaggcacaatggaaagtcgaggtaaataaaaactgctctttccctccctgaatcaacacaacagcttttgggatcctagatccccttgttgacgaattcttaaaaatatgtttttttaaaatcacatgattaatcattttactgataaacaccctaaaaggtggtggtggcgctggctttgcaatatcggagtataactactgatattgttttactgaggttgagaaacaaaggggaggagggaagtaaacttgtaaactaaggtggcttgaatggttaaaaattcatttttaatagtattgctttaacatagacatgctaattttctcagacaatttagaacagaattgggacagtagtagcttcccttcttctccttactctcctagcctctctctttgaaagacctaagagccttgttcttcatagcaggtgctgatgcccaaagggccattataagaatcctatagcctccccccctccccgccacacacatgagataataaagtaaatacagagaaaatggatggaagggagggaaagcactcccagcctttgattcttggtagttatgttcaagtggggcacttctctttgaaaagtgaaaatgtttctcacggtacagaatttatgggcagacaaggagcagacttaactgatcccagcaaacagttccttccttttcctaatccctggctgcttattttagccgcttctccgccccgccgggaataccattcggatcttagtccaggtagatctgacgtcaagagatggctttcgtcgatttgacgtgtaaacactcatttccattctggctgggaagggctggggctccactcagcctggagaccgaagcgcttcactgagcgctcgccgccgcccagcctctcctctcgcgcctcctagctcttcgcagagcaaccaggagccaggagtggtctagagcccgagggtgggaagggggagtctgtctggcttttctcctatcttgcttctttttcctcttcccttcccactcttgttcaagcgagtgtgtgagctatggagcgaagagcctggagtctgcagtgcactgctttcgtcctcttttgcgcttggtgtgcactgaacagtgcaaaagcgaaaaggcaatttgtcaatgaatgggcagcggagatccccgggggcccggaagcagcctcggccatcgccgaggagctgggctatgaccttttgggtcaggtaagagtttccactttcaagaaactttctggggccccaggggactggcgggactggagcgcggtcttccaagtgggagccccaggttgcactctccagagcccagagtagcaaagagcaaggagctgctccagccctcgcccctgtcgcgcttggagagagagaaagcttgcattatttactgtttaggctgggcgcagccaagcagaaggaagccgctgcagctgggtagggcttatgcttactgttggccgctctagaattgaaatccgttcccgcgcggtttggaagaaaaatccctccacgcttgttcagggaacttgagatacactcaagctcttaccaaccaagcgcccccgggagaagcagtgcgctccatcccccgggactgaggcggtctgcgtcaggagccggctgttgccttcttttcaatatggcagcatcagatccaagtcctgatgcaaggggctaagcaggcttggggctgtccgccctggcagcctgtaagggcacgcccagggcattggaagagtgccagctgctgggactcgcgaccaggaggttgggaggccgcggagtagcctgggaagctggggggagaaatggtgggtgaaagacacgggaccatctatccccgcgactctctagggagctccggcttttcactgggaacttataaagtccaagcttcataactttgcccggccagtcccactgcagggtcgagatgccgaactgactatggggaagggatctatttctttcttgttcttcagccaagtacgtaatcgttttcccgggaatttcagcttattgttgcctgtccaagtgaaggcttggtcgataggtagctggttggaggtgggtgggcgtcaagacattaagtgggagactgcttatagctgagcgattccgaggggaccctagggagtgtgacttctagtctagagctttcctttccttggctcggaatcaagccctcgccccctgcttgggaagttggtctgcattgaagcgtgggaggaggcagttgtaaaacattttggcgcgttttttctggaggtggtggttgagacgccgctggagtcacggatgagtaatcggcgggggcgttggcgattctgtagaccgaaccctctggggaattcgcctgctcttgctagaggcttcattctcaactttataaaccaaattgtctttgaaatgcccgaaaggaaaatcaatgcagattggcttcctggtgtcccagcagcagatgagtcttttgcttttggccagcccttgccctcgtgccaggctccgtgttaggggctgaggaataagaggagggaaagaaacgctctcaagtaatcaagaatctagaggagactagcttagagataaatgattgcaactgattgtaatttgtgtaatcatagaagttgtacttgaagtctcaatattcattggttgaaggaatgaaagtagtagggaattcgggaggggtgaatgaaaactgcccaaaggagaaaacatttgctccgggaacagaagtcaaaggttgccaggagcacataatgagatcggagaagacagtctaggcatagaaaacagcttgtgggaaaacagtgagacataatacagtttagtagtaagtctgggaattgcacgcaattattaggaatttttgagacccaaagagggtatgagtagcagaggaaattgtgctggtgggtactgtggacatcatacaaatcatgtatgacctatgggggtggacactggggatttaattgtgtattccttgagcagctactgaaaggctaaatagcactggtaaccgtgtaggaggagactggggaagacagcaaaaactaaatctctcttctttttcccacctgttagctctaggcatgcatctaaacctagaccattcaatgtgaaaactgcttttcaaaataaataaacataaatcttaatagtaaaaaacaatacatcatcattcttgggaggatctttgagtaagggatagcatagtcacaaaagcattaacaaatagtgggggaaaaccatctatatttatatatgatttacaatactatctttcctctaaccatttttagttaagatggcattactaacaaaagttttaaaacaaacttaacaaaattattttattagaataataattctttgtagaaggctgatagcacgttcctggttctgcttatttctctttttgtttaatattactaaaattacactaatttagcattactatattgggtaccttattgcctcaggataaagcttggattaaggtagtgacaagaagaaaaaccagttgacagcagagaaaacagagctaagcactggtgatctttttctgcggctgctgatttctctccccagttccatccacagcttataggaagattcactgagattcaggcttggagcagggcctaagcttctctattttaaaattctctgggcgatgagaatcaccaatttaaagaacacgtttcttctgtaatatactgttgtcaactgtttgtttcttaattttaaaaatgcagggttacctagaggatttggtagcctcaaatttagtactgagtaaagggagactagctcaaaagaataatgaatatagtcctaaatgaaccaaagatgtcaatagatacccggagaagtacaaaccctctaaagtgggacaactgccctaaatgtagcatgttcttttctgaaagccttgaattagtggaaaatcaaacgatcactaatagtggctaatagcaatttatcactatgaattcaatggctacattttataacaacgataatttattttagtggaaagtggcactgaccatagatagtatcccaggtgtttgcctgcttaccacaaataattgttctttgaacagatatatttgattaaatgagcattttaatatgatattgtcacacatgaaaaacatgtatttcctccaatgtgtgtaaaatagaagcatcactagcctcctactgtgagctaatgaatatactgtgaactcaagcaataatattctgagggtcatcttaagacctctatcagtgccttcttcatgaagaatgtggatggagctggaggccattattgttggcaaactaacacaggaacagaaaaccgaataccgcatgttctcactcacaagtgagagctaaatgatgagaacacgtaaatacatagaggggaacaacatatactggggccttttggagggtggagggtgggagaagagaagggatcagaaaaaaataactaatgggtattgggcttaatacctgggtgatgaaataatctgtacaaaaataccccgtgacacaagtttacctatgtaacaaacctgtacttgtactgctgaacttaaaagtttaaaaaaagaaaaaaaatattaatttcagataccaggaatgggcttaataaaagttgcctatctctaagttagctgagttttaaactagtccatatatacttgtttgggaacgtggatatttattttatttctttccttttatagattggttcacttgaaaatcactacttattcaaacataaaaaccaccccagaaggtctcgaaggagtgcctttcatatcactaagagattatctgatgatgatcgtgtaagtgttgtacatttgtcttcaaaccaatactctagcttatctgctttctttatgatttctaataaaaacagaagcattttgcaaatgtggttttttttttattgtgaccaagattgtttatctgtattatttctaatttctttccataaaattataatggcacataataataacaagattgggttgaattggttgagccaaagttaattttacacatatatacgcagtttaattatataattacatatatatctaaagttaattttatatgtacactcacaaattcagtctaagagcatgaaagtgaatatttaaaatgagagggcagcactaataaaaatgtttgacaatacagtcaatcaacaaccttttattaggtacctattatgtaccaaacactttaataccaatgtgggctcaaagaaatacatgggccttactttcaataacatttcagtataactgaaaaaaaagtctattatttctatttggttttgctgtataaggagctagtgtttatgagagaactgtaaatccatgtcttcatgaggcaaatgtttccataagtaatctattgttggatccaaaccatctgatctcttttcatcctagtttgtatcttggttcaatgattaggttacagcagaaataaatataggtaaataaggtagaggcagtttgaatagatagctaatgtacctattgattttgaagtctattttcaaggtcaacaaacatattagaaaatgtttactatgttgggagtattgtaattttcatacagtgttgccttttctcaaagaaatgccatactggaagaaatttatcctgattcgcctgatatctgtgtacataatttttgttacctaggacaacctggagaattagaatgagagatcctcttggtgagaggattaaaaacatcctttcaacttcccagggggaaaatatatatatatgtatgtgacagaaaggtgatagaactgttgaaagtagacgaaattcatgaggactgtaagataatttgcccttttattcattctgaaactgatagaatttttaaaagaagaagaaaaagacaaattatgagggtagggaatgggaatggcctgggtcaccagtgttcgaatgtaaaagaaacaacaacatcctgacaatgctgtattaggaccacggacagtgaccgtatagctcatctacacccactgctagctcttttttgtcaagttattgcttgatgtgggagaccaaatcagaggccctggaccttattacagaagtttcttgtccactgaggtcttcccttactcacttcaagggagagggctcatcgtgtgtgggctctgaaaagcagaataacttctagcactctggctaggcttagtccccgggctaagcagaagagagatttccttctttgcctaaatgcatgcccaaactgcatgcccattaatgcacatagaactcaaactgacctgccttctcactttcataggagaaaattggacagaatagagcatacctaactgttattcttactcaaagtatctcatgacaatgaagatggcccattctactctttatacatccccttgatagctgatttggtgggggaggggtggaatctcaagacattatgaaaaaatgctaagaattccttctccagcacaggtataactttgtaaaaaattagcccaagaataattttattttaggaaacattctggaaccatagaaacttgcattggaaggttgaattagatgatcttcaatgctctttccagatcaaaagtattatttataattaagtacatgatacctataatgcataatagaaagacactaccaattttcctctataccattcagcctgctcttctagagattaatacatgattctgagttaatgacattaatcataacactgttttctacaattggatgtttatctgatcagacggcagagtgcctcctcttatatcccatttccaaaaaattgctcttggttttcattttattgctcttttttgatggaggataatattctttcaaatcagccctgtgaaatgcagcaacagtctatctttacaagtctgttaataaaatctccaagtgtaagtgaccctctacctcaaagattagtacttattccctagcagtcagcttccagagatcaactcagatgataggcagcattccaagcattgaggtattttaagccaaaacaattaagcttgaaaatacaagcactttaaaaataaatcatagtgactaatttctagctttcaggttcttcccattatttttaataggtttgcagtatatttttaattgaaaattgagggcagtcttagtggatggttttatccttcagttgcaaattatttttcggtttttatttttggagctgattcatgagtactctcacattaacaatattccaccacacactgaattgtcatcatgcatacagcagaaaagatgtgtttggggtaggaaatagtcatattgccaagaaaaataagagtatagaattatctcataatgaatataactacaaggcagcccctcactctctcagggcttcaagtataatagtattatgctgtaaatatggggcaggtaattttcgtattgtcagatctctttgcataatacatgagactgaattaatggtaagtgtgcgtggtcagtagtgctcattcatcacccaggatctgtgtctcatattaaatacttttaagcagaggtcgaagcacaggggagggagtttcaaatttgcatggatacagcaccattcttactttataaaatatttgcaatttctacctgttgtatgtaaagacagagaaattaatctataaaagcattataacagcagtctcttggcttgttgactcaatccataaaagcagacaaattttcagccatggagccctgaaacctcaatataaaaatgagtattatggtccatttgctgatgaaagcagactgaacttttgcttccactgtaaccacaatgtaaataatttagggaattatcatttcactgactgcttctcctccccctaaaggtgcactttactgtaatagaggaaatattcatctccccagtgggcaatcccttcttctcactgaggtgccagtttaatctgtagtcaaatgaaaatattgcagagctgcctgaactctgatgggaagggtactggagatagttagaggaagtatacagaggtagatatttgacttttgattttcttgctataaaaatccttgtaggtgatatgggctgaacaacagtatgaaaaagaaagaagtaaacgttcagctctaagggactcagcactaaatctcttcaatgatcccatgtggaatcagcaatggtacttggtaagtacctacagaaggactatgtgggtgggacctgggacctggcttctttatgttgttacatttgcaacatggatttttttttttttttatgatggagaatttcatagggagctatattgtctggagattagggctgatgggatcttcttgatctgcctcttctgttttgctgagtaaggatgttggaaacagatatctttagctgctgtgaaaaaaataggttgtattttttgtcttcttaagtttatttgggataaatgcagaaaaataatatcttgcaggttagggtttccaaaaacagtacttgtggcaaaaatctcatttggttaaagttattcttcagaaccctttaaagcactcacagagtatagtgaacataatttggcatatacaaccctgaatgacaattcttatatgacacagatgagaatctctgaaagaggttaaaagaaggaacacaagaaaagtctattgcaaatgtctagacttgcaaaccattctacctttaagatagttaccaaatccttgagcgaagaaattgttaagtgttgctgtctacctgcagggtgtcctctcttctgtttaatgttacgtctgtatggtagtagtataggctaatagaaggatttgttgttgagaattttataaaagattatttctcttgaaaaacacaagctaagactttgatactcttgttgcataagggttagaaaaggggatcagtttctcttgaccctacgttttctttctttctttctttctttctttctttctttctttctttctttctttctttctttctttcttttctttctttctctttctttctttctttctatctttctttttttttttgacagagttttgctcttgttgcccaggctggagtgcaatggcatgatctcagctcactgcaatctctgtctcctggcttcaagcgattctcctgcctcagcctctggagtagcttggattacagatgcccgccaccatgcccagctaatttttgtatttttaatagagatggggttttgtcacattggtcagtctggtctcgaactcctgacctcaggtgatccacccgccttggcctcccaaagtgctgggattacaggcatgagccaccgcaccgggcctcttgccactatcttaagtatttgctcattgcagcagaagagacttatcagttaacacttgtgcatttcctgtgtgacaaacactattctaaaatgtttgatatgaattaattcattttgttctcatgattgtctgtgttgtagaaatagtaattatgcccatttaacagatggaaaaacagagatattggaaagtagaataatttgccaaaatccatggctgctagtggtgggactataattcacgactccagagtccatactcttaacaactacagtctaaaattgttcctgcaactgacatagaggccttcttctctgactttggccaacaatctgtgtacagttccagcctcctgtgattcagcttcataccagcctggcaaatacttgtcaccccaccccccaacctctttatggggaggagggcacaaaagcaagagggcagctccttcactgacacttttgattgtggttatttatagatttcttattgaccctttcaccgggtacctggcattcttttactgtctctgtctcacatgcttagaaatgtgcttatatctgtgttcccttgctaccctgtacttatctcctgtacagtcccacactctgactatcagaaaatgtattttaaaaggaaaaccctgaatctcctctcacagacacttaccccctaaatcactcatacttaaaaataggcaatcacattgcaattcctgaggcaatcacagtctcctgagcattccaggttctgctttttcctttagaataaaaattctaaaacattcatgaatgactatgcaccaggcaatataatgagagctcaatgtggcaatggagaatcaggatttggggggagatgaaaacatcgactatcaaatagagcttccatagatgaaagggttgagcatgttattataaatgaaagaaatttagggataaaattcttcaaagccatgtagttcaaagagaaggagcacaggtgattcatcttttcaagtgatgtccatttgggacaatcgggagaagagcagcactctgggggttcatttggccttactctcaactttgttttctcatttcactgaattggcttcttctaaagagtagagtgacccaaggaaaaagaaagatgggtctccaggttggaactgaagtgcccattttgtagcaagcaaatgataattttatcaatgcttcgttgtttttctttaccagcaagataccaggatgacggcagccctgcccaagctggaccttcatgtgatacctgtttggcaaaaaggcattacgggcaaaggagttgttatcaccgtactggatgatggtttggagtggaatcacacggacatttatgccaactatgtaagtgtgtgccttctcatgactgtgacttagggagctgtctgtgcagacacacagttagggctttccttcttttcaaggggatgctgctctggtgtcagtccctgggattatgggccaaggttatgtcccttctcccacttcccactagcttatatgaatttattttgtaccagtgggcattgaaataattcagtgggatcaaaaattgtacaaaagtatatgtgttgggagaagaaggggcagtgcctacaccaattaagttaccaaaatctgatgactttgagttgctcagtgtttggggcattaaagtaatcaaatcaagccccttgcctgagatcattgtcacagtttccctcctcacctcttttatgagtctatatccctgacattgtaaaattatatgaatgtgattccttccatgcaaatccaaagtgaataccacacaatgcacctatgccaagctgagaaaggaaaagttttctagaaatgggaaaataaataaataaaaacaatttgcttcattgtttattaagtttataatataatatgaacaccatcatatatcttaggtctttagatcaggaggctggtgtttcatctttcagattatcccttgtttttctctcatcctttccacctatcaaacattccccagctataacaccaagctaaagagccaaggaaaagagaaggaaaaatagtagcacagagtagaaattaggaatgattgaaatatacggaaagcattgaaaagtaacagtaagggtatgcgggaggcgtttaagtgtagctattgggttggaaaagggagtggagcctggaagcttgtcttgaatttcaagcaccctctctcaaattaaattacatgtttatttagtgtgcctgggaggctgaaggagagcaccatggacctgagtcccaccctcagccacttctttgcacctatattcataagagagatgagtgtcaaagtgtcactaactagctttatggccttagggaagtcatttaacttctctgggcctcaattttctcatctgaaaactgagatgactgaactaagtaaactaattccttccaactccaatatcccatgagtgcctgtgaaccataggcttggtaacattcactgagaattgaatgctggctcacctggctgtgttcatcatctctgcctggtttgtgagtaaaataaatattcagtgactcggccagaaactctaaaatgcaggcttttgagctatcagccaggatgggaaggcatagggtaagaggcttgggaagtgatgcttttttttttttttttttttttttttaatgctgccacagtgttatattttgttgtctctttaggatccagaggctagctatgattttaatgataatgaccatgatccatttccccgatatgatcccacaaacgagaacaagtgagtaaatatgcatttgtgtgaaataaagtactttacaatgcttttatcttgtttgagaaaattataccatatatttcatccacattccagtgctcaggaaatgttaatgcacaacatccataccacaatattttgttgcttttaaaacagaaaccaaagtttctatttttatattccctttggtttatagaaccatattttcattaaacttcttacattatgaaattctcctctcaaatgttactgaactgttgtagctttagaaagaatgtttgagacataaagagtacacactttgagcccatccctcccctcaattcctctatgaatcttttactcttagcaacatgctttatgttagtcatgaaaagaaatatatgtaaagaaatggatatgaacaatgcccacaacttctgacggtggctacagtcaccttcaccagttctctcagaagagcatggccaaactccagacagagaaatgcctctgaggtctggcccctgaatccaacacagtctccagggcattgagccagccggaagtctcctccagagttcctgctgctataaggccataggaaagagagaggagacagcacccgactcccagattaactctctgtcccttgaagccacattatggtgagagaggccaagagccacagaggccaagagcaagatcttctaaagggagaggtgaaagaaagacccagaggcaagagactttcaacttctctcctagccccaaagaaacttcacgctctaggcatgtggaccctcaaagtgtccatgcccatgggagagaccatctttgctcataccgatgttctcacagacatcaaggagacactcaaactttccttttcattttctctacacagaagagacttgcaccaaaatgatcaaagccaaggtcaaaattagggcttgttgctacaagtgaggatggaaaaagccaagcatctaacagctcttggtatatgtcacatgaagcgcttctttattctctctggatggcactgtctcttggactgttacccaacttgggtcagacaagtctgtctctgtctctctctctctctctctctctttctctctctctctccctctcttccttcctccctccctccctccctcccttccttattctccctcagaactcccaagtggctggtgcagtaatactgatctaaagttatttctttctttggatagtcttccctccagaaagccaacaaaccccaggatgggaggctggggtacatggacttggcctcaacttctgggtgtttatttcttccttggggaaaatgggaggcttgtggatagttcagggatatgacttctttccgtaccatttatttctttgagggtgactaaaggggttaaccgcaaatatcccttagaggtgaaaacattccagtaaaaacacaataggaaccactggcaagggtacctttggagcaaagtgggagtgtttcgagagcttacagcagaccctcagacaaactttttgctatatgtctgaagcaggataatgcaggaccagtaaggacatctactcttttggggcacagccttgcaatgtagttatggctttgccaattcccagagtaaagggtgaccttggagaaatcacttacctctctctgcctctattccattttcttcccctaaactgggtgacaacgtaccttctccctatgtttcttaaatgaacttcctgaggaaatggctaataagcacttggaataataagccttcttagagtggagtagaaacaactttcattccacccccttggttaagactacgggaaatctgttcccagacacttgaggagacttagatggaggcactggctccttcctaggcagtatacggtccttccaggcagatcctgggtctggccccaggatccagtgtgggtgataacttgtacgatggctgcatagtgggcgaattcttgatgaaatgacattctctggagtttttccagtcaggagatggaacactcagaccttcctcaaaacaaaggggatctcacagcacagcatttataatagttgttttatatatatgaatataataattaaaataaaatataatttccctgactcagggagttacctgcaaaggccctagggaagcagcccatataatgctatttgttttgtgcctgaaagccctgagcttccagatcatagcctgctgtgaatcttccacacagcattgagagagcatgtcatagcccaacagttaagagcagacttgggagccaaatttaggtcaaattttagatctgccacttagtagttgggtgatcttgaggaaattatttaacttctttgtgcttaagttttatcatcttttgaaaaagaatctctacttccttgagttagaggtattaagtgagtgtatatatatatagagagagagagggagagagagagagagagagaggtattaagtgagtttatatatatatatataataagtattatataacatatataatacttcattgagttaggggttaaagtgaggttttatatatatatatatatctcacttaatatatatatacatataaactcatttaatacctctaacttaatgaggtagattatttatctatatctatatctgtatatctggcatttaaacaaattgatttgtttaaaaattattccacaagatatttaaatactacccttattctggttaaaatattcttgtcacacttgttatttaagccatatatgtatatgtgtgcatatgtatatatatggcttaaataacatgtgtgacaaggatatttggcttggacatacacatatatatggcttggacactggtacacaaaaaagttaagtaagtgtttgctgtggtgatgatgatgatgataatgatcacagcttctcatttagtaactgaggtagaccttctttcagtgagaaatcaacatgacaagaataatatcatccgatgggagcagcagagacaagtcaattttctgagccaattcagaatctgctatttggaaatgacataatgagcaactctctctcaggatcctcttgactatcaaccaaaaaggtggcatccttatcatttatcagaaggtataataaaaagtagatttgccttctagcatgttgtcagacataaagcccttaggtttagaaaatgaatggctccattttgtcttggcctttacagcaattggagaggtattataccccaattccaaggttattatctcttcaaactatcagtattgctgttgttctttattaccacgtaaatgagattaatagaagctacatttgaatgctactctgaaagtcaaaagaggaatcactaaataataaaatcttaacagtgcaggtaatgcttaccattaagctggcataaatctgtattcattatttcaacaccaattacagattgtttttctagttaaataacaaatgtgacaaggatattttaaccagaataagggtagtatttaaactatctcatggaataatttttaaacaaatcattttgtttaaatgccagttactaccattgttctaagataatagaaagttctttactgcagcacctcacttagaaaagaaaaagagctgcggcctataaagaatgacataggaacacttttctttctctcaacgtttggaggtggaacctgaggataagaggaggaaaacatgtcaatgcatatttgtaccatgatcctcctgcagctctcactagagaatagtcgtccatatacaaggagagataaataataggtgctgtcacactgcatcattttttaggacaaaggcacaaacctggggatgtctgtcagcagattgattctgttggctcaggctgaagacctgcactggattcttttgctgacctgagccttgtctcccatcctgtatacatggaaatatataagaaggcagtggtgacttctggaagtacatttctcagagatgacaactgaattactccttctactaaggcaaagagcgttcatccatccacaaagcataagttgccttctgtatgttcagatgtgtgcacttttctcagagaatggtgtggtcaggacagcttcagttgcaaatgaaagaatcctaactcaaagattaagtaacaaagggattttaaaaatattcacccaagtgatgttctagtttctgatgtttcaagatccaagagctcaaacaatatgttctcaggacaccaagcactctgtttccatctctagtgctgctcgcctctgcttggcttcactttcaagagaatcctgcctggcagagcaagacccatatgactcacatggaacttaaagctcataattctcaagaaagagtggggtttcttccctataatctacatcagtccttgaaagttgtctgagaggaggggccccatgattgaaaaaaatcacaaaaagtcaggagggctgcttccccaaacaggaaaatgctagcatacataaaagaagcaggtgtttgctgcatcaggaaagatcttgaattaaagataattatattgtcctgacttagaattcctagccaggattaacatgaaggagcaggaatcttattttgtggaaggagaccaggaaatcatctttgctacttcaggaaaaagagaagttgaacaattcttcttgatggccagtcaatttaggaattttatattccatgctatgctgaattaatagatggccagtatagtagaattgaaatgtaactggccaacattattgctccgagctaacccttcctctctttcactctatgttggtatatctggtaggctcctccaagccaccaacagccttcacactcttacaggttgtttccacaatagaataaaatcacgaaataaatgaattcacattaatgtgcttttggcttgttggccctcctgagtcaggatggtggtgggaaaagacaattatcatcctcagaatttcagaatagatgctttagtggtggaatttggtgtttggaagacgcatttttcttccaaatactctgaaatcataaattaccctctttgcttgactgcaaaaccaatcatgttcaggcttctggccccagttgggatttcaggagcatcttggctttccaattagctggtaatgtcttgcaaatatctcaagctcctcttggtaccagataatcttcagacattttagtgtggcatatatttagaggagaggaggagggcttaataggggacttgttctaggatatcctactaaggctgatcaaggataatctaatccaaggcagtcactagggagaaaagtgaggagccactttgctaccaaaaagtacaaagcagaagccatttctctgaaattgtttctgaatgtcagagttcttataatagtatcaatagttaacactcactgtgttcttactatctgccatccactgctctaagtgttttacatataatttgtcatgtgaccaagcctttgcagacaagtaacttacccaaggtcacacccttagtgaatggcagaagccagaatttgaaatcacatactttgtctctaatacttgtgcccttcatctgaacataagttttatgttatactaatttaaaacaaacaaacaaaaacagtaacaaggccgacaaaaagttaatatacctatgccccattaattcattcatatgcaaaacaaatgtttgttcttctgtatgttttataattcttatttttcaatcctcagacacgggaccagatgtgcaggagaaattgccatgcaagcaaataatcacaaatgcggggttggagttgcatacaattccaaagttggaggtaaaacagaggattgtccctatagcttggcattttaatgtgaagcttacatcacccattgtaaatgggggaggggagcttttctttttaacaactggaggaacaaattagttccatgccaaagttgctacaggacttgaatatgatttgccagcgagtcaatagatatggattcctagaaaatggatagttgaatatagcctatacatctttgcaggaaaaaaaaatgtggaaatgttgaatagcatttgaaccaaatctaattttctctatgttctgatttagaatggtttgttattgagtgcttgctaaggaaacagaaggaggaggtaaatttaggcaaagacttttcctgcctctcaattctgtagaagttcttcactttatagagaagaacagcttcaaaatttaaaaaaagtacatacttattatattaaatagccaaattttatcttttatagcaaggatgtaggatttaattgttttcatcagtgtccttatggggaaacacatggtaagttgcattagggcaactgtggacattttaataaagaaacgatttacaagaattagagaaaaccaacaaggggctaagaagtggtaggcagatgttatcacctttagcctcaaggagcaaagggaagaagtcagcagaaaatagagagggaaagctgtggtcacaggagagagccactggataggccttgagtacaacaacagagccacttctaggcaaaggggattcaggggtataggcacctcattctcctcttgattcccaccctcttgctggtgtcttcagttggctgaacccaatgggaagacagagcccattgatgcagtccatgttctaatggagaagagtggaaagtgtatctgcaggggccaagagaaaagaaaaaactgtctctcctctttatgctatcccaacctcaggctttcatgttatgttataagcttcaagtttagtttggttttcaaaaaccataatcacaaaaagaatcaattgtagaacatttcaattacaataaaaccccattaaactctacatgagtataccttgcatttggttatgcatttctttttagaaaccaaataaatatacatcgtgacatgtaatgcatctttcatgaatatagggcactcttagaattttaagtgtcattcctgattcctttgatactaacatcttcaaagtgttctgttaatttttaaaaaaaatgaagggagaagcacaaattatgtaattagctagtaaaagaattcactcttttagtcataatgaacgaaacagctatagtttgtgaaagaatcatctgatcccttcattttgtagagaaagaatcagaagcaagctgctcaaggtaatgaaagcaagtttgtggcagtgtagaactgaaacacaagattccaagcctactgatgttttccattactccatcctttgatggtctggccccaaatgcattttttaccaataatcttcatttattaggcacctattgtatgtcagttactctacaaatattataggcagtgtatcctggtggttaacagatttaggggctagatttgtagggttcaaattctggctccccagtttcaagctatgtggccttgagcaagtcactatcccttcctggcctcaatctctccatttataaagtgaggagaattacggcacccacctcaaatggtggttgtaaggtttagatgagtttatacatgtaaagcctgtggattggtggctgcatatagactatcatgaatgcacatgagctgttattatcatccctattttacagttgaagaaactgaggcacagagggttaactggcttgcccaagattccacagctggtaagagcagaactgggattttttttttttttttttagacagagtctcactctgtcgcccaggctggagtgcagtggcgcgatctcggctcactgcaagctccgcctcccgggttcatgccattctcctgcctcagcctcctgagtagctaggactacaggaacccgccactacgcccggctaattttttttttttttttttttttttttgtatttttagtggagacagggtttcatcatgttagccaggatggtctcgatctcttgacctcgtgatccgcccgcctcggcctcccaaagtgctgggattacaggcgtgagccaccgcacctggccgattttttttctaaatgcattttttttttttttttttgagacagagtcttgctctgttgcccaggctggagtgcagtggttgcaatcttagctcactgcaacctctgcctcccaggttcaagcatttcttgtgcctcagcctcctgagtagctgggattataggtgcgtgccagcatgcctgactaatttttgtatttttagtaaagatggggtttctccatgttggccaggctggtcttgaactcctggcctcaagtgatccacccacctcggcctcccaaagtgttggtattaaaggcatgagccactgcgcctggctctaaatgcatttttgaacaatttcttttttacaaatacaactttcactgatcatatcaatttcatatcattttacctttgctccatagtaaataagtgtgaaaatctaaggctgtgcactttattgtattatgagcctgaagccagaaataaccaggtagctgcctgtaatctgtccagattgtttttgccttcctggctcttgaattcataagtctgatgacgggtgacagcctgttggaaagcacaaagagctaccgcacctacattgtcctgatgaaaaatgattccccttgggggtgaaatccatggcaatgatttcatccttgagattatttagaagaataggaagcatgttccttgaaaatgtttcttagcaaacacatgaaaggatggcctctgggttatttttaatcagggcttagaaacaaaagtgctttccctatttgttagtttcctgttgtgactagatcttttgaagctacatgtttcctgtccagagtccttgtgtggcgtagactgggccacagccatttgtgggacagccatgaggaggtgcatcaccagagggctgcttggagggtctttctgaaagctggtctgtcatttagttggggtgggagggagggcaaacattttgtaattgacaacaatcacggccacttcctctcatccaaggatgctgctccacttcagactcaatgcccagagcttttgctgggaagagagccttgagtgggaccaaaaaaaaaaaaaaaaaaaaaaacatcacagctgcctacacagtgcatggtattgcatagtattatctctaaagtgcgacaaaaaagcttatgggggcagcaacatgttccttccttctgtggtgtcagtagctgggttacagaaattggggacatctatctagtagttacctggtttttgactcttaaaatcctttaaaaatacaaatagtaagagtattgggcttttgtccatgtacatactgacatcaacctttgtgtgtctttgtttattttgtttctcaggcataagaatgctggatggcattgtgacggatgctattgaggccagttcaattggattcaatcctggacacgtggatatttacagtgcaagctggggccctaatgatgatgggaaaactgtggaggggcctggccggctagcccagaaggcttttgaatatggtgtcaaacaggtaagatgctttacacagacccacatgaaatgaaacctgaccatctggatatgaggagaaggaaagaacacttaggttacatggaataacattgttgtggatttcttaacaaagtcctttacaattttaaatgcacttagagggccaaatcattcttcagagggatgggagttaaggcttaagaaagttttccctatttgtggccaggcgcgatggccaagggaggcagatcaattgaggccaggagtggccaatatggagaaaccccacctctactaaaaacacaaaaattagccaggtgtaactaggttgcactgttctgcaacctagtttagacagtgaaactgtggtctcaacttagatgcctatagtcccagctactcgggaggctgaggcacaagaattgcttgaacccagaaggcggaggtagcagtgagctgagattgcagcattgcactccagcctgggtgacagagtgagaccctgcctcaaaactaaatataaataaataaaatgaattttccctatttgggtctgaggttgaatggaaatttattacttttagcatatttattttaaaagtgcttctggacatttctttctccttactcattttcctgctgcttttgggtttttacactagtaaaaaactactcagtcttcttccaagcgcggaaatgcttttcaaatatagaaacgtgttgccttctgctctgcacgtgcctgttgaatacctgtgccttggttggattgctctgtcacttgggtttactgtattcttgcacagattctaaagccttgtgctccataagatgaaacaaaagtagaaactctggagagcacaaattgaaaaatcatagaaagggcggctttgacgagttccattcaattgaagagtcccttttaatgcagctgcaaggcagatctgaataattcctaattttgtcattctatcagtcagccagaagattgaagcagaaagaaagagaggaagttcaaagatttaagtgcagtgacataaactaagagaagggtggaaaaatatgagcaagtgcaaaacgctagattatgaatctgcataagaaagaaaagcgtgtgctcagccctaccccaggagggcccagagactggcagggccagagtccagtggcttataatacacagccttgtgagatttccaatatcgaagccaaaagatctggaattgaaaatagatcccaaatagctgtctctgagaatttcacacatgtagtcgttggggattttattgggatataacaatgaccccaatagatgataacagataatatgcattctggcttttcctttaggggagacaggggaaggggtccatcttcgtctgggcttcgggaaacggggggcgtcagggagataattgtgactgtgatggctacacagacagcatctacaccatctccatcagcagtgcctcccagcaaggcctatccccctggtacgctgagaagtgctcctccacactggccacctcttacagcagcggagattacaccgaccagagaatcgtatgttgcttttgtctaattctctctgcttagttaggagagcgtggcatgcatgtgaaatgattcccctaactgacctttggtacgactgattcgcttaagcttgatgtctcagttgggagaactcacacttactcacttgaaaggctggcatccatcagaaagttttctctccagggataatgacacttctgccaagatgatcttcccctctgtcatttttaaacccagccttgagaagccaccaaacctgtcattacacacagcggagactccaaatgtcttttctgcttgtctgatgcctccctggaaacagccttaaaggagatctcagggttgtaggggctttatcacccttgtacttgctgatcctttaacagcagggatatagtctgacctgccctgtcgcagatgataaaaatacagagtctacaccagctatgtctcctaagaatggatgacctgcaggaaaatagcagtttcagtgtcccctgaggtgaactgctcagcatctgggtaagcagctcggggaggtcgtatgctcagagagctcctccagcccacgcttgcctgcgcctttgcttccatgagtcagacggccaagggcaattactggatttcccttcaagggcatgacgatggaggggcatttaggggctttgagaacaaagggagacacctttaatttaaaaaatgtaaggcccccaatttaactcctgacacagaaaggaccaactagctaaagtatatagatcctatctcagtgaaatagcaggtcatgatctaattagagggtgggtgaaccctataataatgaccttggaatgcgtgcaagattcctattaatggcatctcaacaaaattgtcaacacgaacatcttcttcatacaggatcacttctgcaagctagtttagacagtaaagctgtggtctcaacttagaagtgtgggcctgcttctcacgcgcatctcttcagctactcaagtaatagacagtggcattctaccgaggggttttatggcaggcacattttaaagggtttgaaaggggcatatcagacatctgccccacttgtcttcagagcccctggctgttgtcatttccctgggtgtccagagctgcctttagaaaatggcctgttgggcatttcagaatcaccatttcacagactgttccttatcttgggtaacctgcactgaagcagaagaaagattttctatctttgtaaaactccctccttaagaaagccagccttaggagagacagctggtggattctatttgagacagtctcagtaacataacctttttcttacgcaaaccttttcctcagcatagtcatctctgggggcttgcttgcgtcaacaggtaaaaagggcaaccttgcttccgcagccctctgaggagcagagccatcataacttgagaaattcagcaactccaagcaggaagccaatggaggtgataatagaacaaattatttttttacacctccctcccacacatcgaaatctcgagctagaacttcggtgctggagcctgggtgggtgtcttgttagtaatcccttggcccaaccagcagcgccgtggtccttaaggcagacaggaagtcttttcagtttcttcccttcatctcagcaatctcttcattaccctaaagttagccagggtaattccttacttgcaagaaaattatgtaaaactactttcacagagaacatctcgggtaagtctcgcatatgagtcagaaaatataaatcgcattttacagatggggagccaaatgacttgcccgaggacaaatctattaagtagcagttagagaatttgaacccagaactaagtccagcacactttccattttaaagacccatcgttttcctcaaagtgtaaatgtggacaccaactcacaggtatcaaatctagttcaacagtgagtgcaaactacatattaagcattttttgtgcaagtagttcaaatggctaaggccaggatgtcttcatatccttgggctgaagaggcagccaaatgtcaatctgaaggcaaaagggaattttgtatgagacagaatttctaaatatgccagaccaaacacaatggacccgatgattaatgggccagcatgattcacagtgattttgaaactttgttttttatagacagcatttcgtttgggaatctcagaaaagaaaatattcgtagtgggagtacttcatccccagaaaaggcatcttgctgccagaattatagagaagttgcatatagagggtgaactaaaatatcagcagatggcaaacatccgcctgtggtttagaggagaaagtaggcaatcgaatcagctgagtttcctggtcatagcagatgcagcctttggtacagttaacccccaagacaggcccacactcctcacgtgttctccctgcctttctctccttcctgacgtcatccagacgagcgctgacctgcacaatgactgcacggagacgcacacaggcacctcggcctctgcacctctggctgctggcatcttcgctctggccctggaagcaaagtaaggcccagaaagcttctaatcacctttacaaaggctgattctccttatttttaataacacttttttttctgaatacatggttacaggagaaattttggaatactgcaaataaagataagctctttcctgccacttcgaggtcactaaccatagttaacatctcaatgtagatttaatacacacacatcttacaaaattgggatcttaatatagacgttattttgtaatctgtttttaaaacccattctacaatatattaaacatactttctcctgtctaaatcaatatgctttgacctttaaaactcatgctatccctcaaatcttcttcccactcagctacaacgccttttgtttattctcttccagcaggattttgtttaaatagtttccagtgggcagtattaggaacaagtttaaaaaactcctttctttgaatatgtaagcctagtcctggagctgatataaccacatcaggggacatgagatttaaaggcaggagttttatattttcacagtgttccattgtataaacacaaatttccttaaagtcatctaatcatgcttaaacaccattgtcagtaaatattagttgtcatctctgacaatttcctcaggataaacactcagaattggaatttctgggtcaaagggcaagcatgttttaatgatttttatatatattgacaagatgctgccttgaatgactataccattttatattccctccaggaatatatgtgtgaaagtgccagtttccaaaacccttgtcaaaactacttttattatcttttaaaatatttgctatgttgataggtgaaaatggtatctcattttaatatgcttgtatttaattactaatgaagctcaatatttcatacccttcagctctttgtcttctggggttgcttctttatggccttagttttgttttatggccttggttcacaaaagctagatgctttataagtttgacatttaccttttaatttgtttctatgtaatttttaatgaaatgtagttaatatgtatgtagttatgtttgtcagtctgtttctttaaggcttcttcctttgcttttatgctcagaaaaaatcttcacaaccccaaattagataaacattaattatatgtcttttattatggtttctttaccatatttaaattctaaatccctctggaatttattttagtgtatgatgttaaaaaaagatttaactttttttttctcataattacccaatagtccaatacttaacacagaggaaaaaaattgaactgtctcacactgcacatcacagctttttatgtgtcctcattcctgctttctgatgtgtggtgacagtgaatcttgaaatgtcaagtcaggtgctatggttgcatattagaagaagtgattaaacttgtaaattactattatccttcctaataaggagattatcctagaataaattacatattctctagagagagaacaaagcagtgtccttatgtcatattcagtagactcagttcgtaataacagaaaggaaaaatatcttggcctttgccatgactggaaaagccctgaggttcctgagcctttgtccaggagagtccagtttatctctaggatccctggggcttcctatggagatggggtatattcctgggtatctcggctgtgagatggctacagtggctaagcaaggaagtctagcaaggctcttaccaagagtccacctacttggaggggctggcaagatgtttggtaagggaagaagtaaattcaggtgctcaattagaaatagatattgggccctccagaaaagctatgttcagaatctaagttcacttataataggaagtagatggacaaaagacaaaaatctatgaacacaagctgagactggcatcagcagatccaaattaaccgagaaataattgtccaagcagtgaaaattgcaaggaacacctggcttcaagttctagctctaccactagctatgtggccttcggcaagttaatttacttgtggggttcagtctttccatctataaaatgaaggggtcaaacgagacctttttttacaaacttcttctcttcctaagattctcagagttgagattgaaaatgtcagcctgcataggtaatccaacatgaattgttggggtcagtgatgaggggtctggactggaagaaaatagggtcctatggattataggatcctgtgcaacagacttattatatttaagatttcaaaacacagactactaccccagggagctgttaaaagaaagcaatcttaaaattttatgtctagagcctttcttctctatccaacacctgtcagatgcatgtaaatataactagccgtgcctagcccatccttgtatagtgaccaatatagtagaaatatccatctgctgaacagaagtaatgccaattttatgtaagagctgaaattgtaaaagtgcaatccttggtttctaaaacctcaaggcttctttttctgtatagtggaaaatgatcctatacagaaaataatcctttccttttctttttcttttggagacagtgtctcactccgtcacccaggctggagtgcagtggcaagatctcggctcactgcaacctcaacccctccggttcaagaaattcttatgcctcagcctcctgagtagctgggattacaggcatgtgccaccatgcctggctaatttgatccttcttttttctatgtaggagaaaatgatctaggaatgatctagcctcattaatctcagtctctgatggacagtctctaaagcaggtgtttcatttctgtgaaacactcagatgggttccaaggggtccatgaatctctttgcaactaaatgcagaattgcttataaatgtatgtatggcatatttctggggaatggcttataggtttcaccagattctcagtgttcgtgatttaagagatattaagagtctatgatctcccaggtgcttatcataagaatttaattcccttcattttgactcaattcatcagtaagataagtatgactgatctatcttaacatttatatccttactgccaaggtacatagaggttattaagatttctgttctcaattgaacatttttctgaactctattcaattgtctataccaaagctgaatgccagaatttctagacatgtgaccaagctttatcccaaggcactcaagaatgagaaaatcatttaatcatgtgccatcccacaggaacaactatggagactgaagagcccttgcctaaacttatcaagaataatggcacccaatattgattaggttcttactgtagaccagacacagctggcctctttatatacaatattaattataacgcttacaacattcttatgacatagaaattattaatttcacctataaatgggaaaaaataaggcttagagaggttgagatatataaccaagatcccacaaagaaattcaaactcaagtctctctgactgcaaagtctgtgctatcagcaaccacaccttgcagcctcccacagccctgtgagggagaggcaatgttgaatggcagcctatcatctcctcaaataaaggagggttcggaagattgaggctgataaatgaacatgcatttatgagtttcttataagttttctgtcacaagcagactactcaatatgctgtgttaaatgttatatagccagagtattggggaatgggaggagaaaaggaaaggagaaggaatggtttctggctgaatatgcacaaagaaatactttccttccccaaagcgatgtttctcaagtaccagcatatatagtcatcacctggggagtttatttaacatgcaggttcccaggtcattttgccagcaactattcagaccttgtatctgcctaggagtttctggtattcaacctaggaattccttttttaacaaatctcccaggcactttttaatgctagtaataccttaaccaagttttgagaaacaaatgctataaagagttacttttaccactgtgttttcctacaacctcatccacctgtgtttgtgtagaaacccattagggtagttagtaggtgtatcttggagataaatatactaagagaagaaggaattccttgcataaatgtttgtggcactattattattatgtagtgagtatacctaagaaagctgtagaaaatagcctcagccttctgaggagagatcaaaagaatcagaataatttttaataggtgaggaaaattctgaagtgaaccattgaatcccttcacacctttggaaatattaaacaaacagataagccaaacttctggtcttattaaaacctggagaaagagaaatggactttcaatgctgcatgaaacctttggaaaaaaatcacaacaaaaaagtcttgacttagtgggttgtgaaatgttagaaagtccaagttagaaaaattttaagatctaggctaatttaggtatgattagaggctgaaccagatagctcctaagacttttcactctggaattttgtctccaaattacattacctacatctcttctaattagaagcaatgcttaattcggtgtttaattccatacccttattttctgtaaacatatctttgattagccactcaatgcagtgtttaaaaatttaattatcgtggatgtcattgagcacaaattaacaaaggaaggctgtcaggaatgagttgcactgttgttagcagctccttttcatttatgaaatacaagcacacgaatgaacaataactctgttagaaaaatacaccggggcctgtcatggggtggggtgagtggagagggatagcattaggagatatacctaatgtaaatgacgagttaacgggtgcagcacaccaacatggcacatgtgtacatatgtaacaaaactgcacgttgtgcacatgtaccctagaacttaaagtataataataataaaaaaagaaaaataggtttttctaattgcatgacaatgaagctccttaatattttgcagagactagataaaggaaatttttaaaacaaaataacctgcaactgcatataaaataaatgctctactacagaaacataggacacacatgctatatgtgataatcatgattatcagcaccttgccttaagcctcctcagtacgcttcctccttcctgcctccacacatgcacctgcacatactgatgatccaaacggaaaactggtgtgttgcccattgactgccttgataagaggcttttacctaaaactccttttaaaagactggaaggaagcaagcatttcaataaaatgtcctattctatttacaagtgtaccaggtgatcatgaggcaagcattctgggactcactgaggatccctaaactggtgtccttccaaggcctctctgtcagtcactctccagggtaaagtggtatgtttgtcgggagctcagctcaggtgagctgagctgtcaggtgtggagtagcctattaattcaacaagccaaaaatgaaagcattgagcctttagtcacttactgctatgacataagcaagagtctgaaaccggagaaaacacttactcgccctgttcctggcatactggttgagtggctcagcacagacttgagggtcatctcactgctgagggagccccgaacaaaaggctctggcaattttatggactctgaggtgtgaggcggggagggaccaagagagtacgggagtggagaagcaccaggcactgagtctgagtgaggaaagtgtctagatgtttcccctcctctctccacgaggaggcctgaccaagggacctaggaaggaaagctctcaccagctaggaatgtcaatatggaaagaacatgaggggccagggggcctgcggccttcatggaaactcctctcagaggctgcgagccacaaactgcacactgtgtctgcatggggagggcagcttccccgtgtgtcgtgccaggtaagacctttgaaatcgcctatggtcaggcctgaaaaatcacacacggtttttaactaggagccggactcttcagtgtttaggaatgtccactgcctctttcttgtcacaggggattactgagccagtacatgatgggctctggggagaaggcagcaaagtgagccagactcccctgatgattgttctccaaccgagtgctgagacaggaaccttgaggagtaaaaactgggcatctacttattacataatgcttgattggcttcagggaacaatacaggtctcaaagtcgaggaaaagtttgagaatctgactgatgactaggagcaatatgttttaaaattatatttggggctagttagcacttaggcatgttcagtctctgaaccaaccatatctgctgagcatatataccctgtgcccagcattcttctgggtgctacacatcagagaacaagatggataaagatctcaccacttctcatggttaaattagaaccagggagagagacatcaacaaaacacaatacaaatgagtttcccgcatgttagaagcctataagtgcaatggaaggagaatatgcacatatagcagaataaaagagctcgggaccatgtgggagagtggaaattttaaataggctgatcaaggaaggcctcatcatagtataatagatccaacaatcccttatatctctgatttatctttatagtgttgctaaattaatcttactaagacttatgattttactatttccttactcaaaaattctcactgattcccactgcccaaaagataaagtataagctccctttctggcatgccaggttctcatcgctctggcccaatactcctcactgcctctcccctgccccagcaaaccaggctgtcatctggccacacctgtactgtcccactttggtgcttttgctccagtggccttcttctctatctccacttcttaacactctaccccctgtcaaagtccagctcaaatatttctcccccacaaagttttcctagatctttctattccatggaaattctttctactctaaactcccacaatgcgttaagctatgaatatagcactcaccagatagaattataaaagccttaattctttttactggattgtaaacttcttttttttttttttttttttttttttgagacggagtcccgctctttagcccaggccggattgcagtggcacaatcttggctcactgcaagctccgcctcccaggttcacgccattctcctgcctcagcctcccgagtagctgggactacaggcgcccgccaccgcgcccggctaattttttgtatttttagtagagacggggtttcaccgtgttagccaagatggtctcgatctcctgaccttgtgatccgcccgcctcggcctcccaaagtgctgggattacaggcgtgagccaccgcgcccagcctggattgtaaacttctaaaagacaagaaccacatccttgaatatccccatggtattagcatagtgccttgcaagagtgagctcaaatagctaagagtttcttgacgcttttgatagataaagaaaaaggcaatacatgtttacagcaggtagccagtctgtgtctttaacatctcactcttcctaagaaggaagtcaaggcctcgtctgtgggttcataatgctgaaagtgctaaggcttttaatggacagcatgagactggagggcataaagaaagtgttaccatttaaaatgtttgctcagttaaatggaagcaattagaaattaaggacaaagttttatacttctatattgctgaggactgaattttactcatagtaaaagcttatatgctctggagagaagtcataacttatatgttacagggagaagttttcagctctgtattctgaattctgaatgaaaagatatatgaacagtaatagacactagaataacataactacaatagcaaaaggcacttcataatccctgaatggagatgcttattgttagcacttgcttttgcaaggaaacttcatttttctctgaaagacactttgggtcacttcccctccagcccaaatctcacctggcgagatatgcagcacctggttgtctggacctctgagtatgacccgctggccaataaccctggatggaaaaagaatggagcaggcttgatggtgaatagtcgatttggatttggcttgctaaatgccaaagctctggtggatttagctgaccccaggacctggaggagcgtgcctgagaagaaagagtgtgttgtaaaggacaatgactttgagcccaggtaagtatctcctggaattttaaacacatgtgtgcccatggcataatttcattactatgtttgccattctgcctgatttttttgtatctacccttctgaagtagatggaggtggaattttctagtgttctctgtgggtatccatggggactaactaagagaccaaagctctagaaaccatgttaaccatttgcatgttcctcttgtagtccacctaccacatagcacccagtctaagatgcaccattgttttattgtcaattaaactgtgatcaaccacccatcagttttaagattcattctaaattcaatgtttaactatttttttaaaatgcatcttagggttgatgaaatgcagtacttgccaaccagttttacccaaaatctgcttgcaaaatagccttgcttcatgccacagtgctgtgtgattcatggcttttcttccatgagggattctttatcatacacttacttagactccctctagcacaccacatcttgtcacagaagaaatttctactaggagtgttttgtaatttctatcaaagcaatcaaaataatactgaagacctgctcacacaaaatatccaaggatgggaggcttggggcatgccttcagaaggccttctagataaaatcatttttttcttaagaggggctttttgatgggtctacaataaatctgcctgaatttgactccacagcaaatagcattgtatttaagtattagtgccccttaccattttcttatgcattaaaattcatgtatacataattctgaattaggttctacacatcacagggagtgacaaaaagcttagttgagcatctagtcaagattgatgcatgcagatatgcataaaatgcaaggaagtttggatatactttattcaatgctgattctttaatgtatttagagccctgaaagctaatggagaagttatcattgaaattccaacaagagcttgtgaaggacaagaaaatgctatcaagtccctggagcatgtacaatttgaagcaacaattgaatattcccgaagaggagaccttcatgtcacacttacttctgctgctggtaaattaaaaaagttctaagccatttatatttttaagtgtaagttgaatgattcaaataactgattgcttttgtttattcatagaacaaagtctcctaatagatattttcaggtcttaaaaaacatgcttattttttcctttttcttggtgttagatctccctctgccctgcccatttccactgatcctttgataagcagagaatgaggcccattcaaataatgctaattaatacacttttctgaagtcatgcattttcaaactgtttacttttccattttactgacctatcacttttctcttagatagcaaattagtgaaagttactctgataattaaccaaactcacagatatatccgaaacatacaaggagtccattgaaaactgggaattcagatcgattagaggagattgagaagattaacaaatttatcatagtaacatgaataaggccattttatatgatgtatgaacatttgctttttcctgcgagggcactaattcagataagatagtggatgggaaagagctcgtgaaccataagccataatctaaccaggaggagcagtcccaatactcctttatgttttagcaggactcaactgactaaatttggtttctgtgggtgatatgtgaggaaagatgagctatctctatgatcttcctcctgaatattaattcttagaggtttggaataggctctgttaattttgaagttatgctttctagatgtattggaattaacctgaaatattggtggaatgcttttttaattgatagacctgcagttatttaacccttccacatagaactattatcaattgatctagaaagggctgggacttaaaaatttacaggtaacctgtcttttaatataagagattgttaaattaatatatctttaagaaattaatacattaattaaataattatgattattaatgattgcataataaattaaataataatttttatgtttaaatcattatggagtcaggcacctactaaattttcaagatttcctctcacacttcagaaatgatagtttcattaaaatatttttagatttttgactctctaattcaatttgtaaatgtagttcgccgagttttccttatttaaataaaccttagtcaacattttcattcattcattcattattttttccacaatatttattgaggcaaataatattattcattattatatatgccaggcaatgtgctaagcactatagataaaaacatcatattttttccttgtgagtgtctctatcctggtcttatactaaaagagaaaattaggagaactcatctttttcagcttttattttcagttatcagatgctagagtgtatcctactatcagagctattaggacattcattaacttgtatttgtttcataggaactagcactgtgctcttggctgaaagagaacgggatacatctcctaatggctttaagaattgggacttcatgtctgttcacacatggggagagaaccctataggtacttggactttgagaattacagacatggtaagtgtgaatgagaggatgaaaaaacacaagcttacttttaaacattttgaagcacttttaaggttgatttcatcattaattagggccctaaagaattgtaccccttcttagtagaagtaagggaaaagtagagtgtttcaagccctgaccacttggttacgtagataatattcaaaaagaaagattaggcttcagccatactataagagggggaaaaacacttatataaacaatgtgacagactgtgggacaaatccaggtgttcccatgtctgcatgcagccagccatctaacctattcagccaacaaaatcaatcatattcacaaagatacttaaatgctcagaccaactttggtgtgacattctgccagagtcacatcttaaaggcatgcttatgattattctgcaatagctatttagatgtagcttaatgtttggagagatatcttatttaatatgacttttttaaacagttttagtcatgaaacaaaccgaaagcatttctcatttctttttcattctgtttactaacattctttgacatccttctgtaattttaacacacagtcacaaaaatgcaagtacagagcaaaagttagaaaaaagccaaatatagcttaattatttatttttgcatcatttctccaacattctctgtaggtgagaatataaatgaataatgttttggctctgagttcttctgtgacaaaagtgtaataaatatcagcagtgtagaattatacgcctaaataacttttttttttttttttgagacggagtcttgctctgtcacccaggctggagttgcagtggcacagtctcggctcactgcaacctctgcctcctgggttcaagcgcttctcctgcctcagcctcccgactagctggaattacaggtacccaccaccaagcctggctaatttttgtatttttagtagaaatggggtttcaccatgttggtcaggctggtctcgagctccttacctcaggtgatttacccacctcggcctcccaaagtggtgggattacaggtgtaagccaccacacccggcctagataactttttgaaaataaatcatttaaagttcttggagatgtcaattaaattaatacaaattctatagtcgtttgttacatttttttctctgaggatagctttctcctaaagactgctaaaattgtgatttagaaatggaagttgtaaaatgtccttctctcatagagcaaaaaaagaatgttcttagcatctgggcctgttcttgaatttggcctctattcttcaactcaatttcaccatcaggaaactaagaaaatctatttaccaaggtgggatttatttcatgtcaagtctgcaaaatctgaccttacacttctaaatttttaaagatattttagattttaacacattatttataattgttgagccttgaaaattatgactattcccccaaatatgcaactttttgtaactgaatttatagacctcttatttatttattttttgtcattgaactttatagacctcttttatttagttttttattatactttaagttctggagtacatgtacagagtgtgcaggtttgttacataggtatacacatgccatggtggtttgctgcacccatcaacccatcatctacattagatatttctcctaatgctatccctccccttgccccctactccctgacaggcccattgtgtgatgttcccctccctgtgcccatatgttcccactgttcaactcccacttatgagtgagaacattcagtgtttggttttctgttcctgtgttggtttgctgagaatgatggtttccagctttatccatgtccctgcagaggacatgaactcactcttttttatggctgcatagtattccacagtgcatatgtgccacacaatttttaagggcttattaatgctagaggttgtttataatactccatagaggctgacttttttcccagtggaatgtttctataagttgataattgggaaatatatttatagaaggtacagtcagctttccaagaacacatccaatatggaaaagaagacttacatagagatttctgatttttaaattaaatgtttgattatgaagcaatcagtttctaaactgttgaacctacaaattgtcaatttttatagcaagagtggatccaatggtttctttcacatgaaatgcacagaatcttaaaatgagattttaacaatgaaatcctttttagctattttgaatgagtttgttttatattatctaaaacacatactaaatgtaggtatgcttatttgttagtctggaagaattcaaaatgaaggaagaattgtgaactggaagctgattttgcacgggacctcttctcagccagagcatatgaagcagcctcgtgtgtacacgtcctacaacactgttcagaatgacagaagaggggtggagaagatggtggatccaggggaggtctgtgtggctctgttcttggcatgctctcttttgaactggggtagacaatgtagtcagtgaagctgtacccaacttccaagcaggaaataagtcaaacatggatggggaggataagaagtgatagtggtaaactattcttttccataggataaaactgtatttttttcattcaatattttatccagaacttagaaatcacaattaatgaattcaaaagtattaaatttcctaacatgaattttctccacttatgacagataacaaatggaaaaaaaagttatctttatgcccaatcacatatatctaacatttgtactgtactttgtttttaagcattttccacattgtctcattaacctataatccctataacctaggaaggatagacattcgtgtatccattttgcagaaagaaaaacaaggctcaaatggccaaatcatgtaggcttctttttattaattcattaactgacacttcttggcaacaccaaggggagcgatagatcacactttttctcaaaaaatttcagaggatagctaaaataagtcgttcacattcctgggtttcagcctgctatggctcctggcttccttctatcagatggtgagaaaagcccacattttctttatctctgtatcccagcatctagcacagtgcctcaggtgtaataggtaggttttcagaattttcagaacgccctgctctgaataggtccagctctgagctgggtgttttggaagatacagaggcaaagtacatattcaagaaacttacacatgaactgtgaaggcctcagcttgaattctagttccatttatattcttcaaagcagcttccctccaggacctgagtcctgagtacttttcttcacagtctgggaagcaggttaaccttgtcagtgttggaatattgaaacacttccacagcagttggccaaggttggcttctctgagctctccagctccctcctccccagcctagcacctcagtctctcccctgaccacttcttacagctcagtggctaaaagggtagttctgaaagccagtgcctccaggaaggcacacccatgctaccgcaaccagtgggtgccttctatatgacttgttagatattttgatatcctctgcttcccaaaatggattccatgacagcaggctgacaagtaaagaaaaccaccatgtactgagtacttacctatacagtctcatctagtcttcaaaaccaccacaaatggaggtactcttattccacctgacaggtgaagttgagggagattaaaaaggttgttaaaggtaccccagagggtaggcaaatgagggttgaagcccaagtccatgtggctcccagtcttgaactctctcccctcccctcattgcctctcaagcggcaggcagcgttcctgtggtagggttgcaactagcttgcctggccataaataatgaaccttcttccctttgtggatggcattctatgttttaggagcagcccacacaagagaaccctaaggagaacaccctggtgtccaaaagccccagcagcagcagcgtagggggccggagggatgagttggaggagggagccccttcccaggccatgctgcgactcctgcaaagtgctttcagtaaaaactcaccgccaaagcaatcaccaaagaagtccccaagtgcaaagctcaacatcccttatgaaaacttctacgaagccctggaaaagctgaacaaaccttcccagcttaaagactctgaagacagtctgtataatgactatgttgatgttttttataacactaaaccttacaagcacagagacgaccggctgcttcaagctctggtggacattctgaatgaggaaaattaaaataagtgtgtggtcccaagttggaaatattcatgcttcttccttaccctgcgattttgcctgtgtctgaagtggttgttttgtcatgaattcttatgcttataatatcctttgtggcaccttttctttttctccctaaactgtacatgtgaaggggatgagctcaagcaggaagttcaacttccagaattgatcataggtatttcaaaacacatctttcctgtctgcacaagtgaagtgttttgttctttctggagtcacagttgacaaaaagctcttacactacattagaacactgcattagagcccatttcaattctcaaaagaaaaggcaaaacctgggatatcaattaatttgaaaacataatctgcaaagaatgagaaggagtcagaaactgtttctgtagcttgttccctgtcttgtccatgtggttcttcaaattttgatgccaagaaagtatttggtaggcctaatgaaggagttcactgtaagactcattccctagatctttctattccaaagtgccactcattcctgtagtcaaaatctggtcatgttggtcaaaagctggattatttagatctagaaacagatcttgaaatctgaatgctctggtttgagcaattttcgaacattctttgcctggtgcactgtgtctgtggtgccagaggcgtccgtggatccagaggtggttatgactcgtgctgcatgcctggtctttcctctgtttctccttctgaaagttttctatacctgtctcctttctcagccacaaaataaatgttgggagaaatgatatataccactttcccagaaaaaaaaaaacttacacttgggacttggcaaattcctagtcacaatttttttcagcagtaacaggaaaccacttatcacatggagacctaatgtaataatagaaaaatactcataatagggagaaaccaagagaagttttgtttttgtttttttccaactgtgttcattagaacagcgtgttctaagtatttgaaactgaatgtttattccttgatactaaaagttcttctccaatcctatcactgatagtgtccaaattctcaccaaattgctcctaagcttcaaatcagaagcagaaactggcaggccatggaccttaattgtccctcaggtagattttgtttggtatgcagaatgtttttaaaatatgagtggttattgaaaatatgatgtttcacataaaacctcattctcggacccatctttgctcatggcaacagttagctggagctgagtagcagctgcctgattagatgactctcagtccccatggcaccctgctccatgttacctagagcaggcacttgattccttgctgggcagtatccaataggcatttgattttgcccactcctacactaagcgaatgtgtacaaagtgtaaatgcattaggaaaaacaaactacccgcatcttctgttaggcaggatctgtacaataataattatgagtttgcttatgtaatctcacctcacctggatgatcactaatactaattcatttattactaaccttctggcttccttctctcaatatgcttacaaagtctccagtcacctacaatgctggctttctcccactgagtttgctgtttgcaatttttccatgaagtttgaacttcataaggtaattcatggcattgaactggttcatgaaaagaacactagagtctgtcatttgctttggcttgaagtatggttggtaacacaaattttcacctgctcttctaccatttgaatttgtgtagagggtgtttgcagagcaatgcccgtaatgcttagagaatgttctcctaaaagacttgcggaatcactctgtccttggaagtttcatatattgtttgatatgaagtgttagatagaatttccaatattggagcatatcaaaaagtattaaaactaaaaaggaccagagaattcttagattggcccggaaaggccaataaagagttagaatgaaaactcattacttttccattcccaatctagtgctagatgtataaatctttcttttgattcttcctaacaaaatattttctgggttaaaaccccagccaactcattgggttgtagccaaaggttcactctcaagaagctttaatatttaaataaaatcatattgaatgtttccaacctggagtataatattcagatataaaacagttttgtcagtctttcttagtgcctgtgtggatttttgtgaaaatgtcaaagagaaaacttatatactatttcccttgaaattttaaactatattttctttacaggtatttataatataccaatgcttttatcaaacagaattttaaagagcataataaattatattaaagaaccaaaagttttcctgagaataagaaagtttcacccaataaaatatttttgaaaggcatgttcctctgtcaatgaaaaaaagtacatgtatgtgttgtgatattaaaagtgacatttgtctaatagcctaatacaacatgtagctgagtttaacatgtgtggtcttggtattcttaagggaacttccacattatacatttgatgtattgaccagaat

SEQ ID NO: 601 - DNA, 13776 bp, Homo sapiens
gaaaagaggctgaggcaacctgaaggaggagctctcattaccttctgcccatcacttaataaatagccagccaattcatcaacattctggtacactgttggagagatgagacagtcacaccagctgcccctagtggggctcttactgttttcttttattccaagccaactatgcgagatttgtggtgagtaaactttgagctaaaattactctagagtgatagtctactgaaaactgttgacaagagactctatgtagagttacctgagaaaagatcccattccagtttcgtatgtggttggactccatgaatgatgaaaagggtggcaggagatggtgaggaaagtctcacaatgcatgttgttgtaagaggaattatagattgtgtattcacttgcctaactgctctttctatgctcagatcctctctagcacagcatccctaccaagtaactccctattcatgtgacttttcaatgacagaaaatttatgctcccagaaacttttctagatcatggaaagttatcttttggtcttgatatgcaatcttttttccctgaaattcaatgcatgatttttgggttaaccccttgtaactacatagaaaaaaataataatctctttcaaatagtgatgactgctgtcttgtcatgagtgagtttagatgttccaagttgcatgtccaccttccttcaactctttcccaggacacatgggataaagttccatcatctcttgcatgggtgttgaccccagagattgtgtggttctgtaaaagaactttaaagtaagagaagggaaaactaaattcaggtttagtttgatcccttagttattgaatgacccaacatttctgaatttctttagcttcattcataaataaaggataatgaggggagactattgaagcaaattatctcatgaagtctggtgcagttctcaagtgcatgaattctcttttgtgagactttactctgaaattgagcttcaaaccagtccaaagattactaggtggtactatctgtgctctctaaccagtaagaagagaacaccacagaagacaggcttgtatacatacaggctaaagcatagactcttctgactctgatttttcttcttggcttgacatttcccctgttggatcctaagaatagggaatggctatgtaggttttagctttcaattcattttaaataataatgataataattaaatttatctttgagactcaaggaagctgatttgagttgttgatcaggaactaaaaagtctgtttcagggccagaaaatctgctgagctggatggttccacaaaatctcagagaactgactcacaattgttccattgtgtctgcaacaaaccatgacctttctacaatcactctattcagatcttcttgactcattcttttaaagtaaagaaaactgggcaagagaaattacatttccttgattctcaagtatagtgataaaaactccagttgagctggaaataatagtatgtgcagcattttacagtttattcggtggtttcttgtccaatatctgtaaggtaagtgttaacagccacaatttttaaatgagaaaactaagagtaaaacaagttacataagttattatccacagtcataagttaaggagcacaaaatgtggccaaaatctgaatccaaacctcatgttcttctcactctcccactaatccattagataatctggagatatgtaggatttggggctactcctcaagattatggaaaaatacattgacaaagtgtcctgtgtttaaataaatagtaaatctttttattctcctctatttccttgggagctatggattttcctacttccacagtataatgtgacttccctccatctctggaattggggcatattgtaggctaaaactggagagttttttacaggctgcataatgctaaataatgatctcgatgcccagccagctgggtaatcagacaatgaagttttggggtcaatcaccagtataacacagaattattacctgcattttctcaacattaacccagttgatttagaagatggagaaggaaagaactgaatccaggaagtagaaagtcctgcttactgagagtcagaagacatgtagtctagtttcagctcagcctccaattatggaagtttctttaaggacaatctatctaagcttcatatacaaaattagggaatgatgctagatttcccaggcaggagtctgccagtacacaatgataagtctgcaccagttgttaaaatattaaaacattttcatgttggttgttaaaggagtaatgtctggcatgggggtgggttcaagacccacctttgtattattccaccaacacagtctgcagccactggattggtctaggtctgtgccatatctgttactaaatatttttatataacccctgctgcaagtcttactattttctgagtatgtgtttcttatttccttccttctctgccacagaggtaagtgaagaaaactacatccgcctaaaacctctgttgaatacaatgatccagtcaaactataacaggggaaccagcgctgtcaatgttgtgttgtccctcaaacttgttggaatccagatccaaaccctgatgcaaaagatgatccaacaaatcaaatacaatgtgaaaagcagatgtaagttgctgtatattctggaagatttagaaaaaaatctacctatttaaagattatctgcaactaatcctaaaaaattatgcatccaaagtatccctgctacatcccttctaatggtaccaaacttgaggtaacagaaacatgcccaaaatacaatcccatgccattcaccctagagctaggtcttgcttcttttggtcttaaaaaccacttttcttcaagaagccacaaacaaaagctatggatttttatccattaatgctgttatataagctagcttagttcacaaccacatgggaatacagatcataactaagaaagctggtgatggaaaggcaaccatggaacaacccagatttgaactaggtatgggtgggccttgaaccagtcatgttaatactgagcctcagttttctaattagtataaggggaaaagaagccactcttacctacctcataatattattataagaattatgagaatcctgagagtttggatactctaaaaggcagaacattaaaaatcaagaattactatcctagcaagctggtaccacaaagaaaaaaaaacccaagatcttgttgtttatctatttttcctctttttcactttcataaggattgtatgattccaaaacgattctgtgatttttatggaaaagacaaagatttagtttgcatttatacagtactgctctaaaaggctctgctttgaggataaagaagagaggaatcaaatattcatacaggaatgcatcacataatgatgaatatatatgacggtggtcccacaagattttaatagtgtatttttattgtaccttttctgtgcttggatatgtttagatacacaaatactattgggctacaattgcctatagtattcaggacagtaacatgctatactggtttttagcctgagagcaacaagctgtaccctatagcctaggtgtgtagtcaactataccatctaggttgtgtaagtacactctgtgatgtttgcacaatgacaaaatcgcttaacaaccagtttctcagaatttatccctatcattaagcgacacaagactgtatagagcgcaacagaagaaaaaagtgataggcaatataagtctcaaggaaatcaggaggcccaaaaaatcacaagcctgtaccttattaagcttgaatacttttcttttcagtgtcagatgtaagctcgggagagcttgccttgattatactggctttgggagtatgtcgtaacgctgaggaaaacttaatatatgattaccacctgatcgacaagctagaaaataaattccaagcagaaattgaaaatatgggtaagaattaaatatttagagaccctagactaccttgtcttctcctccactgattcaaaactatatgaagtttccctccactctttccttctcttcatcccgttcatctcactatgtctttgagggcacttccctttttctctttcagtatgcatcttgaattttctttttaaatatgttcagctgagcattgaccctatgtcaagtactactttacatatgatggcagaaacacacacacacatacacacacacacacacatgcacacacacaagtcaccattctctaatcgtccaggagcttggctttaagtcaaatgatgaattacaccagaaatagctgaacaatacaggatacagtgtcataagtaccaaaatatacaatgctagtatatgagctaaaggtggccagagtacattatcactgggaaaaatcaaccggccatggtggccactagtgaggtgcactgtttttatttcagttcccacccaatatttattctatttttcagtaagtccattttcctttgagatggcctctaacctaggtttctacttacagtttcaacaccttactattgaaaacgcaagaggcttggaggttgaaaacctgtattctggccctaactctgtaaccatctgaatatctagatagcatcttaatctctttaagactgtgtcccctcagttataaaatgaaagaaattgagcggaatttagtggcccttaaaagccctcacatttctcaggttttctgattctatgggtgacctcccccttctattagccacctttccttaaatgtaaagaaattaaaatagagtaagtaggaatagatggaaaatgcatacgccattaccacttccatgattaagggaggtatttcttctcttttctagaagcacacaatggcactcccctgactaactactaccagctcagcctggacgttttggccttgtgtctgttcaatgggaactactcaaccgccgaagttgtcaaccacttcactcctgaaaataaaaactattattttggtagccagttctcagtaggtgagttactaagcccaattcccttggtacagaggacatggtcaccagtaggtcttgctctttgagtttttctaccagtaagtacctggattttattttctaccctctttgctctagtcccctcaaaagggaattttctttttgagaagaatggatgatggatggcatttaagcttctttctagatgtgtggtatagtagaaatacccggtttctgctccagctcttctttgggttatataaacaatgaatgttaactcttgatcttaatttttccatttgtaagatgaggataaggcatgagaatatccacatgaaatattttagaaagggtaagttttagaaaagggaaatgcaatggaattcgtttatcttaacactgtctctttctctagtttattgggacaatttggatacctcgagagtcttgaacaataccacctctccagtgacaaagtccaatattttaatcaatagattgtatattcaccttgggaaatgaaccagaaatttcccactgtgtcagccttaatatccataaagaagtctttagacagttagtataggtgcttagcctctatggatccagatatacaagttcatctttctccaaattcaaagttcaaattgaagttcaaagcaaatcaccatgtagtatttctggatagtaaggagaatgtgagatttctcagacttcttttcccatgagagaggaaaggtcccatgctaaagaacacaggagacaccaagtatcaagccagaaaacgtgtccttatctttccttcttccagtctcttgcctcatcctcttttgtaaagaggtttactgggcaacaactctgtaaagtactattttctaatcagtctaatgaaacccttgagagccttacaaagacagtttatttgattcagcctcttaggttttctcaatccctcagccaacatggctaaaagattagagaaagatggaaaagatgagagcaaccaagatgtaaaagtgaaatactgtccatgtgtatgcacctacaaatccataggtgttttatgaccaaaatatgtgtaaaaaaagaaacccagaattgtatttaaaaaaaaaaaaaggcagggtgcagtggctcacacctgttatcccagcactttgggaggccgaggcgggtggatcacctgaggtcgggagttcaagaccagcctcgccaacatggtgaaaccccgtctctactaaaaatacaaaattagctgggcgtggtggctcactcctgtaatcccagctactcaggaggctgaggcaggagaatcactagaacccaggaggcagagttcgcagggagatcggaccacagcactccagcctgggcagcaagagcgagactccgtctcaaaaaaaaccaaaaaacaaaaaacaaacaaacaaaaaacactccagacagcagcaagagagctttagagattcgtgctacatcccaccctaaactgcttttaagctaatttcctggctttttacctgctatgtgtgtgtgatgggtctcttttccttggcaagttcttagatgctttccaggatgtttggattctcaaagacacctgttcctcagctgggctccatggcctgggcttcagacagttcaggcagcagacatatctttgcagggcacttccctttttctctttcagcatgcatcttgaattttctttttaaatatgttcagctgagcattgaccctatgttaagtacttctttacatatgattgcagacacacatacacacacatacaagacaccactctctaaacctccaggagcttggctttaagtcaagatgaactatagcagaaatagctgaacaacacaggacacagtgtcataagtaccaaaatatacaatgctagtatatgagctaaaggtggccagagtacattatcactgggaaaaataaactggccatggtggccactagtgaggtgcatctcccttaagtaaccttaagtgggagacccatcgcactacagtatgaggtatgaactatggagtacatggcaactgaacattgggaagaaatctttaaatatttgagtggttagtgctggagagatgattgctgtatcttgaaatctttcttcaccaattagcatgaccaaccatcccagtttttctagatctgtttttcttttagcactgaaagtctcacatcccaggaaacctctcggcccaggacaaactgaggtggttggtcgcctatcaacaatgttttgtttcctgacagatactggtgcaatggctgtcctggctctgacctgtgtgaagaagagtctaataaatgggcagatcaaagcagatgaaggcagtttaaagaacatcagtatttatacaaagtcactggtagaaaagattctgtctgagaaaaaagaaaatggtctcattggaaacacatttagcacaggagaagccatgcaggtaagtcagagggtgaaacaggaggcagagaagggagtcttctctggaagaaagcagtatttttttttttttaagatggagcttcgctcttgttgcccaggctggagttgcaatggtgcgagctcagctcactgcgacctccgcctcccgagttcaagcgattctcctgcctcagcctcctgagtagctgggattacacctgcctcagcctcctgagtagctgggattacaggcatccaccaccacgcccggctaattttttctatttttagtagagacagagtttcaccatgttggccaggccggtctcgaactcctgacctcaggtgatccactcaccttggcctcccaaagtgctgggattacaggtgtgggccactgcgcccagccagtatctttttcctttcttattggcctcctaagaccttattatacattctgcggttcctatactaactttgattttgctcatacgattcccttcccctccctgacatgtactcttctcatcttcagctttacttccccatagccaatgcttctaggaagcttttcctaactacaatttctctaagaaactctagagtctactacaatctgctttcttgttctatcacacgtagtttacactttcacacacacagtagtccccccattatccacaatttcactttccacagtttcagtcacccaaggtcaactgaggcttgaaaatattaaatggaaaatttcagaaataacgcataagttttaaattgtgcataattctgagtagtgtgataaaatcttgcaccttcccgctctgttccacccaggaagtgactcatccctttgtctatgcttgttaatcacttagtagccggttatcagatcaactgtcccaacattgaagtgcatgtgttcaagtaacccgtatttacttaataatggccccaaagcacaagagcaatggtgctgtaatatattattataattgttctatttgattattgctgttgttaatctcctactgtgcctaatttataaactgaactttattataggagtggatgtatagggaaaaaacatagtatatttaaggctcagtactatccatggtttcaggcatccactgtaggtcttggaatgtatcccccgctgataagagcaaactaccccatcacctccatttcctaaactaggagcatgagtcacagtaactgtgtcagtaatctaactaatctcacaaaaccagaaagtggtgtagattgggatgggacctgggctgttgttctcaaaactcacactcagcacctacactgtcgtgcatatgctctttgaggtctgagactttattcctgcattcattcagccattgatttacaaactctaaggggatgatataagaagcgatcaaggaaggtttacagaaaaaaaaaaaactttactgcatcatcagtatgaatagatattttccaggctgactcagggctagaggactttcaagggagagacgacagtgaggacaaagacccaaaagcacaaaagaatgttaggcattttaaggtcaaggtgttcggcatgaccagcacagagtccttgggaaacataacaggaggctggaggtgtaagcacgggtccagtcataaggttatctgtattgttgttgttactatttatgttgttgattgccttactaagtttgaactgaatataaactgctttcccattttcattgcatatttgaatcacctgaaggagctcttagaaaacactaatacccaggcccacaccagccaggtagtacagaaatttagaggtggagcctgggccttgctctggtttaaaagccctacaggtgatacaaattcacagtaggatcaagagctaattgcctacaacacattgttgggtatttttaaatattaataacatttaatttattgttatgtatgtgaataacatttattgacgtgtcttaagaggaaatgtactatgaccagtttttcttttttcttaatatcccacaaatgcttgtggacaacttggttagcttaagaacctccaagaaaagatgaaaacaggaactgtccatccctgggaaactacagagcagcatgttcaagtccgacccaccttagttcctgtcttgcttaccccaatgccctcctaacttttactacctcacaattctgccccttcaatcaagcttacattctgctgccaggagagtttctgtttaatgaacaattagactccccattgtcaatcaaataatgtcagacacctcctcatcgttgtcaatcaaatgaggtcagacatctcatcataaaattcaagcatctactagtctagcccaacttccttctccagcctgtttttccacagttgcctccaatgttccccatacatcagttctcctaaaccaggaggaatcccctgaggaactttgctaaaatgcagatactgtcatcattgccaggtcatgtcctggccattcctacctaacacctttgttcatgttgttcctcttgagtgctctatcctactctccaaggcctaactcaaataccaccttctccaggaagcttttttttttttagcttcattaaatgtttgtgagctcctctcctcttttgaaagaggcatcccactagatgcatcccttagggcattcctctggcaactccttttacagtagtttgttaatatttattgagtgtctcctatatgacaggtatttcccagcactgggatacagaaatgaatgtggcaaagtctgccttcattggaactattatagcttgtgttattaagcagttccaacctccctgcccaaactagtttataagcttctggataacaagaaagataactgagttatctgaggtgcttcctaggtagtcaatgttcaattaatactgaattagttacatatatagttatagataaggcttcccccttatttgaagtgtctcatattctctctctgtctctctttatctctcatcacccccccaccccaccctgcctcattaggccctctttgtatcatcagactattataatgaaaatgactggaattgccaacaaactctgaatacagtgctcacggaaatttctcaaggagcattcagcaatccaaacgctgcagcccaggtcttacctgccctgatgggaaagaccttcttggatattaacaaagactcttcttgcgtctctgcttcaggtataagcattaaagagagcacactgtttcgcttttcaccatagcacccaaagcatgtgagattcaggtgtcctttgaaaccaaaagtgaccagataaacctccaaaacataacagttgccagagagaattcagttttcctcatgttaccagggtttacagtcacctgaggatttgttcttaactgagtgctagatgtccctcttagttcaaacattaacaaggcagacctgattaaataatgtctatctccaaaggtgtattttctgactgttggatatagaaggatctgagcatcattctcatcctaaataaagtatggagtattggtaccgtgactctgactttgcacagtgagtgatcccttagggaaatgagacatctgtgtggaagtgatatgccagtattcaaaaattgtagcatgcattacttattcaaaaaatgaccttgcaaccaggtagaaggaaaggagacattgtcttatatctctgtccattcctggttcagccactcacaggtttaggaaacttggacaaaatgtttaacctctaagcttcagttttctaatgtaaaagttgggaacaaggacagtacctaacataggtttttgtaaagattgaatgagacaatccatgtaaaatgattagtatagtgcctggcaattcatatgttttcaataaacgttaagcaataaaaaggagaaaagacaagcattattgtatgctgtaccaaggcaaaaaaagaaaaaaaaaatcaggatcctctgtgagaaacagaagttagagcaactgaattgcttaaacagctgggagttgagccaagtgccaacattcacaagctggtgagtttgggtcttagtttctgctttagttatatgagaaatttgccccttgagtgatgataattgctccttatagtaaatccgtgtctgcataaaggcaaggagtccttggataggggttgagtaggtctgcaaactctaatatcatttttatttttctgaatattgctctgggcttttctgtctctgccaggtaacttcaacatctccgctgatgagcctataactgtgacacctcctgactcacaatcatatatctccgtcaattactctgtgagaatcaatgaaacatatttcaccaatgtcactgtgctaaatggttctgtcttcctcagtgtgatggagaaagcccagaaaatgaatgatactatatttgggtaggtctgtacctaacctaaggttaagatgtttgctgtcatttctaaagatgcagtaagaatgcatttgcacctaaatacaaagtatatttaaaatgcttctgggtcagtagctttgctgtccatctacatctcacagcaggagtttaaaataggaggtgaggtatttcatcttcttgcacataataggtagtaaattaatgttcgctaaataaattaatgaatctcagggctctctcttatttcagtaaaattcttgcaataaatgtaacttctaaagtcaaacatttgagatctagaacagtggttcttaactctttttgaatcacggacccctttgaaaatcaagtgaatgtaatgaatgttcatccaggaaaaaaatgaacatacacacaaaaattggcatttgtttatttatttattttacagacagcatcttactatgttgcacaggctggtcttgaattcctgggctcaagagatctgcccacctcagcctcccaaagtgctgggattacaggcatgagccactgccaaatttagcatttcaactgagggtttcacagataccctgaagcttctccctgccctcgctttcagaaaactcatagatccccaaactaaagtaactggtcaaggaggtcaagtattaaaattaaaataatggctttgcctctgaaaagtatgacttatttggctccttaactctagttgacagttatttatcatatctaacaacacagtgtaggatgctataaagaaaatcagaataataatataatatacattataaaggctaccctcaagggctttaagggaggtagaaaaatgactacggaatataaaacagatactgacctgtcactttttaataaacacaatatgaaatatcaaattatcctttcctgttcctcttttctaagggaaaactcagtaacttatggtgtctctagcacatgaggatcatatgttcttctactgaatcagtatctttagcagttactatcttggggtggaaggttgaagctgttatctgaaacctatctaccatggcaggtggggagagcagaaaccatgagcatcatttctctaatttagcatggagtgtggagtgcctgcattagaatcagctggagtgtttataaagcatgcagattcctgatccccagctcatatctaaaaataaaaatatctatggatagggccaggaaatctgcatttttataatgtcatcaagtgattctcaggtacattaaagtttgagaaatgcctattgttggtttcctttgacaattctaagttccagtaacctacttgctgtcacccacagtttcacaatggaggagcgctcatgggggccctatatcacctgtattcagggcctatgtgccaacaataatgacagaacctactgggaacttctgagtggaggcgaaccactgagccaaggtaagggagagacatgccaaaaagacccatgctaaaaatgcccaaatggagaggggtgtgagcctctgtggggattgggccaaggggttagtagagatgacatccattatttggtgatttagtggccaaatcatttgacccagttctctttcttcttccttttcaggagctggtagttacgttgtccgcaatggagaaaacttggaggttcgctggagcaaatactaataagcccaaactttcctcagctgcataaaatccatttgcagtggagttccatgtttattgtccttatgccttcttcttcatttatcccagtacgagcaggagagttaataacctccccttctctctctacatgttcaataaaagttgttgaaagattaacaactatacaaaaaga

SEQ ID NO: 602 - DNA, 32697 bp, Homo sapiens
actagaggcagcagccagccagcccagcccttctctggtgcctgccggtgtggtcctctcccagagactggggggccttcatctgccccatgaggaaaagaggagtggaggaccatggaaagggatccagaaaaagaaggaaacaccaagtcccaggggcatgagctggaagggagggctgctcctcccaggggaggctggggactgagagctgtccccaagagtggaaaaggagggagctgggcaagacccagcattgttagtaaccagctctgtggtcttgacttgacctcactgattctcagtctcctcacttggaaaagggcaaaacagccacgtgcaggccgtggtgggcacccgggctgtctgcagatagcttggctcattgttggtcctcagtacgcagccctcgtagccaagcagcttgggcctacactctgggcccaggggagtggctgtcgctggcatcccctggaataacatgctccgggggtcaaagattccttagctggaaaggtctaggaggagactcccgctctgctccctcctgcaccagcgctgtgccccccgccggccaggcagagccatccgatgccgctgggccgcccactgaggatctgctggctgcagcgagtggaaggacctgctcggctggaacgttttttttttttttccctcccaggcgacgtccgatgggtgtgtcgggcaggaggtgatatttgacaggctgcgcgcgggcgagctgccgcggagcacccggcaggggctgacagcatggcctcgcccgacccgcccgccaccagctacgccccgtccgacgtgccctcgggggtcgcgctgttcctcaccatccctttcgccttcttcctgcccgagctggtgagtgcggcacccccgacccgggccacctgcagagagggagggggagaccggcctcggacccagaccggaccgagaagagagagacccagaccggaccgagaagagagaggggcagcaagcacaggggccacctgcagagagggggggggagaccggcctcggacccagaccggaccgcgccgagagagacccagaccggaccgagagcggggagcgagcacaggggctgcggtggctgccagcctcccaccgggcgcacagcggggcgcagctgtactcaagaggcagatgccactcggtgccccgtcttatgccgccaagggggttcctccctccaaaacaaaacccacttgagtgtggaggcctggggggacgtcgctaaaatatccaggcttcccagggagatgttgcacatgaattttaattacgcggcttcttttgtccaactatttgtgcctttctggtttgaagtgaggagactgtgtttccctctgagagtaggtcttccagtgttttcttaattgtcacgtccgctgactttgaactttgacttttgtggggtctcccacaccaggtagctatggcaacatctgccataaaacagtcgtgtgcggcaccctggttgcaaatgagaacctgtcgctgtgttactctctggggcgccctacgactgagtcgtggccctgatccctggggatcctgcctgctcccatctgcagagctgtgcgtatgcagcgttccgcactgcacaagttccctcggaactggctggtaccacatcctcttcacggaggagcacagtcaagcctggggtccaatcaaggcaaaggagtgttttctttttccagcaccttctgaagtatctagcttgtgggtggtattttcttacctgccctgaatttggcagtgctgtccctgagcaggggggaaaagatagaaagtgcatctacttttcagcccttctcattctcgtcttctgcttgcaaagttgggccccctcaagccacttttaggcaaactggcgaacgggttagccattgatggcgaccagaaagagaatcaggcagggtgggcctaggatctgagtggctccagctgaaaccccacctaagaggcaggtttctgccaaggctaccatccccagcacagcgtgggcatcctgccagactgatgacataaccgtgctctgatgagtcctacgtgccaggccctgggtgtgcccctcaccttggagcagctgcatgggtggctggggtactggttgactctgcctctttttattgagcctgtggttcatgtcagtcctgcaagcccctggtgacagggcactgcctcctggtggtttcctgtctgccgggaagagactcatgagcatttcctcccaacaagtggatggtggcctcagcaaggagggaccatctgaactctccaggccaaggaggggtccaggcctgccaccaagagttggacctcaaagaacaggcatttacaggctggggggaaagagagggaaaggcctagaggccaggggagaagtcctggaaggaggctagaggcacggagtttctggaaccaggacagcacccagggtgagaaacatgagaggtcatgttggccgcacctgccctgctcctgccagtgaaactcctggaagagcaaagtgcacgctggtgttgggctctggggccttacgtgttgtggggggtgaggggctcaatgacaatcaaaattcacattggcccaattttcttcatttatttgtactgttaagtaacgtgagatttacagtaaagctgcaataatagtagagaaagttctgtgtactcttccctcagctgctggtaatgcctgcatcttccgtggtacaactcttgaaatcaggaaactaacactgatactgtgctatcaagtactctataaaccttactccagttttgctaattttctcactaatgtcctttttctggtccaggatcccacatggcacttagttgccgtatctccttcatctcctttaatttgggaaaatctgggtccttatcttgacacttctgaagagtactgattaggtttttttctttttttgtgcttttgaaaaatttatttttccataaattattggggtacaggtggtatttggttacattagtaagttctttagtggtgatttgtaagattttggtgcactcatcatccatgtatacactgcactacatttgtagtctttttttttttttttttttttttttgagacagagtctcgctgtcgtccaggctggagtgcagtggcgcgatcttggctcactgcaagctccacctcccgggttcatgccattctcctgcctcagcctcccgagtagctgggactacaggtgcccccaccatgcccagctaattttttttttgtatttttagtagagacggggtttcactgtgttagccaggatggtctaactcctgacctcgtgatccgcctgcctcggcctcccaaagtgctgagattacaggcgtgagccaccgtgcctggcccatatttgtagtcttttatccctcactcctctcccactcttctccccaagtccccaaagtccactgtatcattcttatgcctttgtgtccttatagcttagctcccacatatcagtgagaacatacgatgtttggttttccattcctgagttacttcacttagaatcatagtctccgagctcatccaggtcagtgcgaatgctgttaattcattcctttttgtggctgcatagtattccatcatatatatgtatatatttatatatatacatatatatatatatcacagtttctttatctacccattgattgatgggcatttgagttggttacacaatttcacaattgtgaattgtgctgctataaacatgtgtgtgcaagtatcttttttgaataatgacttcttttcctctggattgatactgagtagtgtgattgctggatcaaatggtagttctacttttagttctttaaggaaactccacactgttttccatagtggatgtactagtttacattcccaccagaagggtagaagtgtttcctgttcaccacatccacaccaacatctattttttttttgattttttgattatggccattcttgcaggagtaaggtggtttcacaatgtggttttaatttccatttccctgatcattagtgatgttgagcattttttcatgtttgttggccatttgtatatcttcttttgagaattgtctattcatgtccttggcccactttttgatgggattgtttgtttttttcttactgatttgtttgacttccttgtagattctgaatattagacctttgtcagatgtacagattgcgaagattttctcccactctgtgggttatctgtttactctgctgtctgttccttttgctgtgcaaaagctctgtagtttaattaggtcccagctatttatctttgctttcattgcatttgctcttgggttcttggtcatgaaatccttgcctaagccaatgtctagaagggttttgccaatgttatcttctagaatttttgtaatttcaggtcttaagtttaagtccttaatccatcttgagttggtttttgtataaggtgagagatgaggatccagtttcaatcccctacatgtgggtagccaattatcccagcaccatttattcaaaaggatgtcctttccccacattatgtttttgtttgctttgtcaaagatcagttggctgtaagtatttgggtttatttctgggttctctattctgttccgttggtctatgtgcctatttttataccagtatcatgctgttttggtgactatggccttatagtatagtttgaaatcaggtagtgtgatgcctccagatttgttctttttgcttagtcttgctttggttatgtgggctcttttttgttccatatgaattttagaatttttttttctaattctgtgaagaatgatggtggtattctgatggggattgcattgaatttgtagattgcttttggcaatatggttattttcacaacattgattctacccatccatgagcatgagatgtgtttccgtttgtttgtgtcatctgtgatttctttcagcagtgttttatagttttccttgtagaggtctttcaactcctttgttatgtatattcctaagtattttattattactattattattttttgcagctatcatgaaaggggttgagctcttgatttgattctctgcttggtcgctgttggtgtatagaaaagctactgatttgtgtacattaatcttgtatccagaaacttttgctgaattcttttatcagttctaggagctttctggaagagtccttagagttttcaagttaaacgatcatatcgtcagcaaacagtgacagtttgacttcctctttactgatttggatgccctttatttctttctcttgtctgattgctctggctaggacttccagtactatggtgaagaggagtggtgagagtgggcatccttgtcttgtttcagttctcagagggaatgctttcaacttttcgccattcagtattacgttggctgtgggtttgtcatagatggcttttattacattaagatatgtcccttgtatgccgattttgctgagagttttgacaataaagcaatgctggattttttcaaatgttttttctgcatctattgaaatgatcatgtgatttttgttttaaattctgtttatgtggtgtatcacatttattgacttgcatatgttaaaccatccttgcatctctggtatgaaactcacttgatcatggtgggttatctttttgatacattgttggattcagttagctagtattttgttaaggattttagcatctatgttcatcaaagacatcagtctgtagttttcttttttggttacgtcctttcctggttttgatattagggtgatgctggcttcatagaatgaattagggagggttccttcattctctatcttgtggaataatgtcaaaaggattggtaccaattcttctttgaatgtctggtagaattctggtgcgaatccatccgttcttggactttttttgttggtaatttttaaattaccatttcaatcttgcagcttgttattgatctgtttagtgtatctaattcttcctgatttaagctaggagggttgtatttttccaggaatttatccttctcctctaggttttctagtttatgtgtgtaaaggtgttcctagcagccttgaatgatcttttgtattttggtggtgtcagttgtaatatctcctgtttcgtttcttagtgaggttatttggattttctctcttctttccttggttaatcttgctaatggtctattaattttatttatcttttcaaagaaacagctttttatttcatttatctttcatgggtttttttggtttcaatttcatttagttctgctctgatcttggttatttcctttcttctgcgggttaggatttggtttgttcttgattctctagttccttgaggtgtgaccttagattttctgtttgtgctctttcagactttttgatgtaggtgtttagggctatgaactttcctcttaacactgcctttgctatataccagaggttttgataagttgtgtcattattgtcattcagtttgaagaatttttaaatttccttcttgattttgtttttgactcaatgctttcagaagcaggttatttaatttccatgtatttgaatggttttgaagattccttttggagttgatttccagttttattctactgtggtctgacagagtgcttgatataatttcaattttcttaaatttatcaagtctcattttatggtctagcatatggtctatcttagagaaagttccatgtgctgttgtatagaatgtgtattctgcagttgttggatgaaatgttctgtcagttgtaatatctcctgtttcatttctgttaagtccgtttgttccaaggtagtttaaatccattgtttcttcattgactttctgtcatgatggcctgtctagtgctgtcagtggagtattgaagtcccccactattattgtgttgctttctatctcatttcttaggtctattagtaattgttttataaatttgggacctccagtgttagcagcatgtatgtttaggattgtgaaatttttctgtcggacaaggccttttaccgttatatactgtccctctttgtctcttttaactgataatgctttaaagtttgttttatctgatataagaatagctacccctgcttgcttttggtgtccatttgcatgaagtacctttttccacccttttactttaagtttatttgagtccttatgtgttaggtgagtctcctgaaggcagcagagggttggtgagttcttatccattctgtggttttgtgtcttttaagtggatcatttaggccatttacattcaatgttagtattggaatgtgaggtaccattgcattcatcatgctctttgttgcctgtctactttggttatgtttttgctttttaatttgtatttttgttttataggtcctttgtgatttatgctttaaagaggttctgttttgatgtgtttccaggatttgtttcaagatttagagcttcttttagcagttgttgtagtggtgttttggtaatggcaaattctctcagcatttgtttgtctgaaaacgactatatccttcctccatatatgatgcttagttttgctagatatgaaattcttggctgataattgttttgtttgaggaggctgaagataggtccgcagtctcttctaggttgtagggtttctgctgagaaatctgctgctaatctgatagcttttcctttatagattacctggtgcttttgtctcacagctcttaagagccttttcttcgtcttaactttggataacctgatgacaatgtgcctaggcaaagatctttttgtgatgaatttcccaggtgttctttgtgcttcttatatttggctgtctaggtctctcacaaggtcaggaaagttttccttgatcattcctccaaatatgttttccaggcttttagaattctcttcttcctcaggtacgccagttattcttaggcttggtcgtttaacataaacccagacttcttggaggctttgctcatattttctttttttttttctttgtctttgttggattgggttaataattcaaagaccttgtctttgagctctgaatttctttcttccacttgttaaattcaattgctgagatttcccagagtatttcacatttctaaaagtgtgtccaaagtttcctgaatttttgactgttttttctttaagctatctatttccatgaatatttctcccttcacttcttgtatcattttttggacttcctttgcattgggcttcacatttttctggtccctccctgattagcttaataactaatctcttgaattctttttcaggtgaatcagggatttcttcttggtttggatccattactggtgaactagtgtgattttggggggtattgaagatccttgtttcgtcatattaccagggctggttttctggttccttctcatttgcataggctctgtcagagtgaaggtctagggctgaaggctgttcagattcttttgtcctacagggtgttcccctgatgtagtattcttccccttttcctatggatgtggcttcctgtgagccaaactgcagtgattgttgtctctcttctggatctagccacccagcgaatttacctggctctgggctggtactctggattgtctgcacagagtactgtcatgtggaatgtctatgggtctctcagccatggatatcagtgcctgttctggtggaggtggcagagggtgcagtggactctgtgagggtctttagctttggtggtttaatggtctatttttgtgctggttggccccctgccaggaggtgacactttccaaaaagcagcagctgtagtagtatggagagggaccagtgttgggtggagccctagaactcccaagattatatgccctttgtcttccaccagagtggatagggaaggaccatcagataggggcagggctaggcatgtatgagctcagactctccttgggtgggtcttgctgttgctgctgtgaggggtaaaggtgagattcccaagttactggagttgtgcacttaggaagattatggctgcttctgctgggtcatgcaggttgtcagggaagtgggggaaagctggcagttacaggcctcacccagctcccacacaaaccaaatggccagtctcactccctctgtgtaccccccagcagccccaagtctgtttctaggtggagggcaagatgggtttgaaaacttgccccaggctatcctcctccccagcttcccccggtggctgcatctttcctaacagtagtacagtatcagagcccagaagctgcccttggtacttgggggctccacttttctcacatgtgtagattcagggaatcaccactgcatcaaggcacaggactgccactcaccacaaagagctccctcgtgctaccctttcagggtgcaccccctaccctgccctccctcaccccctcctgaacaaacccctgaaaaccacaaatttcattcctacaattttgttatttccagaaagttatataaatacatgaaatcacacagtatatgggtctttgaggttggcttcttccactcagcctaatgctcttgagcaccatccaagctgtggcctatgtcaatagctccttccttcttactgctaagtagcgttccgtggtctggctttgccgtcatttgtttaaccatccacctattgagaaacagtttgcctgtttccagttcttggccgttccaaataaagctgctgtgaaaacttgtgtgcaggcttttgtgtgggggtaatgctcagttctccagggaaaatgcccccgtatgattgctgggtggtgtagtaagtgtacgctttattaagaaactgacaaactattttccagagtggctggagaataacttctgtgttttacatccccactagtgattgatgaaactttatcagtaaagttcatgttttatgtagtttactggtgaatttagatttcttatttaaagacaatattaattttgaaacataatctccaagtgcaaaaaaggtttgaatgggtgaattttaagatgagaacagacatccatttattttctctctccttcatgtagcaagtgtgtgtgccttgggggagcctggggtgggtgcggctcacacccgtgccctgctctggagccagctgtctgcgggtgctgggggctgaccatgccattacctgtatgatacgaggtgactcatcagcttttttataagctgaattttataagccgaagggtggaagctgcaagctcacccagggtgactgtgaacaaggaaatgctttatgactatgactccaataaattattttaactgtcaaccttgtcactagttgacttatgagatttttgactagtttaaaacaaacagctaagatttctagaggttcagaaagttaaaagcggagaccatgcaaactctttgtttgatgttagatgttttcctttcagctgcttaactcaccagcacattagtcagagataaatcctctgagcccttagaagttcatcctgagctcttccagttcggcaagttcattgtatgtcttacccaaatggccagtaccaccttcattccaacctgctgctgcttctactctgtttatatggaagagcctgtctgaagctcactgaagccaggggcttcccgggagccccctagggccaactctctgtggactgaaagtgaatgggtggggctgggagaagaaattagggctcctcttaggcctgaccttaaggcaggcatcttccccttccttccaactgtgccttagaagttgagttttccaggaggagaaatcatctcccttgctttcctctgctcccctgtcagttctccatacttccaggagcagcaaagttaactcaatttaccccagtttattttataattttcttttcatgcttcagcctttctgtctctgtccctcccttcactcccctcactgccatgtggcgtcttcctgtccttggtctggctcccacagggcagcacccttctcttctgttctcctgcaggacatgggagccaccaacctctgtgcccgtgggaccatggggtcccgttggaataatggccaaggatgtcccctggaaaacaaggacgggagaacatgaggaaagggaaggccttgggctggggaagagcaagacctcccaggagagaagatgaaaagggccatgggacaggagttggatgtgaacctccccacactgcctgtggccaccttggccccttggccaggcccagcccctactctgggagggcactgtgtattcaggttcagtaaaatagagtcagtcaggatggggcctaaagtctggctctgcttcttcattgctgtgagaccctgggcaggttacttcatcactctcagccgcagtttcatcaacaatggaaagagtaacaataaagagaaacaaggatcctataagacagctgtggggtttgaatgtggacttcataggaaatgtcaggacatggtgagtgagtgctccataatgccagcccatactactttagcattggcggtcattggacctcttactagaaagcgcattgtaagacaagtaacaattgtaagtcaacaagtgtttattgaaacactactgccactctagccccatgctctgctcttaggggcatacaaaaataagacagtcattgaggggataaggtaaggcatgagcctctcttaaaggagtggtgcaactaacacactgaagatgcaacgagcactccaggacaggagacaggtgaaaagcaggggctgcacagccacagctgcccagaggccctgggagccaggtggtgtcaggacaagatgattcaaggaggagcttgacattcttggagggcttggattgatgggtgacgcattttcttgttcagattaggactgcctaggaccaggaagttaacaaatatataaagtcagggtacataaagacttaagtctcccacttaaattccaagtattcattcaagctgagcacctactctctctctgccaagcactggcgatacaaaataaacaagacagacatggcccctgcctatggagcctgatgcgtaatgagggcggtggagaacagccaaggaaatctgtaaaggcgctgtgcctgtcacggtccagtaggaaacagaaaccatgataggtgcttcacacagaggggattcaatacaaggacttgttgacacagtcgttggaaggctcgatgaacagaaaggggtcactgaacaatccagagaataataagtgctcacagtgcctgctgcccaaccccagaatcagggacagaggggcagcgatgctgatgctcaaacctatagatgaagctgtctctgtcttgccagtgctcagaccagtgtgggggtgctgggagacagtggtcaccctaaagaaagggcactgggaccctcatctccagctgctgctgctgattctggagagacaatggcaaggcctggaaaaggcagcaggaagcccccacttctctcctaacatcccagcctccctccaagtcctcccctgccagaacctagcaaggaatcagccaccgagggagcccacaccacacagcagagagatgctgggaaccacctggcctggccccgcatccctggccactccggcccctgtctgaacttccagccctggtctttccctggccgtccagcaggaccatgagcagccgtccctgaaccagtggtctctttcaacttggccaagacaggcaaccaagcacactgtcagaaggccagcccacccggaggggtccacagacttgacggctgctctgaaggagccaccggctgctggcatggagtctaacagagaggccccgggcagtctgacccactggacccagggcgagccctagataaggagccttgccagtagaagtgctggctctctccgccattcccaggagctgtctccctgaagaactttcccctgggcggggcagatctgtgggagtcaggagaggctcctagagtgttgtccagattggcaacactcagggcaaagggccctagtgcggaggagctcgagcaccctgacctttgccccctcatctctttccagcccctcccctgcctcgtccatccctgccagccagcccctagcctcgggccccctttgcctcctgaagagaccagcctgtccctcagtcaccacctggtcaagctcccccatctcagccagaatggatggctgctcaggccccacacaggccccactccattggacagggccagcccttgtaccgcgttccacagcactagctccccatggcaccacttcctgtcccctggccacaaactgtccctagaagataccagcggggtcccagagtacagtctcagtgggatccccatccagaggggccggatatcatgagtctgggactccagagtcttcagacctctttcaaagaagactggattctttgagctttgcttttctacttcagcactattcacagatacccccaccagcctccctccaacactgcccatctggactctttctgccccagtgatgttgggggaggtatggagggggatgtgtatttatttgagcactgtcctttctgacagcacattttttagtagtctgtcctatgtaccagggtggtggggcatctcaggatgacaaggggtgccgatggggtcagggaggaggcagggtggtgggaaaagccttcccagggaatcctgagggacagttgctccctaccctactgtgagaatttctggggcctgggaggtgatggagcaggaaataggtgaggatgaaacaaatacacgtctgtctccatttggttcaggctcctggcaggaatgccggtctgtggctaggccacagtggaaggcccagaaggcggcaggcgatgccacttccatgggcgtctgtcccaggaatctgaggctgtgagcagctagtgagtggtgtgtccagcaaccccctcctcctttctcaagtgagtcagtgacatgtaccaagcacttgctttatgccaggctccatgctgtactccagggacagagacctcagggcacacagtcctgcctccaggagctcagagtttcaacaggaggcagggaagagaaaagagagacaatgacagtggagagtgatcctaggggaggtatgctgggggacttggtagtcaagggtggcttcctggaggaggtgacatggtctggtccctgcctttcagggtctagtcatagatagactggggatcagctggggagagccaagcaggcaatccatcaaccagaactaagtgacccggtgcctaatgaagggcaggttattagtcacaaaatgtctgtgggctcctgaggagaaaggagggtatggggacttcccctgagcctgagtccagggatcatcaggcaacttcttttggggaacatgggcaggaacatgaagttaatcaatgtacagggagagtgagaaagaggacactggggcagggggccagggagagtggggaagcccagccaccgggccgcggtgggagcaggatgccttccccttgctgctttacagcatttctgtgcttttctaaggtacacaggtagtcaaaagggaaaatatgccccccaaatgctgtgtttaattttgtcctcttcctttttttttaagagacaagaaggaaaagggctttagactttggatggaaaagaatgttctcattagtcaattttatgtgacattgcaaatctgtgctgtttggtcagtaaaaagtgaaggcaatcagtctgaatgggcggacgtggtgctgggggaggaggaagcaggaatggggatgcctggccctgactcagggcccctcccagactgcacttcctgccactctggtgcgcccatcccagggaggccgggcgcactgccagccccattcagtgagtgcttatgagtaccaaggacgcctgacttgctcagccaggagcagctgcggacgcgagttcccaccagtgctggatggaagttcctgccaacactgttatccagcgggagatgagacctggccctcactggaggccttaggggcctgggctggcaatttcctgctagccttaaagccacagaaaaagaaaattctccctccatgagtcaggacgcagtgactcagggtttggaagtgtgctaggttgaactgcagagtgtggaactttcatgcaatgctacttgttttcagggtgctcttggggtgctggagacagacctgccacacccctactgggtaactgaggatgcccctctgccttttaaagccagcatcctcctgtattcgaagcacaaaggagataaggatggctgctcaggcttcatgaggctgcagggccagtgacacgggggtgggagctgcctcatgggctataagcagcacccaggtggaccctgggtctctgagccacccacagggagacttgcagtcaggtgagccctgcccaggagcacccagcacagcctggctgggtccctgacctccagctgtggcacttggggtaggagcatgcgtgtggaagaccctagctcggatacagggagttccagccccacagaggtagggcactccagggctcctcccactctccctgacagcgggcctgtcatctcaccacatttcccttcaccttcctcagcggctcccactcccacccagacccccgcatggcccctcaggccctgggatggggctcctgctgcagccgccaggctggggcctgtgctgggctgtggcctacccatgggacagtgctgtgaaggggaggaatggtccaggggtgggcaggaaggaaggcacgctggagcaagggcttccacaaactcatccacaaaaagggagagatttccatcgcaacctggtacactacaggcgggtgtgggtgtgtgtgtaagtgaaacaaaagatccaggaaacagtatttccctttcctgtacacaaaacgctcctaaactttacatcctagtctgcttaagttttttttttttagggtgggggacagagtcttgctctgtcacccaggctggagtacagtggtacaagtatagttcactgcagcctcgaactcccgagcccaaaggatcctccccgcactcagccttccaagtagctaggactacaggtgtgatcacttaattttttgaaacgttttctagagacagtatctcattttgttgcctaggctggcctcaaatgcctagcctcaagcaatcctcccacctcagcttcccaaagtgctgggattacaggtgtgagccattatgccctgttggcttcagttcttaatgctggttgataatccactaaatggagtcacaatccatgaatgagtctcactcatagtttgccagtcccaggactgggggaagtggtggaggcttggggagcccagcataaaggtgagggtgggtgtcctgagtttggcctgggagtcaggtgaggcagtggagtgtttgaagagagggtgaggggtatgggcgacccgcacagacttgaatcccaggggctcctcagcagtgctgtgaaagggctgtcgctggctgggactggccttaacagaagggaaatgcactatctcgtgtcctgcgatctgggtcagcagctcggtcgtgtcatctgggatgcaggctcctttcctctttctcctcctccatttcatagctccaggttcaccactgcacagtaatggccagagcaagaaagggaccattgtgccctgtgcccccttctcaggcaccaggtagactttccctctgtctcgttgaccaggactaagtcaagtatgtatccctagtagggaacgtgatgagcctaatggcatgggcagtgacatccccttactggtgagatcccaggtggggagctcactccacagaaacagtttgtaatgagagaactctctctgcaacaaggtattcgctgcagcatcatttgtaacaggaaaaagctagaacactctacataccctgactagggcctaattgagtaaatgaggttttatcaacttgatggaagataattttgacactgaaaacacagtggaccctcataactcctggattctgtatttgcaaatccacctacttgctaagatgtatttgtaacccccaaattaatacacttggcactttcacagtcattgacatgctcagagcagctaaaaacttgagttgccaggcacgcacacacattcccagctgaggtcaagcaaggtgacgctctgccttcctgtttgagttctcgtgctgtaaggtgtccttttcgagatccccttagcgctccatgttcagaaccaaactcccactcattttgcatgaacagaaccaaactcccaagggatgctatggtggcaggaacatgcgcacaactgtttgacagagctgtgactcttgaggcattttgcatggcaactgcctgatggggtctgaagcacagccctagggtaggccttgtcttgtttttcatttttttttttgagacagggtctttctctgtcacccatgctgaagtgcagtggcacaatcaaggctgtctgcctcccgggctcaagtgatcctcccatctcagccccccgagtagctgagactacaggcatgtgccaccgtgtctggctaatgtttgtatttttttagagacagggttttgccatgttgcccaggctgcttttgaacacttgggctcgagtgatccccaccttggcctcccaaagtgctgggattacaggtgtgagccactgcacccagctgttttttccttttcaggagtgtgcatcaaagagctatttggacactcgtggtcatagcagcattattcacaatagccaaaaggtggaagtaacccaaatgcgtataagcaaatgagtggataaaccaactgtgacacacatatgcaatggaatattattcagccttgaaaaagaaggaaattctgacacatgctacaacacagatgaactttgaggacattatgctaagcgagaagggcagtcacaaaaggacaaatacggcatgattccattcatatcaggtacccagagtagacggaaagtagaatggtggttgccagggactgcggggagggaagagtggggagttgttgtttaatgggtacagagtttcagatctgcaagatggaaagcactctggagatggatggtggtgatgggtgcacaacagtgtgaatgaacatgaatgccactgaactgtacacttaaaaatggttaagatggtggattttgttatatgtatttaaccacaatttttaaaaagagagagaggtatctagtaggcaagagagcctggacttaaacagcatgcactctgcatacgtgaatgcgagggacaatcctttccttcatcctgaaatatcacaatggcagagggagccttcaggacatccaggttcccgccgtgggcaacgcccgcatgtgtcctttgcagagcccattcctgcctggcccgtggtgggaccaggagaccccggctcacctgtgtgctgatgacaagagccgcacccatcttgactggggtctttttctctcagcctgaagttttttaggctttatgaagcctgtggtcacctgagtgccagggaagagaaggagaggcaaagctgtcataaaaattaagagacgcagtaagaaaaggaatttggggttggcagtacgtgaaacctgccatgctgaagcaatgcccagctatgcagaaaaacctgccacagggtacccacccctggcactcctccctccttctcagctccttgtctgccccaccccaaacccacacctcccagccacagcccagagccctggccacacagacctgagaccatgcatctttttgacatatccttcacggttcccagggcatcattactcaggcagcgtctgtctcagaacctcagtgtgtgatcccggcccctgcagcagcccctctcccacccatgaggggcttccagctgctctgtgcaggtgagcagatccactctacccaaaggccatcctccttatctcttcccattcagaattctccgtgagactccagtgcccacgcgactttcttttctttttaaatttacatattatttgtttggggttagtttaaacgtgaacagggtcctacattcaaaactgtctccaagccaagaggttctgcttccccgagaccaaggcactgactggctgattgggtctcattctggaagtattctgttcacccacaacaaatgcacatatacacagacactcgcacatgcattttcttatttttctgcacaaatcctagcacactgggtacactggtctgtgcctttacaaattcttggagtttgttccattttgggatatagaattttctctctctttttttttttttgttttgttttgtttttgaagattgcagagtgtttcactttgcagacataattgatttaactggtcccctctggataaaggggtcatttcctagcttttctgtaatcaacaggctgcaataaacaacttttatatttgtcattttgctcacatgcatcatttgtaggacaaattccatcaagtgaaattactgagttgaacagtatgggcatttaatgttttgatcaatattgccaaaataatagagtcgttgatggcacagttatttaacctggaggtggcaatggacttcaactgggaggttgcagacggacactgggggtctgtgagtccccagattcgtaggcaaaaattgtgtgtgtgtgtgtgtgtgtgtgtgtgtgtgtaggtacatttttcttggtgaccaaagccatcatcaactcataagaagagtctgtgccctctaaatgttatctcacccacccagctgattgatctcccatctctcctttccaaaagtgaatttcccatcctttagagaggcctctcttggacattccctcctctgtatctttctcatggaatgtcccttcctgccctctgtgccgttccaaatggttatggctactacagccaacattcaccatgtgccagcagactcaccaaaccctcacaagggccagatgatagaggggccagtgagacccccacctcttctatttgatagataggcacacagaggcacagacaagctaaatgacctacccaccaggcagagctgggattcaaacccaggaggaaaggcgctgcatggtgcatggactggaggtgagagtagaagcagagagctggcctcaagctttctcagccctggccaccccacctggggaacaacgcagcctcccttacctgttcaagcagactctctggggcaggaccccagaccctggggctttcttgaagtccccaaaggcttctaggagtagcaggacttggagtgccgcccggagggtagtgctcaggtatgcgtatatttgagaagctctttgcccccacaccacgttttttgccggcttctctttcttttaaagcagttttcaaaataataagcatcctccaaaagtgaccaaataagtttttgttttaagtatcattttgaactcatggattttaccttagttgatgcattccaatccatcatagctgtaagaagctcaagcggtcccatctttgggcagcaggagtctgctgagtccttttgactggacctcaggagcctttggaaattttctcactatctggtgtggtaacatccaggctcaacctccctctccaaacctggtatcagccctttcttcctggacaccaatctgggtgtttttaccccagttcttatagtctagttcttttttttttctttttttaaatgatgacgcgattagatttattggttaaaaaaagttcacactacatcgttaaatttaaaatgcaggttataagatggtaatttgacaatatttttttttagttggaaattttattttattatattctagttcttaaccactttctaaacatgaaggagctcttcatgttctagagaagaataggttttaaaaacctattgttaagctccatctttccttaagacgtcctttcaagtttcagttcagcctcttggaaaatttgtatatgactgtgtgtgtttgcttataagaaaaggatctgccaaagttgtgcttgaaatctacttgctctaaatggctcgctgtaatcaaatatttctcaactttgagggccagccccaaccgttgaaaaatatctcccgctctgaggaaatacaaaaataaacattaaaatgggaaagcagtttaggccaccaggaaatttggaaagccaaatatgagctttaagaaaaagtaaaaacaaatactcaaagttttcacaactgtaaggaatccaacctagactacttgagacagaaatgagatcacgaactctactgggtttcaatccacctgcagcccttggctctggtccctcctcctgtttaggaggtagaggggtgtggaaataagaagtgagtgactttcttctgcagaacattgattctgcaacactgaagccattgcaggaaggttcccatgacgtttgagcagattcccaaatgctcagaggcccctggcctgttgtgaaaggtaggacaaggatccctaagctatagctggaacccagagagaggaggccgctgatgggctccctgagactccaggtgtgatgtccccatcaaggcctctaatgccccaggcagaccttggctgggactgtagcaggccaccctctggcatattctaggagcctctacctggccctgcccttggccttgaaacctggtttttagggcaagaaccacaactgtcctacaccatgtctgagtcccaccacgcactgcctgtgtgacctcaggccctaatcccctccggtacagtattacctcatggactgtggcaaagattaaatgtgcaaatgtaagtaacgtgcatatggctgtgtctggccagggaagcttctgatggcaagaggggcaccgggaccccactgcaggcactgactggcaagatggggctgaggttcccttgctgtccccatgcctggcacaggtgagctggcagtaagcagtggaaggtgtcgaatggtagttctctggtctttccaagggagttagaattgttgtgtggtctaaatgaggcagtctgagtgaatgcattttatcaactgtaaagtacctggtgaaccactaataaccagcattgtttgggtgctgttcatatgccagcatcttaatgcacttctcatggcttcttggcaagcgccttaaagctgaggcctggtacctttctgaagcatcagcagcccttgtcactgggattgacactcagcagcacagttgtgggggagccagaggacagcggcttccgttcctcaccaccccctccctaggacaagccggctttgactcattctccggcagtctcagaccagcctaggacttccaaaattcacttggatgttgattgttaaggaggaatttgctaccagaactggtgctttaagaggtggccacgctgctggagttgttttcccaccccataaagctatgattgtgctccttgctgaggagtctctgccttgtggtcaacttcctgttctcttctggcttctcatctcccttttcttttttctccttaaaagactgtgaatattccataaatccaaagacaactgccagacaacagcatgtggaaacctcagaagggaaagggtgacatatctatgtctatgtattggccagttgtaagataagaactgctggtcccagaaagctaaggatatagttcggaaagcagaactgaagttgtatatcttttggctgagctatacagaagggtgtgaaggcagggcacagtggctcttgcctgtaatctcagcactttgggaggccaagctaggaggattgcttgaggccaagggtttaagaccaacctgggcaacacagcaagaccctgtctctacaaaaaataaaataaaaattggccaggtgtggtagtatgtacctgtagtcctagctacttaggaggctgaggtgggaggatcatttgatctcaggagttggaggctgcagtgagccatgattgcacctctgcactccagcctgagtgacagagagagactctctcaagaaaaaaaaaagtgagtgaagttgtttggtctagaaagtttctaatacatcattcagaactgagctacctccacggacatgagcttccaatcaaaattcactaaacataagaggaaacaagtgaacaagaatagaagttaatggaagccacaaactgcagaatcaagctattaaggccaagtgaatggaattttcagatattaaaatgtagaatgaatactaagcaggagtaataaaaagatatccacatctcgacacatggtatcactgtttcacaaactgcagaatgccgaagacagagtgaagactaaatatagccaaataaggaagacagattcctacaaagcaagagttcaactgacagctgacttttcaatggcaacaatggaagccagaatacaacagaatattatggaaaaatatacaacacagtggaaacatatcttggaagtgcggagagaaaataattgtcaggggaaatttaaagacgttttctaataaatcaaacagactactaccctctgaccttcactaaagagactactaaaggttgcactccaggaagaaggaaaattatctcaggaggaaaatctggaatgcaagaatatcttcatgactcaaaatagagaagcatttctttattattattattattattattattattattattatactttaagttttagggtacatgtgcacaatgtgcatgtttgttacatatgtatacatgtgccatgttggtgtgcgtgagaagaatttcttaaacttgataaaaaacatagtcaatagaggaaaagattgacatattcaactgcattaaaattgcgggcttagttaatcaaaggaaaccagaaaatatgtgaatgctagcagaatatatttgcaatgtttatggcagtccatgaaatccacaccattagcaagaattcctatgaatcaataagaaaaagaaaaatcaattttaaaatatttaactgattaaaaaataaaaaactttacagaggaggaaatattaatggctaacaaatatataaaaataagctgtatctcattagtaaacaattacacagtgtcagtgagcaacagggaatgtcccacagcatggtgtgaggttagtggggtgaggggatgtggtccactgaggactccaggccctttttaaagagatagtcactactcatttcagcctactctggcctgagaaatgggtacactgtggccagaaccatggatttctaaagaaatgtcccaaatctggattttccatgtgaaatatcctgttttgaatattgggaacttattcagaattgtttaaaaagtgtatatgccaatactgcttgagccaaaagacacattcacaagctagatttggctgagagtccctctgttcatgacctctgcattaaccccttgaattttctaacaatcggacctgactttaccgtgactcagcggggccagccttccttccccattttcctcttggttccctcctaacttcacctgaacttgtaactagagacagaaaagagacaccctgcaaagggaaacatactccacactagctaatgaagccccttcttttatgcttttatcttccagatatttgggttcttggtctggaccatggtagccgccacccacatagtataccccttgctgcaaggatgggtgatgtatgtctcgctcacctcgtttctcatctccttgatgttcctgttgtcttacttgtttggattttacaaaagatttgaatcctggagagttctggtaagaaccagcagcatggctcttcctgggtggacgttctgggttgggtgaggacaattggcctttctgggcagggagggatcctgggctaggctcctatggaaccaagactttttatcttaccatttttactaccacgctaaaatgaagacatttatctgcaagcgtaaataattcctggtattccccttcactggcttccctgttaggagaatacacaatgacctgtgatcaagcatattctgatgtgtttcccctaaattttcttcctggtaaaatccttggagcaacactgaagaaaaagctagtaggaaaaaaatcactccattctcaaggccctaacacaatccctgcgacagggtatttcttccatatcccacatgaattatatgcaaagtatatatacatatatacgtatatacatatgtatatatgtatatatatgtatatatatactttaattgtactctacaaataattttggatgtagatgctttcatttaatattacatcactaatttttatttatcacgtcatctcaaaaaaccatttaaaactgttccacactgaacaattgaagacatatttaaaagtacagaatattgtattataggccctcatgtagccataacccagattccagcattatcaagaccttaccacatttgtttcatctagcctttgtccccactaaggaattttaaagcaaacaccaaacatcatgccattctattccacacacttcagtatgtttccaaaaaaactccgcaaactttctcacattatcacatgtatacgaagtaaacaattcctcagcatacctaagacagtatacagtggtcccccatctccggaggataagtcccaagacccctaggggatgcctgaatcctcagagagtactgaactccgaatttgctatgcatgcacttcttttttcttcttcacaatttcacagatagacaattcattcttactgtagatcttaacaacctcagcatattttttttctttccttattaagctgaaaacttatactttttaacttaaagaaagcaccctatgacttctctttggcatatccaaattgccagcatcactactcttgcaatttggggccattatgaagtaaaataaggattctttgaatgcaagcactgcagtgccacaacagttgatctgatagcccagatgagtacaaagcgactaacatgggtggcacagacagtgtagacatgctagacaaatgtctgattcacatcccaggtggaacagggcgggacagtgcaagatttcatcattgtactcagaaaggcacacatttaattgttaatttctggaatttttcatttaatatttcagaccaagattgactttgcgtaactgaaatatactgatctttattagtctgccattgcttacgacatagatattacattaaaaacactgtgtattagtctattctcacattgctataaacaaccagagactgggtaaattataaagaaaagaggttgaattgactagttcctcatggttagggaggcctcaggaaacttacaatcatggtggaaggtgaaggctaagcaaggcatgccttgcatggcagcaggagagatgggggagggggaagtgccatacttttaaaccatcagatcccatgagaactcattcactatcatgagaacagcataggggaaactgcccccatgatccaatcacctcccaccaggtccctcccttgatacatgtggattacaataggagatgagatttgggtggggacaaagagccaaaccatatcattataccactggcccctcccaaatctcatccttctcacatttaaaaatacaatcatgccttctcaacagtcccccaaagtttcaacttattccagcattaacccaaaagtttaagtccaaagtctcatctaagacaagagaagtctcttctgcctatgagcctgtaaaatcaaaaagcaagttagttacttccaagacacaataagggtacaggcattgggtaaatgctcccattccaaatgggagaaattggtcaaaacaaaggggctacaggccccatgcaagtcctaaacccagctgggcagccattaaatgtcgacattccaaaatctcctttgacttcatgtctcagattcaagtcaccctgttacaaagggtgggcacccaagaccttgggcagctccacctctgtggctcttcacagtacagcccctgcagctgctttcacaaactggcattgagtgtctgtgctttttcaaggtgaccagtgcaaactgtcagtgaacctaccattctggggtctacaggacagctcttctcacagctgtactagccagtgtcacagtggggactctctgtggggggtctgaccccacatgtcccttctgcactgccctagtagaggttcttcataagggctccacccctgcagcagactctgcctgtacatccagtcatttccatacatcctctgaaatcatggcagaggttcctaaacctcaattcttgccttctgcatgcctgtaggtccaacaccatgtgtaagctgccaaggcttgaggcttacacactctgaagcaatggcccaagctgtaccttggcccccagctgctggagctggggcagccgggttgcagagtgctgtgttccaggactgtgcagagcaacagggccctgagcctggcccacaaaaccatttttccctcctaggtctctgagcctgtgatgggaggggctactgtgaagatctctgaaatgccctggagatatcgtcccctttgtcttggggaccctcattactcatgaaaatttctgcagctgacagcttgaatttctccccagaaaatatgtttttcttttctaacacatgatcaggctgcaaattttccaaacttttatgttctgcttcccttttaaacataagttccaattttggaccatctctttgtgaatgcatatgattgtacactttcaggaaaagtcaggtcacatcttgaatgcttcaatgcttagaaatttcttctgccagataccccaaatcatctcttttaagttcagagtgccacagatctctaggacaggggtaaaatgccaccagtctctttgctaaagcatagcaagagtgacctttattccagttcccaataagttcctcatctccatctgagaccacctcagcctggatttcattgtccatatcaccatcagcattttggtcagaatcattcaacaagtctctagaaagttccaaactttcctacatcttcctgtcttcttctgggtaccccaaactgttccaacctttgcccattatccagttccaaagttgcttccacattttcaggtatctttatagcagtgcctgactcctggtaccaattttctgtattagtctgttctcacactgctgtaaagaactacctgaggctgggtaatttataaggaaaagaggtttaattggctcacagttctgcatggctagggaggtctcaggaatcttacaatcatggtggaaggcgaaggggaagcaaggcacaccttacatggcagcaggagtgagagagggaagtgtcacacttttaaaccatcagatcttatgagaactccctcactatcacgagaacagcatggggaaactgcccccataatccagtcatctcccaccaggtccctcccccaacatgtggggattacaattcgagatgagatttgggcagggacacagagccaaaccaaatcacactgcaaaaaaaaaaaaaaaaggcaggactctagggggctggcctgcctcatttgctcattctttactgctatgtagccagagaggaaaatgttcacctgattgatgtggccatgcgtggctctgctctgcatttccaggacagcctgtaccacgggaccactggcatcctgtacatgagcgctgccgtcctacaagtacatgccacgattgtttctgagaaactgctggacccaagaatttactacattaattcggcagcctcggtgagtgggctggccaaggacagcagtcttgcctggaggatgtttcgtgcaggaggcctaactttgcttgtgctgtatagaccctgagccctcaagtggaaggagccatgggggcaggggatagggatgtgtgtccctgtaaacatgtgcacccacgttcaggggtcctcttttaccttctattgttcccactccagctttcctctctcttagacaccccccacgctgtctgcagaattttctttttccaaaacacaaattggaacagatgtctctctcctactgaaaatccttcaatggcacccactgcctttggaatggggcccgcatccctcggcatggctgaactattgagagatgaagcagggaaggggaaagtggaatgtcgaggtctcaggggaggaggcatcagggaaggccctgtcaagaggacagaaggaggcaggggccaccaggcagttacccctgctaaggtcccaccaggcagttacccctgccaaggaccctctgtgtgctcaagggcagccaggagggtggtgtagctgggacagctggccatggaggattgcaggggccgttgctggtcttgcaagtttaggaagttaaactcacctgatgaggagggaagggaggcagacaggccagaaggcagctgaaatatcttgtggccaccccagagggtcacagtgcactccacagtgggtggcatttacctccatctaacccatgtatgtgctactcatctatcttgctgctatctgcttcttatctctcaaatgtaagctccatgagggcaggaatttttgaatattttcttcactgttatacccacagttgctcttgaaggaaagcaggtccttaaaagatatttgttgactgactgactgaatgaggagcgtgtgagtggacagtggggcagagtggggctgggatgtttggcagggcctgaaaggtattgaaggtgacggccctaccctgagaaaagagcagagccatcatacagcttcaacgtggggcaacgggattgtgttctccccatgagtgagaagtgtcctcacttgtccacttctgcctgccctgcccaaatggtggagcagattcgaggggcagggcaggaagaagtggacaagtgaggccatgaggagtcctgccgagggatgccggtggctgagacaagggaaaaatgaatgtcccaagagctaggcagggaaatcagtagcctttggggtggctttgcatatggctggcaagggaggcaggaggagccaggggccacaggggtcaggctcagggagtggggcgagaggaggaccctggggcccactgggcttgtcaggcttgtgaggaaacgtcaggggctcagtgtgagccaggaagagctggaggatgtctgaacattcacgaggagctgataagcagccgctcagggcagagttctgggccagcgaggggagctgtaggagtgttcagaacacagatttgctggaggtgggcagaggagagcgggcctcgggcaggaggtcagcgtgggatatgggcccagagctgtggtggaggtgagcctgcttcacagccaggtgcagatgaggtggagactgcagtcggggcaggacaccaggacggccccagggaggccctgatggagagtttccagaagagggagttgttggccaggggttgctgccctcaggccacgcaggaggcgaggaggcagggtcatgcgtggcctcctgggcagtggggctgagggtacctgaggggtgggcaggagctggcgctgctgtctctaacagtcactctccacctccttccagttcttcgccttcatcgccacgctgctctacattctccatgccttcagcatctattaccactgatgcacaggcgccaggccaagggggaaatgctctttgaaagctccaattattggtccccaaaagcagcttccaacgtttgccatctggatgacaaacggaagatccactaaaacgtccacgggattaacagaacgtccttgcagactgagcgatgacaccacactttgtttggacatttaaattcactctgctgaataggaggaagcttttctttttcctgggaaaacaactgtctcttggaattatctgaccatgaacttgctcttctagacaactcacatcaaagccctcactccactaatggagaatcctagccccactaatgccaagtctgtttggggattttgcctcagctatgggcttccctagagtaggtctaggggaatactcagtctgatcttttttttgtttgttttattttgttttttttgagacggagtctcgctcttcctccaaggctggagtgcagtgacgcgatctccactcactgcaggctccgcctcccgggttcccgccattctcctgcctcagcctcccgagtagccgggactacaggcgcccaccaccgtgcccggctaatttagttgtatttttagtagagatggggtttcaccgtattagccaggatggtctcgatctcctgacctcgtgatccgcccgcctcggcctcccaaagtgctgggattacaggcgtgagccaccgcgcccggcctgattctcttaaaattgaagaggtgctgccaaggccttcagatctaacgcagatgcatagaccttgttcctggtacttgttcagcctgtgctggggagccgtggtcccgagttccctgggaggctgacagggtcaagccaccctgcccaccaccctcccacttcccctcccctttcctctccagcattaggattcaagggaaatttgcatgaagccaattttgagggtagacgtgtggggaaaataaatcattatacagtaagacctggggcttgaggggtggggaatggggagggaagggcatagcctgctcctccatgagtctgacatctcggaaactgagcagctgccggacgcctgggtcaggaatccaagaccccacctcttaaggactggttcctcagaaagcaccctcagggaaaaaggtgaaaacattacatccgtggattctcctgccacaaccgcattggaagaaaaggctgccgcaacatctcagcgaggagtgaaggacccatgtcccaggaaccgcgctgcgccacctgcactcacccccctcacattctcttaagcacccggtggccctccgaggcctggcggaatggtggtgcccacggggttgggcaagggctcaccaggacctcaacgggcaaagttgtgcacactaaaatatcaaatcaaggtgcttggttttaaagtaaatgtttttctaaagaaagctgtgctcttctgttgacccagacgaatagggcacagccctgtaactgcacgtgccttctgtcattgggaatgaaataaattattacgagaaagggacttgtcctaactggtttgaggccttacagttttgtatctacatttttcccctcctggggtttgcggggacagggacagaactacaggagtcatgggaaagaaaattctggcttcactactgctcactgctcactttctgatcactctgatacttttttttttttttttttttttgcaacctgataccttgaaaagcttctatgtgtctctccttttgttgcctggcagctgtctaggatgatcactgattactatttactaagtagccacatgcaaataaaagttgtttggtaaaaagga

SEQ ID NO: 603 - DNA, 46035 bp, Homo sapiens
gaccaagcattcagcaagccactcttccacctcccttactgcaggaaggcactccgaagacataagtcggtgagacatggctgaagataaaagcaagagagactccatcgagatgagtatgaagggatgccagacaaacaacgggtttgtccataatgaagacattctggagcagaccccggatccaggaagctcaacagacaacctgaagcacagcaccaggggcatccttggctcccaggagcccgacttcaagggcgtccagccctatgcggggatgcccaaggaggtgctgttccagttctctggccaggcccgctaccgcatacctcgggagatcctcttctggctcacagtggcttctgtgctggtgctcatcgcggccaccatagccatcattgccctctctccaaagtgcctagactggtggcaggaggggcccatgtaccagatctacccaaggtctttcaaggacagtaacaaggatgggaacggagatctgaaaggtacatgcccagagatcatttagggtgggtgccaggatgagattggtttatggttcttttgttcttcagaaccaaattatgcctgggttgttcagtaagcacattccattatgactggtcatgccaagttgctccttgtttatgatattcttagaaaatcactcagcagaacccagcagttattttactagctgaagggctatttgctgaaggcctttgagccaaacgagttgtttaatttattgcccactaagtacatacagttgttcagtcatcaattctaacttcttagagcagccttccttctaaaatctatgtcctgtttctggggactttatagttgaatatgtcagggtggcagttgggaattgctttcccagtatacgaagcagctagtttggctgtgtggctgggagtgtattagtgaataaagcataaataatatttttttaaaaatcaagtgatatctgtaaaaagtataggctgagtcttaaagtttaaattctaaaaaaggaagggaagtagaaaaggggtagcagtatgcattcgtcattacttgaattaaggattgtttaaaaccatgtccgtattagtataaaacaagtaaagaattaaccaggggtagtggcgcatgactgtagttgcagctacttgggaggctgaggtgggaggatcgcttgagcccaggagctctcagccagccagcttaggcaacatagggagaccccgtctccaaaaagaaaaaaaaaaaagtgaaaaattattttttaaaagctaagttaatttcttggtgggttatgtgtaaaacatccttacaatatattgctcaaaccagaacatacttcagagtaaaattatgccagatggcaggcatacactgggaacttctgagcaaattggttggtatggtcactctacttcaaggcaacaataggaaacaaataaggaaactaacaaactaatgttttacaatgataattggtttgaagaaaacaaaacaggatgatatgaatgtggaaagtaggaatgggcttaatgtatctttaaaatgctacaaatgaattcttgaaacctgcagctttctttaatcactagtagaaggcttttctttttcacgctcctatcattctctctcttctttttttttttttttttttttgtgatggagtttcactcttgttgcccaggctggagtgcaatggcataatctcagctcactgcaacctccgtcacctgggttcaagcaattctctcggctcagcgttccgagtagcagggattacaggcatgcaccatcatgcctggctaattttgtatttttaatagagacgagggttctccatgttggtcaggctagtctcgaactcctgacctcaggtgatttgcccccccttggcctcccaaaactctgggattacaggcatgagccaccgcatccggctgtatcattctcgttttaaaaatcatcctgcattgtcactcattgaagaagagtgtatctgtccttcatggtgcagctcaaacccattgccttcattactctttctttagcctccctaatcagaccatgggctccccaccccagatcttcggctttggatgtgtttctagcatcctttaatcctgccttgagtgactccctttcccctgactcatgacctatgacctgctgccttttgcacattgagtgcttaggaaaagcaatgctctgactgcatagacctaaagccctaaatccagagatatgtttaccacttcctggccctgccttcttaataatctccttctggataggtccaacattcctgtaaacatggtggtttctaatcagctctgatgtttgtcatttccaatacctgttcttggaggaatgttttacttcctgcaatccataggcatttgtctttgaggttgaagggatttcattgttgttattatgaagatcccattccagctttgagtctggttttggtgattgccctctctccttctaaaatgtggggtgggatcccttgtttactttctccagccactttgttttcatcctcatgttcctttgtgcctcatcataagatatattttgttgctgtgctggcttagatcaaaaccctcttgctgcctgttgataccgtgtgagatcttgcagctacccatatgggggaactggggtacagagacagaaataagcagcctgtcaggccaggcgtggtggctcacgcctgtaatcccagcactttgggaggccgaggcaggtggatcacgaggtcaggagattgagaccatcctggctaacacggtgaaaccccgtctctactaaaaaaatacaaaaaaaatcagctgggcgtggtggcgggtgcctgtattcccagctatttgggtggctgaggcaggagaatggcgtgaacccaggaggcggaggttgcagtgagctaagatcgcaccactgcactccagcctgggcgacagagcgagactccatctcaaaaataaataaataaataaataaataaaataaaataaaataaataagcagtgtgttataggggaaaagcccagatcccaggtgtcgaatgactctgtgctttggaattagtgaccttcagcctgcggtgtggcctctgacagtctaattctaggaagtcacatcaggattacacagaaagttactggagattgaattctagactcaagttgctgaatatgcatttgggactctgaactagaaggagaaaacacattatctgctcattatcctacaaagttctaaatacaaagtttcatttccacatgtcttctcagccaagcctagaattctcttctgtataaattcctgggttcctatataagtgaacaagggaaatagtccaaatttagcaagttcaaaggcagtctgagagtggaaacaaagactcctcaaatattggcacaaacttaccttctgtgttgaggttgcactccttctcagaccccgtgcactgacaacatttatcacctttttaaattaattgatgcatttacttatttatttatatttattatttttttttttttgagatggagtctcactctgtcacctaggctggagtgcagtggcacaatctcacctcactacaacctccgcctcccaggttcaagcaattctcctgcctcagcctcccgagtagctgggattacaggaatgcaccatcgtccccagctaatttttgtattttttagtagaaatggggtttcaccatgttggccaggctggtcttgacctcctgacctcaagtgatccacctgtctcagcctccctaagtgttgggattacaggcgtaagccactgtgtcctgccttctcacccttttttagacatgccctgtctattcttgctccctcctttcctttgctgtgcctggaagcccttcactctgatcccctttgcccacaccatcctggaccttctctgtccttaccctcaggggtcatcagcttcctctgcccctgggggtcaagggccaatgccctgatgcccttaaagcactttctgcagctcttccttagctcttcagtctgatcatcatcccacccctgcctgcagacacttccgagaccaacaccgcccaaaagaaatacaatgggagccacataagaaattgtaaattttgtagtagccacattaaaaaaaggaaaaaagaagcaggtgaaattaattttcatatgttctgtttaatccaatgtatcatttcaacacataatcagtataaaaatatatacatattgttatttttttttgtattttaagacggggttttatcatgttacccagactggtctcgaacacctgagcccaaacaatctgcccaccatggcctcccaaagtgctgggattacaggcacgtgccaccatgcccggcccagtataaaaatattaatgagatttttacattctttctttttgtacagggtcttcaaaatccaatacatgttgttcccttacagcacatctcaattccaaccagccaccctgcaagtgctcagtagccacatgtggctcttagacagaacagtgcagtgtagaccacatgaccgacaggggccatgcgttactctgctctgttccttgacacttagcccagcagctggcatagattagctgctcaaaaaccatgtgtagaataaatgaacaataccacagtcttggttttaaatataaaatatgagtaagtcacagagattttttttaatgctatgttaaatgtcatcgattactgatagatgactaatttgattttctctttcttttttttttgagaaagggtcttgctctgtcgcccaggctagagtacagtggtgtgatcttgagtcattgtagcctccgattcccaggttcaagagattctcctgcctcagcctcccaggtagctgggatcataggcatgtggtactgtacccagctaatttttgtatttttaatagagacggggttttgtcatgttggccaggatggtctcgagctcttgaccttaggtatcctcccaccttggcctcccaaagtgctgggattacaggcgtgaaccactacacccgacctaatttgatattttttgtagagctagatcttcctatttgaattatactcaaattcaacaaaattctaagtatttttgccttcatgtaaatatttctatcttaggcatatttgttatattttttgtcctttaactaaaacaaagtagggtttattcatgactttgacttttttcttcaggtattcaagataaactggactacatcacagctttaaatataaaaactgtttggattacttcattttataaatcgtcccttaaagatttcagatatggtgttgaagatttccgggaagttgatcccatttttggaacgatggaagattttgagaatctggttgcagccatacatgataaaggtaagttgaatggaaagtgggcaagatggggatgaggtttgagagaagcactttttcaaatgtttacttaaagcatttcttctccttaactgtcatatactatttctttccctccctccctcccttccttctttctttccttcccgctttctctttcttcctttccttcccttcccttctgtttccttttttcctttctcctttcctttttccttccctatctcctttcttcccctcccctcccctcccctctcctttccctgcttttttttttttttttccaggcagggtcttgctctgtctcccaggctggagtgcagtggtgcaatcatggctcacttcagcctccacctcctgggctcaagcaatcctcctaccttagcctcccagtgtattggggttacaggcgttagccattactgtgcctggcctgtcatatgttattctaatacaatctttccctagcatttgaaatgtcttttactcattaggtttaaaattaatcatcgatttcataccaaaccacacgagtgataaacatatttggtttcaattgagtcggacacggacaggaaaatatactgattattatatctggcatgactgtacccatgaaaatggcaaaaccattccacccaacaactgggtaagtatcaacctgtctgacttacaaaggggtaaaaggcagatatgtagtgattgaactgatttagtaaaacccttttgagggaaaaatgaatgaatatagtttatcggaagggggcaagtttctgaaagaaatagaaataaggtttccagttgttatttactcaggcttccaattattatttagatttctgatttcatcatagagatgatgtgttctagcaaattcaaacctattttctctccttccacccttccttcacttcctacccggtccaacttggattccatgtcccattagtttgataaccatttttctactatccatacccctttgcatttttttttcttgagatgtagttttgctcttgtctcccaggctggagtgcaatagcacaatctcagctcactgcaaactccacctgggttcaagcaattctcttgcctcagccttaccagtagctatgattacaggcgcgcgtcatcatactcggctaatttttgtatttttagtagaggtagggtttcaccatgttggccactctggtcttgaactcctgacctcaggtgatccacctgcctcggcctcccaaagcgctgggattacaggtgtaagccaccgctcctggccccctttgcctttctgactttttgtctcctctgtctgacaaaaccctagccatgaatgaacccaattatctattttctttttgcctaaaccttagtagttgagtctctggagacatcacaccttcattgtccccacctgaactgagccatccactcttcttgggaattttgctaatttcaaccgatcaactttccctccctccctcatttcaaacatcgtatctgcctctaccccatcttatcactctcagcagcaaactcgacttcacagagaaaacagaagccatcaagcctgcctgccccattcccaccctcttcctactcactccttttacaacagaagccagatccctcctttctggggtgaccagatttagcaaataaaaattcagaatgcccagttaaatctgaattttggacaagcagtgcataaaaaattttttagtgtggaccatactttcttttttatttttatttttcagagacagggtcttgctctttctcccaggctggagtgcagtggcttgatcatggcttactgcagtggcttgatcatggctcaccgcagtctttgcctcctgggctcaagcaatcctcccagctattcctcccaagtagctgggaccacaaatgtgtgccaccatgcccagctaatattttatttttttgtaaagacagggcctcactctgttgtccaggctggtcttgaactcctgggctcaagtgatcctcccgcttcggccttgcaaagtgctgggattacaggtgtaagccactgtgcccggccacatgagtaatacttatactcaacaatatgcgtgttgatctgaattcagatgtaactgggcatcctgcacttcatctggcagttctgcttctgtctcaggccagagcttccccttgcccgggtttgtgttctctcctgcctttattctggatcatccctccctcctccagtccctccttctctcttctggaccttctccataaatatttaaacatcaacttttaggtgatccaaggacactcagaattgatatatttgcaggtcaactttgtgatgtgtgattttctccctataaccttccgtctcccaggttcagtgaatggtactaccatgcagcctgaggaacaggctgtcagcaagtcctggcagtttcacctctttttttcctccagttcactgacttgttaaaattgcaatgacattagcaaacatttacaaaatacttactctgtgccaggctctgtgctaagtgttttatattcattaatttagttaatccactctataatcctatgagtctggtgtaattcctgttttgcagataggcagactgaggttactcagctaataaatgacagggctaaagatgggatctagtcatttcagctccatagtctgcttttaaaaattgctgccatactcaaactatatcatttcttgcttatagaatgatcacagctgccttgtgatccagtttttccattgcttttttagttctccactatagtcaaggttgcattttctaatgtaatagttaatatgttcaaaaatatgtatatgtatatgatggataaacaccttgtagtatatcatatatataaccatatattgcaagacttcgactctaaaaaaattattttttagtttcctctattttgaactttatgaaaagtgtcatgctaggtatagtcttcttaactaactttttcatgatttattcatgtaacttcaggtagctatggttcatacattttcattgttgtatatttcacagtgtgaacaatccatggtttacttatccactcttcagttgatgggaagttgggctacttccgttttttttattatgaacaatgttactataaacactgtcattaatctatcttggggtacatgtgcaagggcttcttttttttatttttgagatggtcttgctctgtcgcccaggctggactgcagtggcgtgatcttggctcactgcaacctctgcctcctcagttcaagcgattctcctgcctcagcctctcaagtagctggaactacaggcacccatcaccatgcccacctaatttttgtatctttagtagagacagggtttcaccatattggccaggctggtcttgaactcctgaccttgtgatctgcccacgtcggcttcccagagtgctaggattacaggcgtgagccaccacgcccaaccaagggcttcttttaggtaaataactaggagtaaaattgctgtgcaggatatcgcatgctcagctctacaggatagtgtcaaattcattatcaaaatggttgtaccaatttatatcccccacagaagtataaaaaatacacattctcattaattcctgatattgcccaactttgtaatttttatttaaaaattattattattttgtgtcagggtctcattctgtcacccaggctgaagcatagtggctcaatcatagcttactgcagtctcgagctcctaggctcaagcaatcctcgccacctcagcctccttagtagctgggaccacaggcacacaccatcatgtgtggctgagtttttttatttttttgtaaatatgggctctcactatgttgcccaagctggtcttgaacttctggcctcaagcagtcctcccgcttcagctctcaaagtgctgtgattactggcatgagctaccatgcccagcccagacttaaaacaatattgccttgagatcttaattttatatttatttaattactaatgatgatgtgtctaattcctaatacagtaattatctaattcctaatgatgttgaacatcttttcttacatttattcatttaagtgtccatttctgtgaaacacctctttatggtttctttcccctactttcttttgaattatttatccctttgaaattgctttcttcagttccttttgtattctggatactgattttttattgtttatgtacactaaaaatctcttgccctggttgtgtccaggtgggctgtgtgttgaattggaaagggtgcatgtccttgaaaggcagcagctactactcagcatctgcctgtgttgccatggacatgtggactcagtgtaactacgtcttccaactcaaaaagatttatgtaaaatctcccagttgttaaatgttttccagatgttctctttaacatgaaatggacaaaaggcctaggacagagccccatgaaactctcacattcaagggcccacagcgttgacttaaggagtggccagagatgtgggagggcagccgggagagtcataccatggggccataaatgtgagcatttccagacagaggagaccagcgacatcgtcaactattgctgagtaccaacacttgaagttgctttttattcttggagactggtagagattttaagtgaaggattctaataattttctggggatataatttaaatattcagtctatctgggctcaagctccaagatgagcggaatgtttctttcttccaaattgactaccattttgcttctcttcacaaacaagagtttggatcctggacagaagattcaagaaaatacattagtaatgtcagttccttaagttgaccttgtcttgggtttgagaacattggtttgctgttgcagttgttacaaacagcatctactgtaaaaatacgttgcaaccatgtttgtgaggcattaggccaatggggtggggggtatttggaaggggtttctttaacctgctgctctctgtagaaggaaaactctcaggatttacatactctgcctgcaaaggatcagggagggcaatgatctttatttgtgggcaataccattataggtcactgatgtgctgttttctttgtttgccagttaagtgtgtatggaaactccagttggcactttgacgaagtgcgaaaccaatgttattttcatcagtttatgaaagagcaacctgatttaaatttccgcaatcctgatgttcaagaagaaataaaagtgagtatagatacccacacagacttctccattaatggaggtttaggtatttatttaaaacactttatattgcacagtaattgtgtaggcaaaatcaagtctttaattatttgaaatactctatagttatttgaaacactttatattgcacaataattgtgtaggcaataatcaagcctgaattaaatcccaggattaagctctctggtgcaaatgtagactctcagacatgtctgtgactccttccttcatctaactcagagtaccctaaatggaaggagtcagaaacacctgccaccctagctccaagttgccccgccacctgtgacagtgagctgtacggtgcctgtgacggtgagctgtgcggtgcctgtgacggtgagctgtgcggtgcctgtgacggtgagctgtgcggtgcctgtgacggtgagctgtgcggtgtctgtgacggtgagctgtgcggtgtctgtgactgagctgtgcactgtctgtgacggtgagctgtgcggtgtctgtgacggtgagctgtgcggtgcctgtgactgagctgtgcggtgtctgtgactgagctgtgcagtgcctgtgactgagctgtgcggtgtctgtgacggtgagctgtgcggtgcctgtgacggtgagctgtgcggtgcctgtgacggtgagctgtgcggtgcctgtgatggtgagctgtgcggtgtctgtgacagtgagctgctgcagggaggtgggtcatttggggtctggctcctgcatctaaaatgggcttcttgatggttatttggctttcatgtcttagctgtctcatctatgaaacacagttggtggcaatatttgtctcatagggctgtttggaagattagatgagataacacatgcacgacacttctgtactcattgagtaaatattaacatattgcctactccgtgccaggccctgttctaagcactgggaatgcagcagtgaataaaagaagccttaccctcaaggagtctccaatatactgaggggaaagcaggcaattagccactaaatatatatatgttaggtggtggtgaatgccaaggggaaggggcatcggagtgtcaggtagaagtggctcttctatataaagtgtgtaggagacaccttcttatgatgagatgctgtttggacaaaaacctgaagtgagaaaggaaccatgtgactatctgggggaagagaatttcgggcagaaagaagaacaaatggaaaggtcccgaggtgagagtgtggttcatgtgtttcagggatggcatggaggccagagtgtagggttgccaaacttagcaaagaaaaatacaggatgtccagttaaattttaaatgaatgatgcaacatttgagacatactgctaccaaaaaattgttcattgattacctgaaattgaaatgtaattgagtgtcttgtattttatctggcaaccctaccagtatgctggagtgaaatgggttagggcgctgaagtaagaggtgggggctgatcatttctcacaatacaattcacaaaacatatcagctatgttcttgttcttgttcttgctgctcctatggctacagtgggcagaaacttaggggagtaggggagtcctctgagccaagtaggtgggaaggagaccctaacagaacggggagcattgggtgcctttccacagctcaccacgtcagccagatagagtggatgcaagctgtcatgctggagtcactaggggcacctagaacccttggtttagtttaattttgaaataacagtttaattgacatataattcacataccataaaattcaccccttttgagtgtgtaattcagtggttttagtatcttcacagagtttcacaatcactactaatttctgaactttttttttttttttgagacagtcttgctctgtcgcccaggctggagtgtagtggcatgatcttggctcactgcaacttgtgcctcccaggttcaagcgattctcctgcctcagcctccgagtagctgggactacaggcatgtaccaccatgcccggctaatttttgtatttttgtagagacagggttttgccatgttggccaggctggtctcaaactcctggcctcaaatgatccacccgtctcagcttcccaaaatgctgggattacaggtatgagccactgcacctggcctaatttcagaacacttttatcttctcaaaaagaaaccccatatccatcaacagtcactccttatggccccctccctttcttcccccaccccctgggaaaccacaaatctactttctatctttttacccacctaagcctcagttagataggttttgcctattctggacactttgtacaacagaatcatgctgtatctgtatatccctggtaggtgtctgtatctgtgtttatttgagaaactgccaagttgtttttcaaagcagctgcataattttacatttccattaacaatgggtaagcgttctaatttctccacattctcaccaacacttgttattgcatatattttttattacagtcaccctagtgggtatgaagtggcatctcactggttgtatttgccaaatggctaaagacgttgaacatctttttatgtgcttatagttcatttgtatatctgcattgtagaaatgtctatttaaatcctttgcccatttttatttcatttttatttatttattttttttgagatagagtttcactctgtcacccaggctggagtgcagtggtgcagtctcggctcactgcaaccccagtctcccaggctcaagtgattcttgcgcctcagcttcctgagtacctgggactataggcacgtgccaccatgcccaactaatttttgtattttttgtagagatggggtttctccatgttggccaggctggtctcgagctcctggtctcaagcaatcctccctccttggcctcccacagtgctgggattacaggtgtgagccaccgcacctggccctttgcccattgttaaacagggttgtctttttattattgggttgtaaaagttcttacatattctttttctttttctttttttctttttttttttgagacagggtctcactctgttacccaggctggagtgcagtggcgtgatctcggctcactgcaacctccacctcctgggttcaagtgactctcctacctcagccacccaagtagctgagattacaggtgcgcatcaccatacctggcaaatttttgtatttttagtagagacggggtttcaccatgttggccaggctggtctcgaactcgtggtctcaagcaatcctcctgcctcagcctcccaaagtgctgggattataggcatgagccaccacacctggcctcttttcatattcttgatacatgatttacaaataatttttcctattctgttggttgtctttttactttcttgatggtgccttttgaagcacaagcgtttttaattttgatgatgtcctatttatttatttgttttttgagacagagttatgctcttgttacccaggctggggtgcagtggcgcaatctcagctcactgcaacctccgcctcctgggttcaagtgattttcctgctgcagcctcctgagtagctgggattataggtgcgcaccaccatgcccagctaattttttgtatttttagtagagacgcgttttatcatgttggctaggctggtctcgaactcctgacctcaggtgatccacccgcctcggcctcccaaagtgcagggattacaggcatgagccactgcgcctggcccaatttatttatttttttcttttgttgcttgtgcctttagtgtcgtatctaagaaccattgcttaatccaaggtcatgaagatttactcctatgttttcttctcagtttcacagttttagtcttacattttagattgtctgtgatccattttttgttaatttttatatagggtgtgaaggtaagctgtccgactttttttttttttttttgcatgtggctattcagttattccaatcacgtatgtttaaaaatactattctttccctactgaattgtctggcaacttttgttgaaaatcaattgaccataaatgcatgggtttatttctggactctcagttctgttccattcatctatatgtctgtccttatgtcagtaccacacactgtctgaattactagcgctttgtagtaagttttgaaatcgggaagtgagaatcctacaactttgttctttttcagtattgtttcactattccaagtcctttggatttccatgtgaatttctgagtcagcttgacaatgtttgcaaagaagcctgctgtggttttgatagggattgcattgaatctgtggttcactctggggaacatagccatcttatgttaagtcttccaattcatgaacatgagatgtctttccatttatttacgtgttctttcatttctttcaacaatgttttgcagttctcagagtacatgtcttgtacttctttcgttaaatgtattcctatagactacttatttttaagactttttttttttttactgtatatgtttggtgtttccagaatttgtatgaattgttttggaattggttctggaagtaagcaccatgagtgagggcaccttgcctccatggggttgtggggttgtggggttgtggggtgggtagttgtagacatggtcagcagactaactaggggttagttttaaacttctctggtagcctgtggactctcctcttcttcatcaccaaaactccttatcacccacgcctcatgctctccccacacattctatgtgctaagtgctgttcctggataatttaatgctcagaataagcctaatttacgaggttttgtgatcattttacagagaaggaaattgaggcttagataggtaaagtcaccatccttgggagtcatggagcaggactgaaatccagacactcggacttgagttcatgctcttaaccacaatcctacacctgctttgaggcaatgtatgtgtttccctctccatgcttcactttttctgcacagatttgtcaaggaggttttcagttataaattgataaatgtgagtataaaccagctggtttacagttggtttatcaggcagtagatttttccaggctccttgtggcaatagtgatgaattgtctggggatgtttagacaagtgtgataaattctgcaaaaatgtgccagccaatacattaattatttttttgactaacccagctgtgctcttccagatacccaagccgtggagtgtgtggacaggatccttatttactggtcttctggctgaaatccctcatgtgatgaatcattaatgcctccggttgagagattagactttatttgcaagactggtttagaagatttactattagaagtaaataagaaatgctgagaagctgagaggaaagcctctttgctcctggaaagggacctttggcatgaaggagacttctgtcaccctcctccccaccttacccccagcagcgcttgtttctgcaatagagttaagcaggttaataatttgcagctcagagggtttgtgtggaggcggcgtttggaatgacttgcttgcataccaacttgtactcctggagcctgagcccacttcctccccgctcctatcagattttgctttatctgcacagtgggaagctggcatgctggggaaatccagcagagagcaccctctgctgtccttctctttctcctcctctttgtactggccatcaggggacttggctctgctctgaacctcttggggcttgagtgctttcagctgaagaagtcagaaaaccttctctgaggtatcaggggtatatatttgtataatactttatactttcccaatcactttggtttttactggtcctccacatttcttatttgacaaatgaggaaactgagacacagagaggtgaagtaacccagcgggttagcagcatggcaaggaagagactccagatggcctggcctcgtatctggggtttggagtgatcctacacctgccatatgggaatgctgagccccagggtagggactgctggggagacccagctgagagggaacccagagcacaggcgtaggctccgttctgtccctactaagcatgatactgctggaggcagcagctcaattcaaaacacaattcgctcactacctgcttgattagccatctctatgcttgataataataattgtgccatttattgcacctcctctatgccaggcactttattataatcattcactcatttaatgataggtattgtgtgtcttgaccatgtgctaagggtgtgggggctggtaagatagatacctcttgtggccatcctggggcttatattctggggtgggaggtggacaattaaacaggcgattacaataaaatgtgccaagcggtcatgacagtaggaggtaggaatacacagggcaagcgcctaacctggacacatttgcagaggaggtgagatacctgaggaacaggcatgagctaagtgaagaggcatgggtgggagtgtttccagcagaggaaagcgtggatcgtgacacattagaggtgctgggagttgtccagtatcactgggatgtgatatatagagcagggagtgacccgatgagactagagaggtcactgggggtgaggtcaggagcaccactgaaggccctggtaaggatttgggcttaaaaggtcttaggtatttattttttatttttattttttttcaatttgagaaatcagtctggttttggagaaggggtttgagtagggcaggtttggaggctttggggccagggaggaggatggtgcagtaatcgggaaagaaattctggtggctttaggccagtgatggaggcatagaggtgcagagaaatcatcagggctctgagaggagtcccctgtgaatcccaggtttcagatttgaatatggggtgggtggcagaaccattgtctgagatgggagacacaggaagagagagggaaatatcttaggtatgtagagttggagctgcctgtgacacatccaagtgttcagtggacagttagatataaggacactgggctgggcacagtggcttatgcctgtaatcccagcactttgggaggctgaggcaggtggatcacatggtcaggagttcaagaccagcctggccaacatggtgaaaccccatctctcctaaaaatacaaaaattagccaggcatggtggtgggcacctgtaatcccaactacttgggacgctgaggcaggagaattgcttgagcccatgaggcagaggttgcagtgagccgagatcatgccactgcactccagcctgggcaacagagcaagacaccgttttaggggggaaaaaaaaaagatataaggacacggagctcagggaaaagtctagtctagagataaaactttgggacttgttgatgtggctgatgtctacagagctcaggcaggtgtttggtgagagaagcaggctgggtaaggtgagcaagagggccaactgcaacgtagctggagcgaattgctcacatgtgaatgagggcctggtgttggtagaccttccaattaaaagaaaaatccaagggagccaggctagcaaataagtcagggcgccgtacagttgcaattctgctgccaccacttaccaaccatgaccttgtcaaaggcacatcatcttcctgagccacagtttcctcactggtaaagggggaacaataatggtacgtacctaatggggttacttgaagattaaatggtttaacctttgtaaagcacttaggatgctattttttttactgtatacagtacttgttaaatagtcagtaaattggtaagtaaataaatactattgtgaagtgcaatgtcgagagggtgtaagatggagccccaaggagcactgacatcaaagagctgcagaagagacagagaagggagacaaaccaaggggcagggtataacggagctaaggtatctgagtgtttccagaagacgagattggtcaacagtgtcaaatgatgcagagagattgggtaatataaagactgaaaggggtctgggcgtggtggctcatgcctgtaatctcagcactttgggaggctgaggtgggtggatcacttgaggtcaggagttcgagatgagcctggtcaacatggtgaaactccatctctactaaaaatacaaaaattagccagatgtggtgacgggcacctgtaatcccagctactcaggaggctgaggcaggagaattgcttgaacccgggaggcaaaggttgcagagctgagatcacaccactgtacgccagcctgggtgacagagtgagactccatctcaaaaaaaaaaaaaaaaaattgaaaagtcaattgactctggcagcaataccttatttactccatacagaaaccctccatactatgttattgatggagacactgaggcttagctggtcttgcagatgccctatgtcatgcagctggacagcgagagagctgggttgtacccagagggtcaaattctgaagtccttgatctttcctctacttcctgcttctggaggagttagcaaagaatttttccaagatttctgaacatgagtagggtcagttttctttctcttgcctctaagtagagaaccagtttcctctgtactctgaaacatcctttctcattccttcttgagatggacaacctgtgatttatgacattttcaagatgatgtcttctgtttgtttttttggtttgtttttgttttcttaatagagacagggtctcactttgttgcccaggctggtcttgaactcctgagcttaagtgatcctcccacctcggtctctgaaagtgctaggattacaggcatgagccaccacacctggcttaagaggatgtcttctctatcatcccatgtaagagtagacagagcttttcccaaacatgggtttttaggtaaacgggcccccaaatgtcagccatctgaaaaggaaaggcttggctcaaggttccatgtatttggatatgttaacttgcttccttaatgttgacttgctttcttttcactcagagcagcgagctatttaaagagaaaggagttaaaaggtgcccagtggaaaaaccaggagtgcgtgatgtcatgggagtcagacaggagtcaaggacgtagtgtatagtccagttcccagagtccacggcacctacatgggtcactagacctagctgacccaggctctgtgcccatttttgcatctggaaccctgagagaccttcatgggagtaaagagggttaacaattaaaatctgaagctctcttttccctcctggttgagagaataaatagcatgaagcaaatatttttcaagagcaaactttggattatcttggtgataatctgaattatcagcatttaaaatgactttcagaaaatgtccatcaagcttttactgttttgtctcattaaacaatgatattatttctgattatgctagggccataaaccttctgtgcggtacaagtttctcatgtttaatgtcaggtcaacatttcacaatgctgagatccggactccgtaaagaaaaggactggctttattttaggaaatcagtgcccaaaagcttgatgtttacacagaatggtgcttaatgttttcccacatttttgtcagaggccgcttggatgccttcagttattcgtgctctgccccaaccaatgttcacacttttaaagaacagcaccacctgggtgtggacccaggttgcgcggggtctgaagctgatagtaaattagggccttcttaaaatagagcacaaaattaagtacagaaaagttggtatttacttaaaatgagcaaagaaggggagttagatgagtgcaagtgagaggtcttgaagcttaagtttggttagcttcatagtaaggtcactcctgaagccactgaaaacctgttctagaaatgaggtgcctttctttgccccaccagacttctctagcccattctctgatgaatggctgtcacttcctgtttgccagctgcaaaccctccccagggtgaattgctgttttaccctcttgtattaccatgtttctctcctttgtctcagctgtgatttaaatatttttgtgttgctatttgtctagctggagattctaaaataatccgggagacctaggactgtgtctgttgtatttttcttgtggttgtagttccagggcttgcctaagtgcctggtatacactaggagttcaaatacttattgaatgaatgaatttggtaaaagataaaggcactagtaagaacaaatttgttttttatgccccagagaaaaattccactgggtagagattactggaggttatttgggtcacctgtgcccatgataagagttattcaccccagaacttgctcttaggcataaaaaattgattcaagcttcaccattcaaaatctcagcttaaagtgaattgacaggagcagtattaacccttgcatttagctgttgagacccttgacttgacttgaaacctccatattcacgtgcagatagaaacgcacttcaagtcaaacaagttgatatggtttggctgtgtcctcaccccagtctcatcttgaattgtaattctcataatccccatgtgttgtggggtggagcaggtggagataattgaatcatgggtgtggtttcctccatcctgttctcgtgatagtgagttctgatggttttataagtgggagttcttctgcacaaactctctcgcctgctgtcatgtaagatgtgactttgctcctcattcgccttctgccatgattgtgaggcctccccagccctgtgaaactgtgagtcaattaaacagctttacaaattacccagtcttagatatgtctctattagcagcatgagaacaaactctaatacacaagtgaactgtgggatagttgtcatttgggatctgtggctctgtttccctccataggtgaaaattggctgtttagtactttacagatggttctgctctaaaatgatatatacattcctgtgaaaccttccatacagcaagggatgagaaaagtagggagagccactgttcctttgcagagcttgtgagcaggtgccggagccggagcaggccttgctgggagaggctggctgtggggttgaggcaggtagctgaggctcaggacctctgcttttcacggtcacctggtcctcccacctgtcccagtacaggccagcctctgcctccacacttggctcatgttgtcccattcccaccctccattgaaatcccaccaggtcatctaggtcaagttcaagctctagctcttccttctcctgctgtgcccacccacatattttgaaatgtcttgaagctcttgcagccctgtaggcagaggtgtctcctctcatgaggacctgcattattaggtaaccatcccttgtcccacatgtccccaactgttctgtagacctgaagccagggaacatgctgtacttctgtaatgtttggtcattcaggctcaatatgtcattctttcatgctacaatttgttcactaagtaccaggtgctgtttcagaggcctacagacatgtaccaccacacgcagctaatttttcattttttgtagagacagggttttgtcatgttgcccggctggtctagaactcctgggctcaagcgatcctcccacctcagcctcctaaattgctgagattacaggtgtgagccgtcacacctggctagaaaaatcttttcaaggttcatccatgtcgtagcatgtgtcagcacattgttcctttccatggccaaatattcatcgtatggatagaccattgggttgtttccactttctggctattatgaataatgctgctatgaatatttgtgaacaagtttttgcgtggacataagttttcatttctctcgggtatatacctatgcgtgaaattgctgggtcttatggtaacttgatgtttaaccttttgaggaaatgccatactatacagttgattcttcatacatcagatctttaaaaaaaatgttaagtcagcccacagccttttctgattaaaaatccctccaggggtttcccatcaccctcacaaaaatcccagatctttcctgttaactacaaagctgagcatgatgagttagttttctttacctcctcctactcttacttatgctcctctggccacactggccacccccctatccctgccactgcctttttttttcttgaaacaggatctccttctgccacccaggctggagtgcagtggcatgatcttggctcactgcaacctccgatttttaggttcaagcaattctcatgctcagcctcccaagtagctgggactacaggtgcatggctccatgcccaactaatttttgtatgtttagtagaggcggggttttaccatgttggccaggctggtcacaaactcctggcctcaagtgatccacttgcctcggcctcccaaagtgctgggattataggcgtgagccgctgcgcccggactaaccacttatttgcaccagtcttcatctctctaatctttggcttcagcattaaaaatgcctgggaacaaggcagcccacgatgatgctctcaggagcaggtgaggcaggggagaggctgagcaggcaatgactaccttctctctagcaaggtgtgttggaagagtagggcaggagaggagagtgagccaggggcagtcatacaataattgggtttctagcacacacctttggaagaaagtctgtcaccaaagaataaaattaaatgtatgagaacctggatttttagcttaaccatttgtgtttgggatcaatttatttgtgaaattaaagccagtggaataatgtagattccttttttttttttttttttttttaaaagacagagttttgctcttgttgcccaggctggagtgcaatggcccaatctcggctcaccacaacttccacctcccgggttcaagtgattctcctgcctcggcctcccgagtagctgggattatgggcacccgccaccatgcctggctactttttgtatttttagtagagacagggtttcatcatgttggccaggctggtgtcaaactcctgacctcaggtgatccgcctgcctcggcctcccagagtgctgggattacaggcatgagccactgtgcccagcccatttcatcttttattatctgagtgtattcaagacaacactagtatctgagttttaccacaggatcgtcactattcttagttatttacttggttgatggttgattctattttttttctgtgtgttccttccatattactcctagcaggagatcctttaatatctaagcacttcacctctcatctgccttcctagtaaggagtgaaatatttaactattgaacaatgtgttattttctttgagtttgcagtgacagttaaggagttgggcatgagggagatgagaaactttcctagtttattctgagtcctatcttttcttatggtttcattctttcatttttagtagactctctaaactttgaaaacatccttataacatccattacaaatgtaactaattgtaattctgaattcacatatgaaggaggtgtgggagtcgctaaatgcagttagagtgcattttagtaagacagttatgctaaatagataaaaatagactgtgaatactgtgcttgttctgtatgtagatatctgttttatgatgccaagttgttaacagtcaaaactttgattaaacgttgtgataataacgtagttaatgtaaccaagcattttgcttcttcatctttaggaaattttacggttctggctcacaaagggtgttgatggttttagtttggatgctgttaaattcctcctagaagcaaagcacctgagagatgagatccaagtaaataagacccaaatcccggtaaagttttattttaaacgtttttcttttgccttttctgaaaatgtcatcagagtgttttctttctcagcctgagataccagttacaaagatgagttttgtcctgtgtctagcaagtaccctgatttatttctttaggaaatgtgcaagagtttgaaatgcatatgcactcgatgtttttttccactggttccctccagagcgagggatcccttgaggagtccttcagtgacaagggttctgaagacatggacagtgtgggctctaccaagggccacaaaatagaggacatttactcctgcaattttatcatctgacataggctcaagtgaggaggccttggcttggatgagatgtaattttttgttttgattctaggagattattgtcatcctagaaagacatagaaatgagacactgacatagaaatcctacaaagatacagaaactaggaaaaatttactgaaaccccgagaaagtataacagttaggagaaaggatagtgatggtaaagaaacaaatttaagtgcatgatgttaatagttttgtgagcagataaagtatacatgtaataatgagctctataaccactaagatctttttttttgtttttaaaagggtctgaaacattttgacaattacgtgttgagaactttgtaatcagtgttttgcttggtaaaatttatttgctaaaatgggtgacagtttattagagaaatattgcttagtagatttataaagttaacaacttgagcatcaaatgaagcattcttctccatccacaaaaccatgtttgagtgtgcgtctcgcttggcttgagccctttgaagaggttgtctacattcatatagagcgagctgtgggcatgcaatgtatgaaatgagggtaaccatgtcgtcctggttttcaaaggacacggtcacacaatactcggagctgtaccatgacttcaccaccacgcaggtgggaatgcacgacattgtccgcagcttccggcagaccatggaccaatacagcacggagcccggcagatacaggttgaccacggcatatgctctcatttcttcccaggcttagtgtgtgatctgcagtgtatccctcacaaccaagtgtatttggaggttcaagtaataatgtaacaagcctgcataactctaattgattacagtttggttgtaccagggcctgccatattcctttcctgtttgcttattttgctgactttcagtttcctcttttgtaaaatgatgcagatcacactacgtacttcacaggagttttgtgaaaattaggttaatgaaaaagagattatattagctaaatgttagccatgagctattattttttctttttcaaaaaccagttccaggccgggcacagtggctcacgcctgtaaacccagcactgtaggaggccaaggcaggcggatcacgaggtcaggagtttgagaccagcctggccaacatggtgaaaccccatctctactaaaaatacaaaaattagctgggtgtggtggtgggtgcctgtaatcccagctacttgggaggctgaggcaggagaatcacttgaacccgggaagcagaggttgcagcgagtcaagattgcaccactgcactccagcctgggcgacagagcgagactccatcacaaaaaaaaaaaaaaaaaagaaccaaaaaaacaaaaccagctccacctgggtgcggtagctcatgcctgtaatcccagcactgtgtgaggtcgaggctggtggatcacctgacggtgttcgagaccagcctgggcaacatggcgaaacccctcctctactagaactacaaaaatgggcaaggtggcacatgcctgtaataccagctactcgggaggctgaggcaggagaattgcttgaaccggggaggtggaggttgcagtgagctgagatcatgccactgtgctccagtctgggcaacagagcaatactccatctcaagaaaaaaataaaaataccagctccttctctgcagtattatttttatcattgttattggatctatagtttcctagtacagtatataaatccatatgtttcagctaaagtatcaggaacacagctttggaatcaggtaggtctgaaggagtcctgctctgtagctgtgtgacctagggccagttaattaacataagtctcagttgtctcatcaataaaaaagtgatagcaataacctctataaggctgttgtgagattaaattagataatgtatataaagtagtgcctggatcatagtaaacactcaataaaattacccatcattaagtttacatagatcactcaacagaatcaataggaaggaattaaagaaatttcatctccttaaagtaggtactccgattactctgtctccattttatagacaaggaaactgaggctctgagcatgtaagtaatgtccacaggtaggagtggcagctatgggatttgaactgaagcagttgggctccagagaccatgcacttatccataaatatgctgcctcaaatagctaaagccagcattgatcggagtcatttcaggtgaatgtgtcttcccccagggttttgctttcagcaattgagagtgcacaccaataataaggcaagatgttatagggactccaatacaagggggaagttcttttgaagaaaataccccacctaatttgcagacataaactttagattctaaatggagtgatgagaattgctaaagaaagtcttcatggatgtcaacgagttttagtgtcaggatgttactgaattttgattctaggagattatttctcctaggattctaggtttagaaagaaaagaacaggcttggtgcggtggctcatgcctgtaatcccaatagtttgggaggccaaggcaggcacatcatcagaggtcaggagtttgagaccagcctggccaacatggtgaaaccctgtgtctactaaaaacacaaaaaaattagctgggcgtggtggcgggtgcctgtaatcctagctactcgggaggctgaggcaggagaatcacttgcacctgggaggtggaggttgcagtaagccaagatcatgccattgcactccagcctgggcaataagagtaaaactctgtctcaagaaacaataacaaaaaaacaaccaatatagactgagatccaatttttttttttttttttaaagacattctcactttgttgcccaggctggagtgtggtggcatgatctcatctcactgcaaccttcacctcccaaattcaagtgattctcctgccttggccttccgagtagctgggattacaggcgcatatcaccacacctaatttttgtatatttggtagagatgtttctccacgttggccaggctggtctcaaactcctgacctcaagttatccacctgcctcggcctcccaaagtgttgggattacaggtgtgagccactgcacctggcacccaaatgtgtttcattttttttggggggggtggatttttctgccttattttttattattatacttttagttctggggtacatgtgtacaacatgcaggtttgttacataggtatacatgtgccatgttggtttgctgcacccatcaacttgtcatttacattaggtatttctcctaatgctatccttcccttagccccccacccactgacaggccccggtgtgtgatgttccctgccctgtgtccatgtgttctcgttattcaactcccacctatgagtgagaacatgcggtgtttggttttctgtccttgtgatagtttgcttagaatgatggtttccagcttcatccatgtccctgcaaaggacatggactcatccttttttatggctgcatagtattccatggtgtgtatgtgccacattttcttaatccagtctaacatttggtgacagcttgattatgctttctagaaggtgctagtcctatatggttaatagtgtgcattcagcccctacatcttgtacatgcaagataagcagctgtggagtgccttcccagtcttctgacaggccccgatgacactgaaccttgtcaactcttataggttcatggggactgaagcctatgcagagagtattgacaggaccgtgatgtactatggattgccatttatccaagaagctgattttcccttcaacaattacctcagcatgctagacactgtttctgggaacagcgtgtatgaggttatcacatcctggatggaaaacatgccagaaggaaaatggcctaactggatggtaagtcctcatgacagcagagtacataatgtgctgctgttgcctttgctgtccagttatctctaaaatgcaatggacctttgtctctaagtgaccatcacctctgccttatttggtgattgttcagtggtcaggcctgtcacagcctctgccaggttcttttcattaagggagggagactgcccactgaatggaatgaatattgaatgagtgcttgtctatgctcagaacactgctaggctttttggggatggatatcaaaccataatttctccccacatatctcagagtttatgatgtcaatgggaagaaagaggatttcgggtgtagaagaggtacacagcaattcagggcaacataaaactgtgacaaaacaccaatttgtggggcaggatgcactgcaaaaagcatttaaactacagagattgtcggagaaagaatttctcccccttctgtactacactcttgaaaacaatttttttttttttttttttttttttttgagacaggggctcactctgcacccagcctggagtgcaatggtgcagtcatggctcactgcagcctcgacctctgaggctcaagcaatcctcccacctcagcctcctgagtagctgggactacaggtgcatgccaccatggctggctaattatttttgtttttgtatttttagtagggagggagtttcaccatgttggccaggcttgtcttaaactcctgacctcaggtgatctgcctgcccaccttggtctcccaaagtgctgggaatacaggcatgagctaccacgcccagcactaacatttttcaagactggcaatacattacttcagtgaagaacagaagatacagcaatacatacctgtggtaacagaccagtattctcacttccacacccatcagggttgctttccctgatctgatttttctgtctttgggtttgagttagaggtcaatattaggctccttcgtaagatgtctgtagtattatagatgtaagccctgctgcttcaaagtcccacggtaatagtggtttaaacaaaatgcaagtttctttctctcatataaaagacaacctttcttttcttactttttttttttttttttttgagacggagcctccctctgttgcccaggctggagtgcatggcgtgatcttggcttactgcaacctccacctcctgggttcaagcaatttttctgcctcagcctcctgagtagctgggattacaggtgcacgccaccatgcctggctaatttttttatttttagtacagacggggttttaccatgtttgtcaggctgttcttgaactcctgacctcgtgatccacccccacctcagcctcccaaaagtgctgggattatgggcatgagccaccactcctggcccttcctttctttaatatattataaatgtaaactctaaaatgcctctttagtctcgataatcctccatctctctgtatctctaccaccttagactgtttctgtggtctcatcgtttaggtctcaggtaggtgtcaccacaggaagccttctggagcccccaaatgaggtgtcaggtctacctattgtatactatagcacccgttcattctctttccttaaagtccacacaattccacgatgtctgctttccccactagacagttcactggttaagggcagaggcaggttcccagcatccttgcacggtgcccacctcacacggaggtgctcaggctcagggtttgtttgttactggtgctgttgttattcgtatgcagttcagcgacttaccaaaggtgtgccttatatatagagagagagttgccttacactagtcaatatcttctgttgtacccccacaatacctgtaggtttgatctgggccctgaaaagtggtatgattttgatacttttcgcacagatcctgccagctatcttacacagcctgatgaaaacctgaaaggataaaggagaaaatgcagcctaggcagaaaaacactggcagaatctgtgaaccacaattaagcttatttcaatcttttctgatgctttaataggcaggaatgtgtgtttccattgccagagcctttctccgtctggtgaggggaaagaggctcaaatttttaggcatggtaaaagctttaatttgttaaatgtaagtattaaaactatacaatttttaaataacagctttgtcgagatataattcacataccataaaacttttttttttttttttttttttgagacggagttttgctcgttacccaggctggggtgcagtggtgtgatcccggctcacttcaacctctgcctcctgggttcaagtaattctcctgcctcagcctttagagtagctgggattacaggtgcccaccaccacacccagctaattttttgtatttttagtagggacacggggtttcatcatgttggccaggctggtctcgaactcctgacctcaggtgatccacccatcttggcctcccaaagtgctgggattacaggtgtgagccactgagcccagccaaaatttaccgttattaaagtatataattaagtggattttcggtatattcacagaattatgcaaccatcaccaatgtctcattccagagcattttcatcacccccaaaataaaccacatctccactagcaataactgcgcatggcccctccctctctgtcctcagtctctggcaaccactcacctactttccgtgtctatggatttgcctattcagggcatttcatataaatggagctatacgatatgggacttttgtgtctagcttctttcacttaacatagtgttttcaaggtttatccatgttgtagtatgtctcagtacatcgttcctttttatggctgaatagtaacttccataaagcccattttgtttatctgatcatgaattgacagagatttgttttcacttttggactattacgaatagtgatgctatggacatttgtgtacaagtttttataaaaacatgttttcaattctctctgatatatatccaggagtggaattgctccactgggcatatggtaagtctacatttaactatttgaggaactgccaaactgttttccaaagtagttactccattttacattcccaccagcaatgttacgagggttccaatttttccacatctcatcaagccttgtgatggtctgcctttctgatgatggccttcctactgagtgtcaagttgttatctcattgcatttttttttttttttttgcatttccctgatggctaattttgttgagggtattttcatgtgcttattggacatctgcatgtcttatttggagtaatgtctgttcagattctttgcctataattaaatttggttgtctttttattgtttagttgtaagaattcctgatatatactggataggtgatttgcaagtattttctcccattctgtgggctttcatgtcactttcttgatagtgtcccttgaaaagcacagaagtttttaatttttatgaagtccagttgttttgttgttgttgttacttgtacttttagtgttatattagaaaccattgcctggtctatttattccagcaccacatgctaaaaagactattctttgcttcattggattatcatggaatctttgttgaaaaatcaactgattgtaggctgggcgtggtggctcacatctgaaatcccagcactttgggaggctgaggtgggagttgagcccaggagttcaagtttgccttgagccatgattacactccagggtgaactccagcctgggtgacagagtgagaccccgtctctaaatgtaaaacaaaacaaaaaaaagaaaatcagttgattagatttccagactctcagttctgttcatctatatgtctgtctctatgcctgaacaccctgagttgattagtgtagcttagtaagttttgacatagagaagtatgggtcctccaactttgttatttttcaagattgttttagctgttctgggtaccttatatttccatgtgaattttaggatttccatataaattttagaatagccaactgggattttgatagggattgcattgaatctgtttatcatttttggcaatcatgccatcttgtcttctaatccatgaagacagatgtatcttatttaggtctttaatttcttttgatgatgttttgtatttttcattgtacaagtcttagactttttgttcagtttattcctaagtattttgttcttttgatattattgtaaactgaagtgtttgcttaatttcattattggattcttcattattagtgtatagaaatacaatagatttgtgtatattgatcttgtatcctaaaacattgctgaacttgtttttcgtttctaatagtttattgtgaattcctgaagaatttttttttttttaatttgaggcagagtcttgctctgttgcccaggctggagtgcagtggtgtgatctcagctcattgcaagctccgcctcccgggttcatgccattctcctgtatcagcctcccaaatagctgggactacaggtgcctgccaccatgcctggctaacttcttgtatttttagtagagacggggtttcaccgtgttagccaagatggcctcggtctcctgacctcatgatctgcctgcctcagcctcccaaagtgctgggattacaggcgtgagctactgtgcctggccttctgaggaattttttgttttaaaattattgcaaaatatacataaaacaattttaaacattcaaaagtgtgtaattcaatgcattaaatacattcaaaatgttgtacaaccatcaccattatcagtttctagaacttttatcatcccaaacagaaaatctgtacccactaaacaataattcctcacttccaccactaacccctgatatcctccattctattttcagcctctataaatttgcctattctaggtacctcatataagtggaatcataacaatatttgtccttttgtgtctgcctcatttcacttagcttaatgttttcaactttccttcatacatacaatagcatgtatgagatcttactccttcttatgactgaataacattccatggtacctatgtaacacgttatctattcatctgttggtgacgtttgtggttttgcctccttttggctgttggaataatgttacaaaccaatggtgtacaagtatctgtttaagccccagatttcaattcttttggatctataccatggagtggaattgctggatcacataatacttcttttgttttgttttttgagatggagtctcactgtatcacccaggctagagtgcagtggtatgatctcggctcactgcaacctctgcctctgggttcaagcaattcttatgccttagcctcctgtgtagcttggattacaggcatgtgccaacatgactggctaatttttgtatttttagtagaaatggggttttaccatgttggccaggctggtctggaactcctggcctcaagtgatttgctgccttggcctcccaaagtgctgggattacaggcataagccactgtgcccaggctttttttttgagacagggtctcactttgtcatcacctaggctggagcactgtggtgtgaacatggctcactgcagccttgacctcctgggctcaagcaatcctcctgcattagctcccacaaagtagctgggactataggtgcataccaccatacctggataatttttgtattttttgtggagatggggttttgccatgttgtccaagctggtcttgaactcctgagctcaagtgatcttcccaccttggcccttaaagtgttaggattacaggtgtgagccactgtgcccagccttggatcatatagtacttctgtgattttgaggaactaccaaactgttttccatagtgacttctccgttttacattcccatcagccatgtacgaaggttccaatttcttttcatcctcaccaacacttttctgtcttgatttaaaaaattatactcatcatagtacaaatgaagtggtatctcattttttcattattgaataacagttttgctggatatagaaatcttggtttacagttctttctttcatcactttgaatatgtcatcccattgccctctggccttcatggtttctgataagaagtcagttgctaatcttattgagactccttacatgtgatgtaccaattttctttgctcctttaaagattctgtgtcttttaacggtttgactgatatgtctaagtgtgggtttttaaaaattttgtcctacttggagttcattgaggttcttagatacacaatttttaaaaaaatcaaatttgggaagttgttggctattttttttttaaatattgtttctgaccatttctcttccttctctccttttgagactcccattatgcatatgttggtatgcatgatagtatcccacaggtctctgagagtctggtttttttttttgagacagggttttgctctgttgcccaggctggagtgcagtggtgtaaacatggctcactgcaaccttgatgtcctgtgctcaattttcccatctcagcttcttgagtagctgagactacaggtgcatgccaccatgcctggctaaatttttaatttttttgtagacatggggtctcaccatgttgcccaggctggtttagaactcctgagctcaagcatcttcctgccttggcatcccaaagcactgggattacaggtgggagccacagtgcctggcctcattcttctttttctttctggttctcaggccagatactctcaattgagtcttcaagttttctgattcctttgctagttcaaatttgtcaagtccctctagtaaacgtctcactttagctattgtactttttaactctaacagttttattttttcataatttctcttatctatttgataactgttcatatactttaaattcttcaggcacaggttttttctttgaatatcaaaatattagctggtttaaaatctttgtctagtaagtccaatgtttggtcttcctaagcaatatttgctattgactccccccaccattatatgagccatattttcctgttttctttgactgttttgtatatttgttgttgttgttaaaaaccggacattttaagtagtatgacaattctggaaatcacattcttcctttcccagtgtttgttgtgctctatgtccagaagtcttgagaaatcaaagggtttcttgtcagaagatctcatgacagtgaaaagaataaaaggatggaggcaaaaattgacctaattttctggccataaacatagaaaaatacttcacaatggtctataaaaacgtaattataaagatcattttcatacagctaaggaagttaaaaaaaaaaaaacccaacctcctatttcttgaattgtagcaattaagtcttgtcctaagactcaagttcgaacgctagttctgtcttagactactacttgaataaatgatgtaatttctcagagcttgtttcctcatttgtaaaacggagatagtacttgctagcactgttgtgtgaaggagggaaatataggtgtgaaagtactttttaaaaagtaaagtgccatgctcagcgtatgcacatgagggtttgagttgtgggttatggagagagttgtcaggtgatttaaataaattcttatttaaacaaacttatttaaataagggctagaatatacctagaacgtttaacatggaaatatatttacaaatagaaaacactttataaaatttcatcttggagtatgtaaattctttctaaaagttgatttactttaaaaattttgtctgaataattcataagtcaaaacaattttttaaaagaggacacatcagaagtctctcatgcctgtccctttcacctgggttcccttgtcttgctctctgccacagttttgcttcctttcctgtcaatattctcttatccaaatatgagaaaatatgactatgtaccctctgagttttatttgcaatatcattgtacaataaattcttatcacccttttcttgctcatcagtggccaagataataaattggtcagttacacagcaaatagcaggcctaggactcaagtccaggcttgctagtaccaaggtaccacatctactttgttttgctacgttgtgaactttctgtgaaatagggtaaatctttcagaaaactgtgtatacagctgtgttcttaaaaatatctgcctttcagattggtggaccagacagttcacggctgacttcgcgtttggggaatcagtatgtcaacgtgatgaacatgcttcttttcacactccctggaactcctataacttactatggagaagaaattggaatgggaaatattgtagccgcaaatctcaatgaaagctatgatattgtaagttgaatacaacttgactattcatcacagctataaaaccaagtattcattttttattttttgccaaatcagagaacttactatctctctattgcattgctgaaaatcatggttactttgcttttctttcttactgttagtaagaattctcagctttcttggtggtctgagagcttattttaaaaatgctttggagccatacaactaaaagtttcttgggtagggcattttaaagatgttttctacctgataggcacattaaaatttatttatttattttgccaggaatactgtgttgagaggcacactaaaattggagaaccggtggtttagtttagaatatgactcatttccctctacttgaaatgtggagttaggaacacttatttctttagttctcatttgtcctgtttggtcttgggtgaccacagcacaaggacccttttcttttctgttatcaggtgcagtgcacagcctcagagttaagcagtttttattttgtagctacagatttcagaattgtgttgctgggtagacgactatcttgcaactttaattgcctagttagctttcaactatatgagatccaatttccctaatatttgattaaggtgaagcttttttccctctatcagctcctacatttgtgtgtgtgcactcatgagcaataatcaggctgaataaacgagtaggacagaattcatactcacttgtacatggcagtgttcttaaattcaccaacactgtaccatagtagaagtcgtgtaaactggcaatagcacattttgaaatcctgtattattgatttttaggaaaaagcagcagagatttcaagcatgtattaaagttcgattagtattgtctattcaaactcaaaatgttattaggtactttctagttaaaagggtgaaactggtttatgtaccgaaagttgaggccttttcatcacaaatgctaatgagtacaaacactagctaagaactatggggaattaaataattatgaagtaaatcaggaccaaagcacatttcttctaataaccaaaccactgttttccctttctggtcttttgacatagaatacccttcgctcaaagtcaccaatgcagtgggacaatagttcaaatgctggtttttctgaagctagtaacacctggttacctaccaattcagattaccacactgtgaatgttgatgtaagtatcagtgaaaattttatgttgattctagaaacaaagaaatgggtttctactgaaagtacacactcaccctgaatgtgtctaaaccttaacggatactctttaaatcaatcacagacttccttgcagttttccatttgtaaggagtttgtaaatcatgcctttgtgaaaatacaaactggtacaaatctaccaagtgaagtgaagtatcatatagaatatacaagtcttcattgcaatgacctttactaaggcctttgagctatgaaggaaattttatgaagttttttagctagcccagctgcctttcctcctctcttcccctcaaaaggcagggagagaggcgagtggataggcagccatgcaggcagtaaggagatcaatcaatcaacccagagcaaggctcaaatccacactactgttctgaagaaacagaagccatacatgatccttaaagtggttgctctggcatactaatacaactttggcttttacccttttttctgttcccatagtgatcaagcactaatgtcattcactagtgaaaacttcactggaaaacaaactaaaccaatttaggggaaatgaaattatagatgccacatggagatagttaagaaatgcatagcaccctctgccacacacacacacacaccatgcccatcccactctactgagtaatctgaggaaactccccaggatattcagatatagaaagccacacaaaccctcctgctcccacagctccctgctacaagcaccactgagaattcttggatagtataagctttgttttatatagttgtaagtcttgaagacacaaaatatatatgggttgaatgcctcttgattctcattatgtctaaaatattcccataggccaaggccaatctgaatacagtatgtaggaagtcctacataaaaatgcataccagcaaagatggagaaaatgcaaattaaaacagtgattttttttttttttttttttttttttgagatggagttttgcttttgttgcccgggctagagtgcaatggtgtggtcttggctcaccgcaacctccatctcctgggttcaagcgattctcctaccttggcctcccaagtatctgggattacaggtgcccgccaggcgcctgccaccatgtatggctaatttttgtatttttagtggagacggggtttcaccatgttgggcaggctggtttcaaactcctgatctcaagtgatccgcccacctcggcctcccaaagtgttgggattacaggcgtgagccactacgcccagccaacaatgacacttttttctaagtcataaatcccagacaatgccattttaataaaatacatccaaatgaccctggaaaggaacagaaaatttaagtaatttctaaaatacataaagtaaaattagggctgggcaccatggctcacagctgtaatcccagcattttgggaggcaaaagccagaggaatgcttgagcacaggagtttgagaccagcctaggcaatatagtgagaccttgtttctaccttccccctacccccgccaaaaaaaaaaaaaaagggaaattagctgggcctggtgacatgtgcctgtcatcccagctactcaggaggctgagcccaagagatcaaggttgcagtgagttgtgattaccccaatgcactccagcctgggtgccagagtaagaccgcctcaaaaaaaaaaaaaaaaaaaaaagcagagaatagaagtgggagtctaaaacatacaggagaaaaacagttctaacagagacagcactgtaggaatttcctgaactcctgcaatttgccatggcataatttccctaaggaaaaaaaaatctagaactgtttggtgatcacatgcatggcagaattagtagaacaaagcctgaagcttctacaagtgcatcaaagaaagaaaagaaggaaaacaagacctaactctagcactgtcccctggcgagaattcactgtggaatgctctcagaaaggagagcttttactactcagctcagagtcacagacaccaggagaaaaaaggtgggaatctagaaagcttatcaccttcaagtaggaaaagaaccctacatcccaatgtcccaaagacaagtcagacccacatccaacttggcttcccattatgagaggcaggcaaccaaagacaggcaaacaaggaaggtcaaaacacaaaagcaaacagatcaagaatcacacagcatctgagaaaaaccaaggccataaaagggagacaccattcctaacagaacactgtagaaagcagagaaaattatagcaaacataagacttaaatataagtataaatacccccagtagattgctgtttaatggagctccttgacattctttcaagaagtgattagatctctcagaagtataaaagactgtcaaacaatgaaataaaatagaacataagtgctaattagtgtgctgaaaaattgatccaggggcttgtccagaacgtactgaaaaagacaaagaattaagagcataagaaaaaatcgggatacatggaagatagatacagaattccgtacatgcagtaacaacaattgcacaggagaacagactggaggaaacatacaaagaaataaaatacataacccagagataaaggaagactttgtcttctttcagaacaggtaggataaagagaactccaaaactactcagaaagaaaccaaacctgaaaatagattgcctgagaaaagggttgagaattggactagcatcagacttctcaattggatactacaccacattagaactctatcttcaaagttgtaatggaaacggaattctgtatccattcaaagagcaaaacagagatggaaaagcaaggacccacattttaccatgtgtggccactttctgaaagaatagtcaagggactatccaacaaaacataacaattctaagagatacaatgtattaaagaaggaaaaggaaataacttgatttaaataatttttgatacacaatgtaaaacaaggtattctggaacaaaaatcttagtgatttgattctatatgggaaatgttagcagggagggtgtgtgggtgggagggggcacacaggagcaagcaaatgagagagcagtgtttgttttgcacaggaaaaagagtaactctagatttgagctgttcagtagccattaaccactgtgactattacattaaatagaattaaacatttagttcctgctgggtatggtggctcacgcctataatcccagcactttgggaggccaagactggaggatcacttgatcctaggagtttgagaccagcctaggcaacatagtaagaccctatctatctcttaagaaaaaaattagctgggcatagtggcacacacctgtagtcccaactactcaggaggctgaggtgggaggatcacttgagcccaggatgttgaggctgcagtgagccatgatcatgccactgcactccagcttgggcaacagagggagattgtgtcaaaaaaaaaaaaaaaattcagttcccatgtcatagcaacacttcaagtgctcattagctgccatattggatggctctgatatagaacatttccagcattacagaaagttctattggccagcattgttctagacattgagaaacattattttcaagtggtcataattttaatggtaaaattaggacataaaaataattttcaaagaattattttcaaagaacactagacataaaatataacaattttcaaattttcaaagaatactagaagaaaaaaattatacagtcaatccaacaaaaagcttaatagaaaaaaaccctaaacaatagtataactacaaataaaatagggcttccgaattatgtctaaataatacaataattacaaatatgaatgggttaaattagcctattaaaagataaaaccactcagataacaaaaacagacataagaaacactaacataaaacacaaagaattaaaatgaagatatagcaagcaaataatagaaagcttgcaacccagctatagctataaacacaaaaaatgaagttatcttttgacctaataattccattcctaatacttagaaatatttgcacatgtgcacaataatacttaaaggatctcaacactgtttttttttttttttgagacagtcttgctccgtcacccatgctcgagtgcagtggcgtgatctcggcacactgcagcctctgcttcctgggttcaagtgattctcctgctgcagcctcccaagtagctgggattacaggtgcacgtcattatgcccgggtaatttctgtattttttagtagagatggtgtttcaccatgttggccaggctggtcttgaactcctgacctctggtgatctgtctgccttgcctcccaaagtgctaggattacgggcctgagccaccttgcctggcctgcaaaatttgtttttaatagaagacacaagaaatgatttaaatattttatcaacagaaaaccagttctatcaactatgggcccagtatgcagcttttaaaaatgacagttctatatacattgatatgagaccatttcaaacaggtattcaataaagtatagaatggtaacatatcaccaactgtgtaaagaaaaatatataaacatatgaaatgatacattctgtgcctatgcaaacatatgatacattaaaaacaaaagaacatatagtgcctgtctctgaggggaactgtgaagctatggaaaggtgttgaagaaaacctttttatagtatgtattcttgtaattgaataaaaaataaaattacaaaaatcaggcttggaagtatttaatagcagacaaaatatagttcaatatgaaaagcattatatgagacaaaggcaattttcaaaaattgataaaacattccaccaaaaatcatgactacgcatctaacagcttcaaaatatagaaaatactcaaatgcaaaatcaacaaatctgcaattacagaaaaagacttcaacatacttttagaaagtagtaactcaagtagacaataatagctaacacttaccgggcacttcttatgtgagtggcactgaaacatgtgctttcatgcattacctaaggctagagaaaatgttaataacttagacaagtcatacatgtatcataaatatctttgtacctgacaaacagaataaacatctttttaaacaccattagataattatttaaagaccacatattgggaacctacccctaaagaacaataacaaccacaataacaactatcaccccagtaaacatggctggcaagaatacaattaaatgaacattatcactgatttggcaacagctcttatgaagaataatttggcattatgtatcaagtgcccatactctttgacaaagtaactgtctttctgataatctatcttaagtaatacaaaaatggggggaggggaataaaaatacaaaatattagaaacactatcgtcaaaatgaaagggcatggctgagtatggtacaaccgttcaacagaatattgtcattaaaaacatttatggaggctatattatatagtcaataacagaaaatgcttgaaaggttagaagtacatcatcaaattatgttttatatagctgtaaaataaacccaaatcatctttaatgaacacatactattatggtaaaaaaaagtctacaatttctaactttcaccttaggcagctttttattttgcatcctttttttcaactttgtcttctattagctgtgcaagaaatacatgtctgctaaagttacacgatcttcgcacaacagcaacctacacattagtctacaaaggggaacaaacccaaattcctcagaagtctgagtccactgttgccttctttctggccatctggcagttacaatatagcacagaatgactatgcaagttaaatattcatcttagacatggacatttgctttgggactcctaaagtggagtcaaatttgatctctacagaaactctacaatgtagcagagcactgtgcgtacttattgactcccagacaagccgaaaccccgaatttgtcatttctatcagtttttatataaattgttcttacctacttattgatgcttacaatttggcaattataaggggcaaaattggagcaagtgttttgggtaaataactccttacaatatattaaaaatacttacaaacaattcttagaatcaaacacttacgtaaatacttttttaaaaaaataggtccaaaagactcagcccagatcggctttgaagttatatcaagatttaagtctacttcatgccaatgagctactcctcaacaggggctggttttgccatttgaggaatgacagccactatgttgtgtacacaagagagctggatggcatcgacagaatctttatcgtggttctgaattttggagaatcaacactgttaaatctacataatatgatttcgggccttcccgctaaaatgagaataaggttaagtaccaattctgccgacaaaggcagtaaagttgatacaagtggcatttttctggacaagggagagggactcatctttgaacacaacacgaagaatctccttcatcgccaaacagctttcagagatagatgctttgtttccaatcgagcatgctattccagtgtactgaacatactgtatacctcgtgttaggcacctttatgaagagatgaagacactggcatttcagtgggattgtaagcatttgtaatagcttcatgtacagcatgctgcttggtgaacaatcattaattcttcgatatttctgtagcttgaatgtaactgctttaagaaaggttctcaaatgttttgaaaaaaataaaatgtttaaaagtaaattatggcttataggagcttataactttattcagatagcatcaatcagggatgaccagaacacattaggaccccagattattcaaaaactttaacgaattttaaggggaagaattttatcttttcccttaaaatgcagtcatagaaattagaggatgactcactgccacagtgtctaaaagcatttgctagcaaagaggcaggacactaatttgtaaactgctcaactgttctgactggaagggaggcctggagctctgctatcaccaatccttcccttccctctactccacatccttctaaggagcatgatttgaaaattactttcctaggttaatgggcatgtgcatcaatggagagaatagtataagcaagtgagatgtagactaagcaaaatttagatggagaagcacattttaaaaaattaataacttaaaagtctcaagttattaattttttttttgctaactcaattggaagtaagactatgaaatatttcagtgtgtttccaattcccagttgaatgcagtgtttcagaatttcaggtatttcttaagatcctcgaaaacactggtgctgtcaagtccaagttcctcgtacaggaatttaatttgggctgtaatctaaaagaaacacattaaaaaaattaaatagaaggcctttgtagtaaaa

SEQ ID NO: 604 - DNA, 9656 bp, Homo sapiens
ctgctgaaaaagcagaaagagattaccagccacagacgggtcatgagcgcggtattactgctggccctcctggggttcatcctcccactgccaggtgagtgatgagcccagcctggaggagattccctggaggccgggcaagggaaccctgctgagatggatttgctcttgccactccaggagtgcaggcgctgctctgccagtttgggacagttcagcatgtgtggaaggtgtccgacctgccccggcaatggacccctaagaacaccagctgcgacagcggcttggggtgccaggacacgttgatgctcattgagagcggtgagaaggccctggcgtgcagagaccccgccctgtcccctcagtcccttgatccctgtgcagggacccgggagccacccctccgggggatcgactcctagggtcccggtgatcccctttccagcctctcagcctacgccgtgtagcagcgtctccctccaggaccctggaggcctgacctccatcctcgcttgcctccctctttcggtccaggaccccaagtgagcctggtgctctccaagggctgcacggaggccaaggaccaggagccccgcgtcactgagcaccggatgggccccggcctctccctgatctcctacaccttcgtgtgccgccaggaggacttctgcaacaacctcgttaactccctcccgctttgggccccacagcccccagcaggtgcctgcgggagggtcgggaggagagggaggggctgctagaaggggatccgctgagcacagaggggctgttacggagtccctcccaccctcgctcgctatcccgaccctcgctggctccatccctcccctgactgctccctgaccatcgccccgccccgctccctttccatccctccccactcactcccgatccctcccaccgacctgccacccgggaatccccgcacccctcctcttctaagagcaaacaggacggatttctgatatgaaatcaccattaactgggttatcctgcattctttttttattctgttgcgtttggttcaagaagttctcctgcagggtttttgctatttcctcttcctaagggagactgaactgtaactttccactttccttgtctggtgttataaagagtctagggagatattttgcgcttcttttattggaacagcttgtgaacacagaagtctcctgttcttggaggtttagtagcgcttgcaggtgaaggcactggctcgttccagggcaccccctcattcccttgaccaatgagtctgcttctgtgtctcccctcggaaggccagactttgttgaaaggttcagacttgaccatgtctgagtctacatttggcctcagcaggcccctcctccaccctgcccaccccccacccccacttgccacccaagacacccccccttttcttttctttttttttttttttttttttttttctgagaaagcgtctcgctgtgtcgaccaggctggagtgcagtggcgcaatctcggctcactgcaacctccgactcccgggttcaagcgattctcctgcgtcagcctcccacgtagcagggactagaggagcctgccaccacgcccggctaatttttgtatttttagtagagacagggtttcactatgttgcccaggctggtcttgaactcctgacctcgtgatccacctgcctcagcctcccaaagtgctgggattacaggtgtgagtcaccacacccagccaagaccactttctgtacccagccctgggtgcctctacccagacctcctgttcattctcccttcctcttttatggattacacttctttattttcccacatccagatcccatgatgggagctgcagaaggcccctttgggaaggctgagcaggttgactcttgaggccagcaaaagtggggtgcagagaaggtatctgatcaaatccagtgccctctcagtgccccctcactctgtctgtcactttcctagacccaggatccttgaggtgcccagtctgcttgtctatggaaggctgtctggaggggacaacagaagagatctgccccaaggggaccacacactgttatgatggcctcctcaggctcaggggaggtaagcctgggacatcggggtccctgtggggactgaactggaaggtctggggactgagatcttaggctttggggagtgaggtgagctgaggcacggcatgagacccagaggagggtgggcctggcttcctggagctatgcctgcctctgagggttgggtggtcctggaggcagcatcactgactctccctcgctccccctttctgcaggaggcatcttctccaatctgagagtccagggatgcatgccccagccagtttgcaacctgctcaatgggacacaggaaattgggcccgtgggtatgactgagaactgcgatatgaaaggtgagtcctgcccctaggctgtgccctggactgcagcctcggggcacgatgacacatggggcatccagagccatcacaccaaagccagcaggaggaaggtcaagggtgcagggtgggttgcttggcatgtggctttaggcaacagtgagtgctggggcccctgctggctctcaagctgctgagagtgactggttgcttcaatttctgtgtctccacacccctggccttgggtaaccctaggtctcccacttccctaggccaccgtagcctctctcccacccgtatcagcccccgccccgctcatggtgctggagtgccccagcagccttgcctgcacaggagagaacatcagagagaaaatcaaggggactttgggtgtgacagagaaagcaagagttaaaggaggacactgagagggtccccacttacccatttaggtgctgccatggaagagagtgccagggaatgtctccataagaagggctccaaagcaacaggaagccatggtggggaggtgggggtcttataggaatcccagcttccctcctagaagcaaagtcttccctgcccctgcctcagtttccttgtctgcccacatcacgctaacccttagagcttagaagagagagttgtgtgagctctgcacacattcctctgtgtatttggctgtttctccctagctaggctgggagcctgaggctaggggcttggtaccactggcaccagggtttccagccttgggtagctcaggagacggctcaggaagggtaccaggaggtgtttgctcaagtgaggacatgcagggctcacttgagcaaagctccctcatgagtcagaccctgtttctacctgaagggcctccaggactaggagggggaggtgctacagacacagatggtcacagcttgaggtgatcagggctgtggcaaacggggatgtggggcctggggcagctcagaggaggaaaatactgatgttgttggggtagagagtcaaggagggctttacagaggaggtggcctgtgaaccgtgtgttaaagatgacctacagcttattggtagaagaggaagaggacattggtggcagagggaacagtgtgtagcagctgcataggcctggaggtgggagtgagcctgctgttttcaagaagagtccctcactccacctgagaaggactcatcaagatgagggggtacagctgggattgggggtgattcgaagttttccaggtggacaaggtgggtgtggggtcgaagagggagctgctccaagccaaaggcacagcaggtgtgaggctgaggaggaaatgaactggcatgccttcagaatggatactggtgggggaggaagagttaagtggggaacctggtggtcgctcaagtacctgaaaacccaggctgaggggtggaccctctcctgaaggcaggggagccatggaagattgtggagcagggagggcagggtctgagccatttatctttccttttgactgatgctgctgttaaggatctggccctggtctctgggaccagatgacactgataacccagaaggtatttcagaaacaaatcagacgcaacacatgccacacacacagcccacaataagcacagcagacacgaatgcgtcacaccatgacacatacacaccacacatcacataccacacacacactcccccatacccctgacataccacctatggaacacaaatcacacacagagcacacaatatgcacaacacacacaaatgcatcacacgagtgcacaattactacgtgtacatgtagtgtgtatgccacatactacacgtcaggtaccacacacactctccctctcaacatatcagacatgcaatacataccacacacaacacacaatacacacaacacatctggcatgccacacacaccacatgcaagcaaaacacagatacacagaacacacaccacaccaaacacacaaaacaaacacataccacatatatcacacacagtatgtctacacatgcacgcaccacacaaacataccatgaacacaccacacaccccatacaaccacaccccccacatgtatactacgcactcacacacagcacacatacctgcacacatcacgcatgtgcacacactacacaaacgcaccacataaaacacagcgactatgcaccaatcagtgctgttcatagagattcatctgctttcaacactggagccagatcttgcaggctgttttgcctccctggtgaagtgcagttcagcagtttagcagacagtgagcatcacaagaccaggcatcagaaactgggggaacaacaagacgttggggaccaagtgcaggagagaagaggcttcagggtgatggaaccgcttataagaagccgcagcagtgggagggctgggtgcaaggatgcaggttactaaaaggggccatggcagcagccccttgtgaagaaccaaggggcccgggcagataaggccctggctgcccctagaggagctgggcagcggtcccagtgagagagcagggaagagcccacgtctgaatcagggacacgtgggtcccaggcccagctctgccgccgaaacagctttccagcctcagcttcacacgaggatcaaaagtctccatatctcatggagcctctttccctggatttggggaagaggaggggatggttgcagacatgggacggaagcagatgcaaagaccatgatgtgggtgagtgcctgccagaaacacctgtgcggagcagagtgatggagggagcagggaggcggccgcgtcttatcaggcctcccgggccattggaagggcttagaattttattctccagaatggggacctcctggagtcttcggagcagaggagtgacatgaactgacttaggtttacctagcctccctctgcctgctgggtggagaatggagcgagaggaacagtgacaggcgggtgcagggattgccccaggagtcaggtgggagtgaagcggggggcttggaggcagcagaggtggtgacgtggggttgggttttgaagattttctgcagctcaagccagtaggattacttgaggaacacaatgtgggagagaaagagcgtggtcaaggacaacaccaatgtgttcagctagactggcagaaacgagccgccacgggtgtaagtaggggagatgggagtggggagagaagggtgggagaagggagcaggagccatgattttgattttgtcatctgtgaagtatgcaaatgagcagccctccagggtggcatcggttctgcaggtcgcatgtgttggtggaagctgggggctcagtctaagagtccctgcatcatgggaccgatcccccctgctctgtgatggccgtgaggggaggccaggggctgtggtttcacactagagccttgagggcctcggggccaaggtagccgaggatggtcttcagtacctgtctccctcctgctcccaaccccgaccctgagggtccagagtccctgggttcccagcctacctctgccactcacaagctgtgtggcatgggcagctactgagcaatcctgcctctgtttcccttgttgcaaatgagggtgttgattgtgatcacaccacctactgctggggtgctgtggggaaatgaggcatcccagataagctgtgttccctggaaccttagatgggtggatctgtgggaagcaatgaggtcagccaggtgcagaggcagtgctcagcggcagtgctcagcccaccctggcccttcgcatcttgtttggaacatagggctttgcaactgaaaggtatgagaaaggtctcaggctgccttccttattattgaaatgaggaccttaaagctcagatggggaagcagagatgggatgaggataaggaagagcttccattgctctcacagctaaagcaaggaacggccgttcccccagggctgtgagaggacgtccctgcgggtgttcaagcagaaacagggaacaatgggggtgggatttcgactcccaagtcccttctgaatccttggttaagggaatctgtggccaggtcacctggagtgtgactcaagagtgtgatcaccttccctagcccaggacgtggagggacagacatggtgggttcctggcttacacacaccctgggattcctctccccagattttctgacctgtcatcgggggaccaccattatgacacacggaaacttggctcaagaacccactgattggaccacatcgaataccgagatgtgcgaggtggggcaggtgtgtcaggagacgctgctgctcctagatgtaggtacgtggactgaggtagaagacgaacacctgtcccaagtccctggcagctccctccaccccactggattctttcccctgaatttcctgctcagctcccttcacatctgcaattttcaatccgactcttcttctctctgcatcttgggttccccttatgaaaactgggggtgaagcagtgggaatgacagtgtctgcctttctggggaggggtgaccacgtatgcggtaatccctgcccagggtggagaaccgtgccaacaccgaggactctcagtggcttcatacattctggaaatgtttatccagcatttgttttaggtgccgcagatccaatcccatctgtattcctgcagctttatatgccttgagaaacaggaaacaaacaaacaaaaagcagcaaagtatggggaatggagatcccagctctgcagagaaatctggcaaggaaaaggagataggaaaagtgaggggaaggctgcaattttaagctcagtgctcaggggagactcatggagaaggtgacctttgagcgagaactgggaggaggcagagcttcgggcaggacccaggccccagcctccgtctttgccccacactaaacatgacccagcagttgtgatcagggcattcaccctctgcctggggggtattgtgaagggcagggagtccagctctggagcccctgctgccctgggagctgcccagtccccagcccagctttccctctcaccctcaggactcacatcaaccctggtggcgacctaaagctgcagcgctgttggggctcaaaattcccagaagaccaccatccactcagcccctcctggggtgcttgtggcctcctatacccacttctgctcctcggacctgtgcaatagtgccagcagcagcagcgttctgctgaactccctccctcctcaaggtatgggatccagggccgtggagaaatgaggcccagacacacagagactctggcccaaggtggccagctgctctgagcacaaagtcatgtacccccaccttccctctgctccccagctgcccctgtcccaggagaccggcagtgtcctacctgtgtgcagccccttggaacctgttcaagtggctccccccgaatgacctgccccaggggcgccactcattgttatgatgggtacattcatctctcaggaggtgagtgctgcaagcagggccccaaggatgaaggcactggtggcctggactcctgggtctgagggaggaggggctgggggcctggactcctggtccgagggaggaggcgctgggggcctggactcctggtccgagggaggaggggctgggggcctggactcctggtctgagggaggaggcgctgggggcctgggctcctggtcccagggaggaggggctgggtgcctggactcctggtctgagggaggaggggctgggggccggggctcctgggtctgaggagctgaggctctggactcctgggtctgaggtaggagggactgggggcctggactcctgggtctgagggaggaggggctgggggcctggacccctgggtctgaggagctggagctgggggtctgggctcctcggtctgagggaggagggtctggggcctggactcctgggtttacaacttggctgggctgtactctgtgtcctttctgacttggtcttctccctctaggtgggctgtccaccaaaatgagcattcagggctgcgtggcccaaccttccagcttcttgttgaaccacaccagacaaatcgggatcttctctgcgcgtgagaagcgtgatgtgcagcctcctgcctctcagcatgagggaggtggggctgagggcctggagtctctcacttggggggtggggctggcactggccccagcgctgtggtggggagtggtttgcccttcctgctaactctattacccccacgattcttcaccgctgctgaccacccacactcaacctccctctgacctcataacctaatggccttggacaccagattctttcccattctgtccatgaatcatcttccccacacacaatcattcatatctactcacctaacagcaacactggggagagcctggagcatccggacttgccctatgggagaggggacgctggaggagtggctgcatgtatctgataatacagaccctgtcctttctcccagtgctgggatttctccatgtgagggggcagcaggacacccagggatctagcgtgggggaggagaggagcctaatgagaaaatgaccatctaaagcctgcccttcattggtctggttcacgtctccaaaccagcttggatggtagcagagacttcagggtgctccagccaaacgtatttgggcatcaccatgacctgggaggggaagatgcactgagacgtatgaggcttccagcctagcagccagggccctagcacaaacaggaggctcgccccatctgagcaactgcaggagaggttagtacagtcatgcattgcttaacgacagggacgtgtcgttagaaatgtgtcgttaggtgattttatgaccataggaacattgtagcgtgcacttacaccaacccagatggtacagcccaatacacacccaggatggacgctagagtcgactgctcctaggctacaagcctgcagtgcatgttatggtgtgaatactgcaggcaatcttaacaccacggcaagtatttgtgcatctacacacatctaaacatagaaaaggtacagcataaatacactattgtcatctcagcagaccaccgttctatacgcaattcgtcgctgacccaaacgttgctatgtagcatctgcgtatcgtgggataattgacatgagggcttgagagaactccagaaaaaaatgggttagcattttcccagagctgttatcattgggtctctcttaccaccata

SEQ ID NO: 605 - DNA, 20607 bp, Homo sapiens
agtcccggttccccgccatcagcacgacctgtgtgagagcacagggtatctgggcagaaggaaaactaggggagcctcatccagcgctggagatggagaagctttgggcttctcgacggcgaggcacccggggaacggggagtcacttagaacctcaaagtagcctcgggcgagaacaagcgaagcaattccaagctctaccaggtcacggagggcgcgaaacccgccccgcgctccggccggccggcagggggcgcgcgctccccgaactcccgcgcaccgcggaggaggcggccctggcgcggggaagcagtgggaaaatcgcaaggaagccgggtaaggacctttcattttcagccctgctctttaaatactagacataccgtctggcgcatgtcgaggcgtgtattattttgatccagtgcgcgtgccgtatgtgacttggcttggcttcccctgaaagcagcggctgtggggagttgattcggaagtgaagggccctgggcgacccggcgagtagaggcaacaccaacactcctccttagcgaggggtctccccgccgcggtggctgcccggccccaaggacaggagggatttgtgcactgactcctgaccccgtcctccagcgctgctctgaagggagagtctgtgcagtggcacctgcgcgaagctggccaaagcctgcccagacggctcacctgtgcgggatggaacaaaaggtgagcccagggggcctgataaaatgacctcagtagccgcctgtgggaggggaccctgaggaaagcaccatagtgactaccaagcctggatggttttactgcttactttgttattttattttattttattttattttatttattttagagacggagtctcgctctatcacccaggctggagtgtggagtgcagtggcccgaactcggctcactgcaacctctgcctccccggttcaaacaattctgcctcagtctcccgagtagctgggaatacaggtgcactctgcgacgcctggctaatttttgtgttttagtagggacagggtttcaccgtgttgcccaggctggtctcaaactactgagcttaggcaatctgcccacctcggcctcccaaagtgctaatattgcaggcatgagccactgcgcctggctttttattttattttttggacaggcagggcacggtggctcacgcccgtaatcccagcactttgggaggccaaggcaggtggatcacgaggtcaggagatggataccatcccggctgacacggtgaaaccccgtctctactaaaaatacaaaaaaaaaaaaaaaaaaaaaaaattagccgggtgtggggcgggtgcctgtagtcccagctactcgggaggctgaggcaggagaatggcgtgaacccgggaggcggagcttgcagtgagccgagattgtgccactgcactccagcctgggcgataaagtgagactgtctcaaacaaacaaacaaacaaacaaacaggccgggcgtggtggctcacacctgtaatcccaacacttcgggaggctgaggcggcggattacctgatctctggagttcaacaccagcatgaccaacatggtgaaaccccatctctactgaaaatacaaaaattaactgggcatggtggctcacgcctgtaatcccagcactttgggaggctgaggcaggtggatcacgaggtcaagagattgagatcatcttgatcaacatggtgaaaccccgtctctactaaaaatacaaaaaattagctgggcgtggtggtgggcgcctgtattcccagctagtggggagaatgaggctggagaatcgcttgaatacaggagctggatgttgcagtgagccgagatcgcgccactgcactccagcctggcgacagagcaggactccgtctcaaaaaaaaaaaaaaaaaaaaaaaaattcgccgggcttggtggggctgtaatcccacctactcgggaagctgagcctgggcaacaagagcgagactccgtctcaaaaaaaaaaaaaaaaaaaaagatatttgatttggctttagacagtgagtgacctggctgaagccttgggaggttcgcacccggaaagttcaaaaccggccgcctgcgttgtccgcctggaggaggcgcgcagcgtgaaccggagagggcgtgctcggtccctcctcaggtggccgtcgggcagacccttctcctcagcggacggctggacactgtggggacgcctttgtttccgccgctcatggtgtctgaatccacaattcgtttacgtggttgtggagccggactcggcgtcggaaggacggtctccttcaacacaacagtggggctccagcgaaggcggagagacgcggggatcccagccgcaagggcggaccgtgctgcctggccgcggcgggggagggggtgctaccccatacccgggctctaaccgagacgcccttttcttttttcttttttttttttttgagacggagtctcgctctgtcactcaggctggagtgcggtggcgggatcttggctcactgcaagctccgcctcccgggttcacgccattctcctgcctcagcctcccaagtagctgggactacaggcacccgccaccacgcccggataattttttttgtatttttagtagagacggggtttcaccgtgttagccgggatggtctcgatctcctgacctcgtgatccgcccgcctcggcctcccaaagtgctgggattacaggcgtgagccgccgcgcccggccgagacgcccttttcttaagtctccgcagcttgcagtgtaccacccgagcaggtcccggaggcggccgatgctgtttatcactcagaaatttaaagtttgtttgttttgagagagggtctccccactttgcctaggttggagttaaggggcgcgatctcagctcactgcatcctccacctcctgggctcaagcgatcctcccacctcaacctcctgagtagctggaactacaggcatgtgccaccaggcctggctaatatttaaaaaaaaaatttttttttttgaggtcttgctcttgttgcccaggctggagtacagtggcgcgaactcagctcatcgcaacgtccaattcttgggttcaaacaattctcctgcctcagccccctgagtagctgggattacaggcctacgccactgcacctggctaattttttgtatttttaatagaggcggggtttcaccatgttggccaggctggtcttgaactcccgacctcaggtaatttgcctgcctcggcctcccaaagtgctaggattacaggtgtgagccaccgcgcccagcatgtttttaactttttgtagagatggggcctcaatatgttgcccaggctggtcttgaactcctgacctcaggtgatgtgcctgccttggcctcccaaagtactgagattataggcatgagccaccacacggaacctagatcattttttctcaactttttttttcatgatcgccatcttaaagatcctttctagatcttttttcctagtttcccaccacatgatattttaataacatagatataccgtaacgtatatcttttcatgtcctgtggccctttggaaggcaacaaaccattatgttacctaagatttatttccttccccctcacagcctccccatcccactacccccatgcattcataccagaatttattccatacttcattagacattaaattgttttctaaagcttccctatttcatgctgccatgaacaatcttgtaattaaatcagtgcaaaagtaggaatggaatgtatgctttaatgaaatgtatgttttttgatttttgtttttgttttttttttgagctgtttttgtttcttttttgagatttttttttttttgagatgtcgcccaggctggagtgcagtggcacgatctcggctcactgcaagctctgcctcccgggttcacgccattctcctgcctcagcctcctgagtagctgggactacaggcgcccgtcaccacacccagctgattttttgtacttttagtagagacggggtttcaccatgttgaccaggatgatctcaatctcttgaccttgtgatccgcccacctcggccctccaaagtgctgggattacaggcgtgagcccccgcgtcaggccgaaatgtatgcatttatactgcaaatagccctgagcgagagggtgtaccaatttacactccaagcacaatgtaccttgatggcatctccctgcatcctttccagctctcttaattactcttttaaatgatcattaatttgaaaattagttgcaaaggctttgcgttattttatttaatttgcatttctttggttaccactcaaagggacacttctcaagcctatggatcatctgcatattttcttttctttttctttttcttttatttatttatttttttgagacagaatttcactgttgttgcccaggctggagtgcaatggcaagatttcagctcaccacgaccgccgcctcccacattcaagcgattctcctgcctcagcctcccaagtagctgggattacaggcatctgccagcacgcctgactaatttttgtatttttagtagagacagggtttctctatgttggtcaggctggtcttgaactcccgacctcaggtaatccacccaccttggcctcccaaagtgctgggattacaggcatgagcccggtcatctgcatattttcttttgcaaatctcagggttctgtttttttgttttattttgagacagagtcgttctgtcaccgaggctcgagtgtagtggcgtgatctagtctcactgcaacctccgcctcccaggttcaagtgattctcctgcctcagcctccaagtagctgagattacaggcaagtgccaccatgcctggctaatttttgtatttttttagtagagacggggtttcaccatgttggccaggctggtctccaactcttgatgtcaagtgatccacctgccttggcctcccaaagtgctgggattacaggcgtaagccactgcacccagtctacttcatattattaagaaatccatgaaaatataattataatggctataacatgtcttcacataaaataattggagtataacagtttccatcaaatctaaaatatcatcaattttaagtcccaccattattttctgtactactacgaacaaattctggcctggcatggtggctcatgcctgtaatcccagcactttgggaggccgaggcagtcagatcacttgagttcaggagttccagaccggcctggccaacctatctctactaaaaatacaaaaattagcctggcatggtggcatgtgcctatagtcccagctacttgttgggaggctgaggcaggaggatcacctgagcctgggtgggggaggttgcagtgagccaagatcatgccactgcactccagcctgggcgacatatcatcattattattactttttttttttttgagacggagtctcgctctgtcacccaggctggagtgcaatggcgcgatctcggctcactgcaagctccgcctcccgggttcgagccattctcctgcctcagcctcccgtgtagctgggactacaggcgcccgccaccacgcccggctaattttttgtatttttagtagagacggggtttcactgtgttatccaggatggtctcgatctgctgaccttgtgatctgcccacctcggcctcccaaagtgctgggattacaggcgtgagccgccgcgcccagccgggttatttatgattgcatttattttcttttctttgaggcacagtctcgctctgtcacctaggctggagtgcagtggtgtgatcttggctcactgcaacctctgtctctggggttcaagccatcctcccacctcacactcctgtgtagctgggattacagacgtatgccaccacacccggttaatttatcttttttcctacacttgatctttgccaaaaggatgagatgtgataatgtagtagagacggggtttcaccgtgttggccaggttagtctggaactcttgacttcaagtgatcagcccaccatggcctcccagagagctaggagtacagggtgagccaccatgcccagctgatatcattggttttaaaacacattcctggccaggtgcggtggctcatgcgtgtaatcccagcaatttgggaggctgaggtgggtggatcacctgaggtcaacatggcaaaacccggtctctactaaaaacacaaaaattagctgggtgtggtggcaggcacctgtaaacccagctactctggaggctgaggtaggagaatcgcttgaatctgggaggtggaggttgcagtaagccgagatcatgccattgcattccagcctgggtgacagagcaagactccatctaaaataaataaataaatacaaatttttaaaaaagcagaagaaaataaataaaacacattcctatcttattgaggctaagctgtacaaaatgtgtcttacaaatgatactaaagataacaaatatgtgctcaatctctggatgggaaagggctttctaaacttaaagacaaacctcaaaggaacatatccatggctttgacatcaagaaatttaaaacttctatatgtccaaatattaaaaagcaatcataggccgggtgcagtggctcacacctgtaatcacagcactttgggaggctaaggtggatggatcacttgaggttcggagttccagatcaacctggccaacatggtgaaaccccatctctactaaaaatacaaaaattagccgggtgtgatggtgcatgcctgtaatcacagctatttggtatttttttcctttttttttttttgcaatggaatctccctctgttgcccaggctggagtacagtggcaggatctctgctcactgcaacctccacatcctgggttcaagtgattctcctgcctcagcctcccaagtagctgggattacaggcgcccaccaccatgcccggctaatttttgtatttttggtagagacagggtttcaccatgttggccaacatgtctgaaactcctgacatcaagttatccacccacctcagcctcccaaagtgctgggattacaagtgtgagccattgcacctggcatatcccagcaatttgggagattgaggcacaagaattgcttgaacccgggaggtggaggttgcagtgagccgagatcacatacctgcactccaacctgagtgacgaagtgagaccctgtcttaaaaaaaaaaaaggcataaatcagggccgagcatcatggctcacatgtagaataatcccagggctttgagaggccaaggtgggagaattgcttgacgccaggaattcaagactagcctgggcaacatagtgagacccccatcactacaaaaaaaaaaaaaattagtcgggcctggttgaaagtgcctttagtcccagctactcaggaggctgagcttggaggatggcttgagcccaggagttcaaggctgcagtgagttatgattgtgtcactgcacggaacaagacattgtctgtaaaacaaacaaaaaataccaccacaaaaccacaaaaataattaaaaggtaagcaaactgagaagaatgtctggggcaactatcctaagggctaacagccttaataaagagctctgtaaactgtaagaagtatacgaagacattagccgggcgcagtggctcacacctataatcccagcactttgggagcccgaggtgggcggatcatgaggttaggagatcgagaccatcctggctaacacggtgaaaccccgtctctagtaaaaatacaagaaaattagctgggcgtggtggcgggcgcctgtcgtcccagctactctactcgggaggctgaggcaggagaatggtgtgaacctgggaggcggagcttgcagtgagcggagatcgcgccattgtactccagcctgggcgacagagcgagactccgtctcaaaaaaaaaaaaaaaaagaagtataccaagacataaagaccactgaggcaagatgatgaatttttttttttttttttaaagacagagtcctgctctgttgcccaggcaggagtgcagtggtgcaatctctgctcactgcaacctccacctcccaggttcaagtgattctcctgcctcagcctcctgagtagctgggattacaggcacgcgacaccatgcccggctactttttgtatttttagtagagacggggtttcaccatgttggtcaggctggtctctaactcctgaactcttgatccacctgcctcggcctcccaaagtgctgggattacaggcatgagccccacgcgtgggctgatgattaactttttatttaaaaaaacctttggccgagcatggtggctcatgcttgtaatctcagtactttgggaggccgaggcaggcagatcacttgaggtcaggagttccagaccagcctggccaacatggcaaaaccccatctcaactaaaacttaaaaaaaagtagccaggtgtggtggcacacacctgtaatccctctacttgggaggctaaggcatgagaattgcttgaacctaggaggcagaggttgcagtgagccaagattgcaccactgtactccagcctgggtgacagagttagactgtctcaaaaacaaaaccaaacaaaaaaacctttcattgccagccatggtggctcacacctgtaatcccagcactttctctgcgaggctgaggtggaatgattccttgagcccaagaattcaagaccagcctgggcaacaaaatgagaccccattgctacaaaaaataaataaataaataaataaataaataaataatctgagcaaggtggcacatgcctgtggtcctacctactcaggaggctgaggcaggaggattgtttgagcccagaaggtagaggctgtggtgagccatgtttgcaccactgcactccagcctgggtgacgggctgtgtctcaaacaaacaaataaaaaataaaaatttaaaaaccttgttttaatataagttggacaatttatatataagagaattggctataagtgtatgaaatgtattctaccttactactattctttttttttttttttttgagacggagttttgctcttattgcccaggctggagtgcaatggcgtgatctcagctgactgcaactgctgcctcctgggtttaagtgattctcctgcctcagtcttgccaagtggttgggattacaggcatgcatcaccatgcctggctaatttttttttttttttttttttgagagggagtctttgtagcccaggctggagggcagtggtgtgatctcagctcactgcttcctctgcctcctgggttcaggtgattctcctgcctcagcctccagagtagctgggattacaggcgtgtgcatgcatagataatttttgtatctttagtagagatggggtttcaccatgttggccaagctggtctgaaactcctgatctcaagtgatctgcctgcctcggcctcccaaaatgctggtattacacgagtgagccaccgcacctggccggactctcttcttgattacctcagccaaagtgccttctgaaatggtaccacaggtgtgtgcttctagttcagtttgtagtagagggcctggtatgtaccgtcattcaccctgcctgctccatctgcatccccctcacatccagcaagagttttcctttacacagggtttacggctcccctgctgatcacctgccaaagccttctctcggagataacacccttgccaaggcctaagtggcctttgaagatcaggccctgcttagctctgggctcctgtctttcttttgatgtcctctctactttttctcaaacctgtcaaaactggattcggactctgtggcactggggttggaaacatgctttgtccgcatcttcccagggtggcactcaggcttgcactagctaaggtagctctgcggcagggtccagcactaccttattgttaatttgtgtattgtctgtgtccactaaagctggggtgaggaaggcagccaaatcagacatggggaggcctgggaggctacggcatcttaggttttgggcagtgctgctagaaaccacgaacattagtcatctcgcagcatgtgtgcacatggggtgacccgggggcctcctcgaatgcagcgtctacgcctggtgaatggacgcactcttaccaattctgctctgggagatgcagcggtaacctaccgagcgcagaggccggcgcgcacccgtggagcccgcgctcgcgatccctcctcgtgccagggccccagggcagtcaaggcctgccgaccgttaggcgggtcaaggggtacacagggtgcgaattcgttaggcaaaagctgggtacaggcgcgagccacaggcacggaaacctcgcgccgaccggggccctaggcccgacgacggcaggtaaggggaagtggaggcacacagggctgggacgtgccccaggcaccatacgggtggcttcgggcgcgggacgtccgcagccccgcagctcccaggacgttcgacaatctgcagctgaccagcttcggccggtttggggataaagggaagacaggcggcgcggggagtgggaacgcctgaaggccgcgcccctcctttcaggtcggccaggagcgcgccggtaagagcctgggggcaaggggtagaaagacgcccacctcatcacaacccagagctcgggactcctatacagtcccatagggaacaggcggccgccattcccctcccccacgctggcgggtaaggctagagaacggtttcaaggaagacgcatgcgcatgaaataattataaaccgctaggactccgaagttcaatattcgcgggaaggcgcaggcgcaacaaaaagcccggcgggtttatgggtgggggtgctgagcccaaaacccaagcgtgtaataatccgccggcgggaggtgggctggctcttgaaattacgcatgcgccagagctctttgtgacgcaacggggcggtgcgggcagctggctgcgcgtgcgcagaactcgcacaagggaccttatttaggttgcgcaggcgcccgctggccatttcgtcttagccacgcagaagtcgcgtgtctaggtgagtcgcggtgggtcctcgcttgcagttcagcgaccacggtgggtaccgtttttgcgaggattgtttgtccccatatctctgggagggccacggggaccttggcgagctgcaggctgccgtcgagagccgcgagtggttcgctgaatctcggcaccgccgctgaggcctgcaggccgcgccgactctattgtgtgagaagtcggaggaggcggagcggaagcggccgccgccatttcctttcctctacgctggctctcggcccgggcccccacggttcggggcgccgacagctgttgctcaggacagctttgggggtccggtcgccggacgaggaggtgttggagtcgccggggtgggtgcatccgcccggtttttgctccgtgggggggcggtgcgggcccgggcgcgcctcggaggcgaaggacagcttaattggcgctctcagttctggtcctccccgctttgcagtttgtttcgacgccggaccgcgtaagagacgatgatgttgggcacggaaggtggagagggattcgtggtgaaggtccggggcttgccctggtcttgctcggccgatgaagtgcagaggtttttttctggtgagttagaactaggacgcgggagttcgagttcgaggccggggcgggcgggctggcgggcggccgggctggggcggggcggggcggggcgggccgggccgggccgggccgggtgggacccggggcgccccctggcgaggcgcgggcgactacactcaccgctgtgctgctcgcgcccggcggcccgctgttacgcaatggaaatttcgaaagccccgcccgtcctcctggcccttgggggagtgcggcaggtttggcagactttgttttctttacctatctttgaacaccagcttttcttttatgggtgtctttttttctttttcttttgagttggagtctctgtcacccaagctggagtgcagtggcgcgttctcggctcactgcaacctccgcctcctgggttcaagcgattctcctgcctcagtctcccgagtgtctgggactagaggcgcgcaccgccacgcccggctaatttttgtatttttagtagagacggggtttcactattttggccaggctggtctcgaacatctgacctcaagtgatccgcccacctcggtttcccaaaatgctgggattacaggcgtgagccaccgcgcctggcccgggtgtcttttttcgaaaggataaattggcataggtgggatttcctcctcaatcttgagaaaatggccgagtgattagacaaataatagtaatgttttgcaatatcttgaagtgtaacctcttgtttccagttttggtgttttcttaaaaaggagcattcttcggaaagttaaaatgtcacgtcttaatttcagttttcctaatcaagatttgataattgaagagtgttttcttatctagttcttaatctggctcactatacagttgaagacactgaagcccagggaagtgtttttgcagtacataggtttcctgaatattttctatcagaatgtccttgttcctattattagactgggaaaaagaaattagactgattaaaattctatttggatgaaattaacagcttttggcaagacgtttgtagtattgacttactatctgaatttagcgttggtaacggaaagcgacctgtaaaacaagaaccaagtacgctggaagccgccttgcagggggcaacactgggtttggcttcagctgtgcaacttggagcattttagcttggtaacactgatcccctttcaggtgagtattgggcttgtaatttgaatttgaatgagaaaccgtaatgtggctactggtaaggtaaaacggataaatgccccagaccaaaacagctcgcaacgaagtatgtttgccgtaaagtcacacagtccaggcttgataatcttctgagaaattgataaaagatgtgtgatgtagacatgagtagcaaggactaaagagataaattcattctgaaactgctttgaatattgtatgttgttgatgggttggaaatatatcaccttaggaatgagtttgtttttttttaattggagttttaggagttggtaatatcgtggtcagtatatataggcttcacaagttatgtaatttgtagtggggacatggaatagacatttcatctgtgtcacccagaggtggttttaggttttaaattctgtattaacggttgttttctttccagactgcaaaattcaaaatggggctcaaggtattcgtttcatctacaccagagaaggcagaccaagtggcgaggcttttgttgaacttgaatcagaagatgaagtcaaattggccctgaaaaaagacagagaaactatgggacacagatatgttgaaggtttgatttacattgccctagttacagtaaataaagcattaaacaatagaggtctcaccccttctgaattttaggtatttgactgcatggaaatggtcatctaagggagtttgtggcagctcttcctagcttatctaaagacccaggaagtctgaactttgttatctaattttccaaaagtgactaattctaagcacctctttcagtattcaagtcaaacaacgttgaaatggattgggtgttgaagcatactggtccaaatagtcctgacacggccaatgatggctttgtacggcttagaggacttccctttggatgtagcaaggaagaaattgttcagttcttctcaggtatgtagtcatgtttgttgctgagcagtgagttttggctagcttatggcaaggtgatttaatagacgttaaagttgagtagcttaggtatttcagtaggttgtaaattgccaatgaattaatgttttcttcctagagaccttcaaataatttaagcccatcttaaaggtggaaatgaagtacttccaaaatgttaactttgcctatatttagtattatagttcagagtagatctttcattgaggattgccctcaacagcttaactactttcctcacattggtgtccagctaagtacctcaagttaaaggtaagatccctttaccagcagatcatcagtgcgatgaattaggttgttgtaaattatggcaagtgtctgtgttgcaagagacacgtatttgggtcatgtgaccagaagcatctaatggtctaattctctttaatgcaaaagtcggtttatgaaagacttggtttaacctgtgtggtataaacttactgaaaatcagatgtagtgagagtagtttgaatgcttgtagtctcagtatctgaaataagtgttttgaaattgttcctgggcctaaagtatttgaatgtttttatgctgaagagctgataagattgcatgtttaacaatgttagataagatatcgtatattttaagtattaatatttatgatgtgatacgctggaagcaggaaatcctttcatggtttagtgtagtatgttaaaaattgatatatgtatcgagtcctaatgtcagaatttttaaaatcaagtctgttttgttttgacactaaattggtgagaattgaatgctgtcaacgttaaatatgaacataatttcatatcttctaggaaagtgctttaagtcctttttgtaagcttgggaatgtatccacggaaaggatttttcatagacggaatttccagaagtgaatcataactactgttagagcataagcatgcatgattgtgctgtgtagatcagttttgttgaaagtttagattgttgtgtttgtcaattataatttaatgtttcagtttttatatgaaatgttgtaaatgtatacctttttaaaaacttgaagttccaataacttaaagcattgaaatataaaatgaggtaaaaggtgttttgaatttagtaaaactgttatttaatgcttaaaacttaattgaattgtataattctcaacattaagttgcatagatatgtgttcttaagttgttgaattcttaatgcatcctgtgttcagcaagttttttttaatatatactgtaccatgggtgtgttaagaatagttatactttataataatggaacttcatattattgcaatgcatatttaaagagtacttgttgaaagcataccattcacctaaagttaaaaattctggtttatttaaagctataagaagaatcatttctgggcttgtgatgttaatattgcccccctactggggttatttgtccttgggttgaagggttggaaatcgtgccaaatgggataacattgccggtggacttccaggggaggagtacgggggaggccttcgtgcagtttgcttcacaggaaatagctgaaaaggctctaaagaaacacaaggaaagaatagggcacaggtggggatggatggttggttggatatgtcacttttcttatggtaaacaattaaatccatattctctctgcttaaaagaagaaattaatgttttgtagtcctaggtaattgatgttttgccatgatttccaaacttgtgtcagtcccacgttacacgcaaactaaattttaggtttgaaatttgtccctagttaattggtctgcttgacaattttgtgagtcttattaaccccaatcaatagagttgagagactatggctttaaaaaattaatgcaaacctggctttagctgtaataacacccacctagaataaattaatattaccataagaaaatgtgatactttctgatcttgtttttaaagttgaaatgcaacaaactttttcttgctgtatataaatattctgcatagtattaataagcatagctttcaagaaattgtcacaaaaggttttattctctttgcttgtgactatttttcattgaagcatgcgcttacctatgctgattcttactaaaagcataggctggggtatttattggcgaaaggaaatgtgtagtgtgggctggactgttggtggaggctggctttttagcccacttgctatacatgctgccaatggatttaagacttgaaatgttgaaagttgagtggaattatttccctcctaaaacatttatttacagtactcctctctacccctaaggttgggctctgcctcagaggagtgagttttttttttttttctataaagtttacattgtcttactatttattgagtgaatttctggtcattgcctatgcaaatataagaaatctggctttaaatattagtcagtttcatggctatgactagattgttttcttgtataactaaatacctgtataaaatgaactaatgttttctctcccctccctaccccttccttatgaacaatgctttaggtatattgaaatctttaagagcagtagagctgaagttagaactcattatgatccaccacgaaagcttatggccatgcagcggccaggtccttatgacagacctggggctggtagagggtataacagcattggcagaggagctggctttgagaggatgaggcgtggtgcttatggtggaggtacgtgaggattcgtaaggttcggcaagtcgtctgttcctttgtctaggtgttttatttgattgattgtactttgtctttcaggctatggaggctatgatgattacaatggctataatgatggctatggatttgggtcagatagatttggaagaggtaaggtaagaattgaatttctcagttgaaggatgcttacactcttgtccatctagacctcaattactgtttttcaggaatgtctgatcacagatacggggatggtggctctactttccagagcacaacaggacactgtgtacacatgcggggattaccttacagagctactgagaatgacatttataatgtaagtgtgagatgaactcacaagtcaatatttcagtatggcagtaagtcagccttattctataaatgtgagcactatgttagaaattttaggttttttttgtaacgttagaaagttggttgaattctttgaaatgccttgtgttgtagtttttttcaccgctcaaccctgtgagagtacacattgaaattggtcctgatggcagagtaactggtgaagcagatgtcgagttcgcaactcatgaagatgctgtggcagctatgtcaaaagacaaagcaaatatgcgtaagtgtgattgagcatttgtgggctcttaacaggtgattgtgtgactaacatttacaatagagaaatggaaaaataaggatatatgagaagtttcctctccagtaatagattaattcttgggggatgcgggggcagtgtgttgaaggtttgggttttaaaaattagtataacggatttgtgatatgcacatcttgaagtgtatatccttaattgacaatacagatgaatatgtaaaggctagattttggagttaaagtagatcacctaagagaagtagctagaatttctttgccaaagtatttgaagttcacagatctgcttgtttaaaaactttataaaagtgcttattctgttttgtttcaccaacaaacattttcaaactttttttttctcatttcagaacacagatatgtagaactcttcttgaattctacagcaggagcaagcggtggtgcttacggtagccaaatgctaggaggcatgggtttgtgtaaatatcactttagtgtcttttttttaagctaaccttgtatgccttttctctcatttcagaacacagatatgtagaactcttcttgaattctacagcaggagcaagcggtggtgcttatggtagccaaatgatgggaggcatgggcttgtgtaaatatcgttagtttttttaaaaaccaaaacgtttatatctgtataagtcaattataagttaagttaatctatttatttaataagtttagcataagaaacttaggcaaagcagtttcttgatatttgagttttgtatctggcttacttaaatccttgtgagttatgaagttccttaggatagataattcaaattaggtttaagtagtcttgggggaggggactacggagtgaaactacttaaattttctaagtataaagtttaaatcaatagcaaaacaggattaagataaatgtgggcataattaggtgtattgacatgcctttgatgtatcaaactgagggggaacccactaaatccagtcaagcagtttcataagatcttcacaaaatgcctctacttacggaatcatgttgattttagtcctgctgatgtgtgtaccgttagcactttggtttatcaatatttgactggctcaaatgatggatagaagggtggcctggttatagacagtaggcagaaggaggcagagggttacagtaatgtaagatcaagactggaaaatgatagctatagaattacaagcccggtaccaccaggtaccacatcacataagaaaaaaggttctaatgttttcttaacttaacagcaaaccagtccagctacgggggcccagccagccagcagctgagtgggggttacggaggcggctacggtggccagagcagcatgagtggatacggtaaagcctgtttgttactgtacttagagtaagttatggtaaagcctgttcattactgtacttagagtaagttatggtaaagcctgttactgtacttagagtaagtcgcaggcaggtgcctttagttgggaagatgcaggctcctttcggtgaaattgggttatgaaatgtatgctttcaatccaaatgtaactgtttttactagctaattttcagaaacaatcattgggagggggaagtgttctttgaattaagaactagtcattgcagctttggaatactgtcgagccagaaaatatctgcctccatgtattaaaacattaaataaagttgttcacttttttgtcttttggttagcattaagtcagttttagacagagggagaatttgaaatagtagaatggtggttgggttcaggatcgtatttattagtcagttaacctaggattggttttatttattttttttcaattggtctaaagaatggtgattttggtattatagtcttaccctacaaaatccttttgcagaccaagttttacaggaaaactccagtgattttcaatcaaacattgcataggtaaatattttctcaaaaaatataaattcccaatagcaaatactgatatgttgtaataatgctttctatagcagtcaatggctctgacttaactccatggaggctgccatttgggcacagtgagttgcctttagtccagcttggttgtctcacttcctgcccaccatgaataggaaaagcaagagacttcccctgtgctcccttttctcaaatgccattcgagggacacattgtgaatgtttatgttaaattttttttaaaaatgccttgtttagctttaaaaatacgaagtaattttgcaatttttgaaaaacactagttttcctttaaacttaatttttcatgttgatcctgaagaatccgttaaaatggtagcacaagagtctggcaagttggtactgcagagaaaaggggttaattgaggcttgtttggagtcgggattcccctttcccaaacatgcgtctcgccacttggacagcagccatttgtactcgtatactttttaaactttttcttggaatactatattttatttgactggtagtctgatattactcctaacttgtcaaattgatctctttgcaggtaaccaaggagcagtgaacagcagctactacagtagtggaagccgtgcatctatgggcgtgaacggaatgggagggttgtctagcatgtccagtatgagtggtggatggggaatgtaattgatcgatcctgatcactgactcttggtcaaccttttttttttttttttttttttctttaagaaaacttcagtttaacagtttctgcaatacaagcttgtgatttatgcttactctaagtggaaatcaggattgttatgaagacttaaggcccagtatttttgaatacaatactcatctaggatgtaacagtgaagctgagtaaactataactgttaaacttaagttccagcttttctcaagttagttataggatgtacttaagcagtaagcgtatttaggtaaaagcagttgaattatgttaaatgttgccctttgccacgttaaattgaacactgttttggatgcatgttgaaagacatgcttttatttttttgtaaaacaatataggagctgtgtctactattaaaagtgaaacattttggcatgtttgttaattctagtttcatttaataacctgtaaggcacgtaagtttaagctttttttttttttaagttaatgggaaaaatttgagacgcaataccaatacttaggattttggtcttggtgtttgtatgaaattctgaggccttgatttaaatctttcattgtattgtgatttccttttaggtatattgcgctaagtgaaacttgtcaaataaatcctccttttaaaaactgca

SEQ ID NO: 606 - DNA, 8620 bp, Homo sapiens
gaaactggagaaggcagtgggtgcagatgacccgacctgactgttcttctgattttaattccaggcacttccctcttggccaggtgagatgctatgatccagaatctcacctgggagagcccacagggcattcttagggctcagtgaaaggatacccccgcaacaggacaggtcttcctttcccatgtgggctctttatccagaacccagagctgcggagagtctggcttctgggacccttgactggggagaaagcaggtgggggccacggagggaaggccccagagcagagaggcaccaggctggctgagcctgggcagctgccctttgccttagctcagtggttctcaaagcctggcccccaggccagcagcaccaacatcacttgaggccactcagccagaaactctgcagtggggcctcgcaatctgttttaacaaaccttccaggtgactctggtgcagaatggtggcaagaactcaaacctggactaggcctgctgggtaagtggagtcccagctctccagtggactcaatgtgggtggcctgggccaagccttcctgtgcctgggccatttctccgtttgtcaagctccaggactggggtaaaggatttgacaaggtctgttgggcagggatggaatcagatgaatatctaagtggaagatatacagacaattgtaactacccctctttctcacatggctctaaaggggaaaacagatgagtgcagttgctttgtctttgggtaaagtcaccaggagctgcctgcctgagtgaaccagacaatttaatgtgtgccatttagtgaggggccttgttttaccaccacatttgaggatggggggagggaagcctttctgttggaatttgtggcccttggacactcctcccacctccaccctttttggcggtaaaagcttttaggtgctgcctctttaagaactcagatccggccggatgcggtggctcatgcctgtaatcctagcactttggaaggccgagatcggtggatcacctgaggtcaggagttcgagaccagcctgaccaaaatggtgaaacccccgtctctgctaaaaaatacaaaaattagcagggcttgatggggcgcgcttgtaatcccagctactcgggaggctgaggcaggagaatcgcttgaacgggtttgaacccaggaggcgaaggttgcagtgagccgtgatcgcgtcattgcactccagcctgggccacaagcgctagacaacgtccagaaaaaaaaaaagagagacctcagttcccatcgaggtggagaaaaaataaccacatttgtttggcatatttgcatttttaatagtccctgaggagttcaggaggaaacagggttttacatccccttttagggacgcaagtaggattgccccaaaaagttccactccgttcacactcagcgagggcccggcaagagccccacctttcacattcattatttcccttactaaccgaggctccgagacgctaaacaagcagcccaaggtcacaccgcagagtgagggcagcagagcctctgcgcctgcctcctcccttcggaccctgccgcgttcccagaggctggactcagcaagctggaacaggaatcgaaccctcaggccctcgtcgccgtcccagccctcgaggaatctgcgccccaggcgaagctgtcctcggaggttcgggagcgtcggagtgacttcccgatcctttcccctgggacccgagggatccctccccccaagtgccgggtcctccccgcggctccccaggggctcctccggccgccctcgctgactcagcgtaatccgagccgcggagggcggcggggttggcggagcccgcccggggttaatcgccgagctttgaacgccccctcccgccccgcccgcctccagcagccgccccgcccctgcggagaagtcccgggctggcgccggcggccacagcggagcagctggagcgatcgaggctgcagcgcggccgccgggcgcagcatgactgccgtcggcgtgcaggtagccggcgcctggcggggcgctgacccggggtgctgccccgccgtgggaggttgggggtgggaggacggagggaggggcgtacccaccgcgagcgccggcgtcgggctgggggtgcgagcgccccccgtgcccgccccctgttgcaaacctgggtccggaggaggctgggcggggagcaacctcggggggcctgcctgcctcacatagctgctcccgaggcgcggactccggctgcttctgctcgcggccttgcaagcacccgaggctcccaaacttcatttggaaagatttttcttctctttggtgtcaccagtgacttactggtcagtttaccataagggtccccctttgtgagaaatgaggcgcgtctggggtggagggacagaatcgacttgcaaagtgaggcttatgtaacagaggatgcgtctcttgggaagttagacctttctgggggtggaggttaggaagaccgtctccctccccaaagctgcgtttggggtgctgggctgggggtggacttgctgagtcgcgcggacacctcagggaaaggctctggcgagggaagaagcccgtgtctccgaagatttggcttctccttagcgtagtgcacgatgtttatgttggctaagaacctacacattcctacccgctccctcgggcctgctgctccccaaagggaagtcagtgggtggcggtaccgctgcccagcgggcgaacttcctttccgcgcaactcgcccgctgcagagtctatccgctggactgtctccaggattagagaggcccgttgacttcgtgtacaaacgctcagccacaacactgacctagtagacaccgttctgcccattgtatagatgaggtaaccgagactcagaagtaaggtgccctccgtggctggccaaggaacagaatcaagattcaaacccagggctttctggctccaaatcccactggctcctcctgcctttacctaacgggagaaaccccacccacaggacacccccaaaaccgcttctatagccaggacctaggcacctgggcgaagccgggcatggggcgcagggaattcctcccctttgttctgggggatgtctggaatcccggccaggcagcatggtgggacagaccaggtgcggtccctcccctctaggagcttacagcccatgtagggagagagacttggaaacagggcatgggggagcgaatgctaaattaagaggtgcaaaagttgccagacggggaagaggaggaagcctggtagcaaggtgggagctcagctggggaggccacaggctccaggtgaagggcgggtgctccggccgcttcgggatgataactcttcatccccacaaccatgacttgccagggggcaaacacaggtaggaagcaagttctgggtcatgcaggcagcggtgggccaggctgcagctgagaggagcagaggcaggccggctcatcaggaggctgtgaacttccaggatgttgacgatggtgatggcctcacctgggtaggggcagagtgggtgatgagggggagcaaatatgggagacatgttggggatgtgcggaatgagttgggaggagcttaatttgtctacctgggggtgctttggttaaggggaacacatgaggccctgggttataggaggaagaccatgacattggactcagtagcccagtagtgtcaagtgaccctattctataggtcactagaaatcatgcaaggttacagatgaaaaaggaaaatgcttacatttttagcagagcagttaagctccagagagatttaagtgattgcctaaaggtaccctgcaggggtcctctaggtcaggggcaggacttgacctccccgctcccttcttttccactgcacacttgtccagctgccctccagtagccgtttcaggccctgcatcactgaaagctggtggagatgccgggtggttaggaatgaagactctatatgtgttattattgttattaatattaatagctaccatgagttgggagcggcccgtgtaccatgcatctttatatacaggatctcatttgattcctgggagtttcagtggtggccagagagtttaaatgaagccctactttggggcaggagcgggaggaaactagatgaggtcagctgtctccactttctgatcctgacgtgacatctaagggcctggagattaaagtccagtctgcctaggacaggtagggctggagaagggacaggacgtgcctgttttccagccagcatgctgtctcgggttaaaaggtttctgggtcctgtgatttgttctctgcctgtggtgctcctcctttttaggaccatttatcattctctagggaccttgtaaccttgccaggtgccttcatggctacgactttcctgcaagtgtcattaacttcattttctagatgaggaaacaagggctcaggaagttaagaaactgcccaaggacaaacacctctaatggtttgtggagtagacacaggttttcaaagtttcctttggtttctttcttaccggtagattttttttttttttgtaataaaatgcaatacagactcctggacccccaatgtcccaagcaggtacagggctcagttgaagtgaggaaggggatgcagagccagcctgctcagcttccctgcccacccggcttcagcactggaagccccaccaggagcatggggacacagtttgagaaccacagcccatactcttagctccatgtttttgaccgcacccaggctgccttcatctcagctaggacccaggctggtcctagctctggcatggcccttgaggcatccctctgcacgcaccttttcctcaccaagagggcatggggcacagggaattcctcccctttgttctgggacatgtctggaatcctggccaggcagcgtgctgggacagaccaagtgcggtccctcccatccaggagcttacagcccatgtagggagggctgtaagggctcagtactgagcccctagcacaaaggccctgtccttagaaggccctagtcagtatttattcgctgaacggattccacctcctgcatatcatacaattgtctgggcagccataaagagcttcattgtgctttaggtgagtgatctcaggcaagtcacctgccctctgcatagtttccttctctgtacacccaccatggagcttcctactttatcaacctcataggtttaagaataaaataggatcctacttaaggcagaggtgctgaaagcaaactgcatccttattcctgtatccctggggttgaaattagcggtagctcctgtgtctggggcatgtgagcagatactcttgctgggctctttgaccacaggagtctcccagaagcagggctttattttatgtctcacacagagaggagtggcccagacctgcctcaggaagcctccatttgcccatggcataggacacaccccatgttcctcactgctccattctcctgggtcctagcagtgaccgtcatgcgtgcctgttttgcatacctcccaaaccgaggtgtaacctgggcagcttctagacacactgcaaagcaggtcatttaatgtatgactgtgcaggagactcagtttaaaggagcttcagacggaagtgacagtggttgccaatgacctttgacttatctcacagctctcccttgagcacccactgaatgcccaggtattggggacacagcagtgcctaaacacagaatgtggtggtgtgggggtagggggcggccttcccagagcacacagtgttggaatgagacagaaataatatgtaactacaaactgtcctcagaatggtgaagaatttgaacaggtgcctgacacagaataccaggaggggcctgactctgggttgagtgggcaggaaagcactctctgtggaggagactttaagctgagacatgaagaatggagaagaggtgttgtcctggaggggtggcaggagctgcagaagagccactacaggcttaagggccagtcatctgaggaaagaaagttctagacatggggagaggggagtgtgctgggagctgaggttgggtggggaggcggagcggattgtgagaggcttgtgggctgtgtaaagagttcctgaagtctttcttttgctttctgggtcagggcttgggtgcagtgcccgggtggtgtccttgaactgtgagatgagacacctcactggacacctagcctggcttgccaggagaccggggtgggggcgcctccttccagggctgaaccggaagtggaggagagctgcaatggccttcccatgcccagaagctgcaggagcagacaatggggttggcaagctctgggtagggtacaggccgcacaggtctgagggcaagatgcaaatgtcactttcagtaccaagaaaaacgaggcaataatctagagtcctgggctgaacgtggacagctcccgaatcatcaggtgggtggggattaggacaaaatcgtgtatcctggggagatggagggaaacagaactgtgtattggtgtgctaatgtctcagtgcttggtacaaccctggcaactctgccaggccgtattcttgttttatgtacaaagaaaccgaggcaggctgcatgctcaaggtcatgggatgcaggcacgacaggttttctgaactcagaactgactcagatttgccagtcggtttggacttctcacccactctgaagatcacaaaagaaagaaaggtcaggaagctcttagtgcctggtgaatactggatggtaaatgctcacaggtctggaagggaggaagggttccccccaaacggtgggtctggtctgttccgggcttcacaggagaccaagcagagaataagacagtgcggagcaggatggagggctcaggggtcttccctgcagaggttcctgggggcgtggcagggctgtggctgacagggtgcttcctacggttttttccaggcccagaggcctttgggccaaaggcagccccgccggtccttctttgaatccttcatccggaccctcatcatcacgtgtgtggccctggctgtggtcctgtcctcggtctccatttgtgatgggcactggctcctggctgaggaccgcctcttcgggctctggcacttctgcaccaccaccaaccagacgatctgcttcagagacctgggccaggcccatgtgcccgggctggccgtgggcatgggcctggtacgcagcgtgggcgccttggccgtggtggccgccatttttggcctggagttcctcatggtgtcccagttgtgcgaggacaaacactcacagtgcaagtgggtcatgggttccatcctcctcctggtgtctttcgtcctctcctccggcgggctcctgggttttgtgatcctcctcaggaaccaagtcacactcatcggcttcaccctaatgttttggtgcgaattcactgcctccttcctcctcttcctgaacgccatcagcggccttcacatcaacagcatcacccatccctgggaatgaccgtggaaattttaggccccctccagggacatcagattccacaagaaaatatggtcaaaatgggacttttccagcatgtggcctctggtggggctgggttggacaagggccttgaaacggctgcctgtttgccgataacttgtgggtggtcagccagaaatggcccgggggcctctgcacctggtctgcagggccagaggccaggagggtgcctcagtgccaccaactgcacaggcttagccagatgttgattttagaggaagaaaaaaacattttaaaactccttcttgaattttcttccctggactggaatacagttggaagcacaggggtaactggtacctgagctagctgcacagccaaggatagttcatgcctgtttcattgacacgtgctgggataggggctgcagaatccctggggctcccagggttgttaagaatggatcattcttccagctaagggtccaatcagtgcctaggactttcttccaccagctcaaagggccttcgtatgtatgtccctggcttcagctttggtcatgccaaagaggcagagttcaggattccctcagaatgccctgcacacagtaggtttccaaaccatttgactcggtttgcctccctgcccgttgtttaaaccttacaaaccctggataaccccatcttctagcagctggctgtgcctctgggagctctgcctatcagaaccctaccttaaggtgggtttccttccgagaagagttcttgagcaagctctcccaggagggcccacctgactgctaatacacagccctccccaaggcccgtgtgtgcatgtgtctgtcttttgtgagggttagacagcctcagggcaccatttttaatcccagaacacatttcaaagagcacgtatctagacctgctggactctgcagggggtgagggggaacagcgagagcttgggtaatgattaacacccatgctggggatgcatggaggtgaagggggccaggaaccagtggagatttccatccttgccagcacgtctgtacttctgttcattaaagtgctccctttctagtcctttttctgcccagaa

SEQ ID NO: 607 - DNA, 44334 bp, Homo sapiens
gttttagcggggactacgatccaggctggagttgcgctcggccggtctgagcgctggcgctgcccggacgccgcggggtccccgccagcccagggcactcggcgcggggatctgcgcgcctcgctctcccttcccgatgccgccgcccggctgctgatcgccgcaccaccttccctcatcggcttgggtccgtggaggtccctgcagaggcaggaagcctccttaggaaagcaggggtaagcgtgcggccccagcgccagtggggaggcgggaattgggatacagggcccactcccgccccggctgccagcctgccactcctcacgtcccccggctggcgagggctcgaggtgtttctgccggggaacccggtgcgcagagggtgtgccgggtgcagctctcactccggcccggcagtagaggggatttgcccttccccacaacttggagctttcattggagaagtttatttgggggatctgcttggaggcctgggaaggggctgcgctcagcgctgagtgggtttggtctagcgatcgggtttccttcccccgattcaaaacccctcaaagccgaattcctctcagttctttgcgccaaaattaactgacctgggagaccctgtacttttctgacagatttgcccaacacccttccgacttggtaactttattttgccatctagcttttcataaggagttactatttttgtagatttttttcttcccagattttcagtattactaagcacactttaggtgtttgagtttgttcgcgtgagttttagaaagttgagggtggctacaactcctggaaatgcccaggatgtgcttagagaagggggaatttcatattgacaaacaagtaacacatatgtagatatttttgtttgaggaaaaaatacctaattgcaaaatcattttctagtgtaattgtgcattacagatggaggtaaattgtttaacactaaaagacctgatcagccccaggcagcccagactagattttgcagttgaagatggggaaaatgcacaaaaggtaagcaaacataaacaccttagtttctaatatgttaaggatggtgatgttgaattcaattaagtgttccaacatgccatttgtatttgtatttaagcataataattaatattgataaacattatagaaacattcttttttaaaaatagagccatccaaaccattattgttggaattctactctcagatatagtgggaaaaataggcaaggttacatgtaatgttgtaaccaatttatataagtcaaaaatatgctggctacagcaatcaaagtttataatacagttgtcaagggtggtgtagctagtgctctgtaggaatgctaagcctcagttcccaggaaaatagacctttgcaggcataaatgctggattattaaagtgctgtgaaatgtcttcataccaatgaactagctcccagagactgttccattcacccaagagtagacctgtgcctactatatagggagataaagtggctgaactcatcagtatattctgaatattttaccatactgttgctagttttgcactgagccattcccttacattttgcaccccttgtgatttgtaagaccaagatgttgttttcaagaacattacaaagtaaactggccataacaatgtctaaactatctgagcatttttaggcacaggcaaatagaaataacaaaccaagttttagaaactttgaatataaatctgtgagtagcaacttgggcattgaacttctccgagctcctggtcttatttttaggcttagcatcaacagtgaaactccttggttgcaaagcaacccaggctcatatgagcctttgaagaatacttgataattgctaatttaggatagatgcgaaattgtatgctcccccatctagggattttttttttgtccggcattttgatttatttttattaggtaaagaaatacagtagttccccttatccacagggaatgtgttccaagacctgcagtgagtacctgaaactgtggataatagtgaaccagattgccattagttggaacacatttctgtttattctgtttatgttttccacccccaaatttagtgccttttccatcttaactaagtacttatgtaccatggctataacttttgcagtttggggtatgacagcaaaactagcatgaatttctctttcattctttacaatttcacagataggagactaattcttacagtagatcttagcaaccttggcgtacgattttctttccttaagtcaagaacgttcaccttttcacttaaaagaagcactttatggcttccctttggcatatccaaattgccagcatcactactcttgtgctttggagccattatgaagtcaaataagagttactcgaacatgagcactgcaataccgtgacagccagcctgaaaacacagtggctgctcgagcaggtagtatctaccgtgcaaatacgctggacaaaggggtgagtcacatccgaagcaggacggagcaggatgacgtgagatttcattacacagaactgcacacaatctaaaactcatgaattgtttatttctggaattttccatgtgatatttttggaccgcagttggccactgaaagtgaaaccacagataaagtgaagattatttaaagtggccttttttttttttttttaattatctaagtcatgagggtggaaatgcccagacttaaagtatatattcagagttttggctttgagagttttagagcaaaactttgttttcctttccaatttggatggttcagccttgaaaaaatacacatccatacatttatataacgtctaagtcagtgctttacttctcttcctctgggtcaatgacttttatcaagtaccttcaacaaagacccttctcctctagcatcagcaagtgctactgtgtccagttgagctttcacattctaatgtgtgtggggaaaaaaaactcaagtgacttaaagagattgggaaagcagtgacaatgtttgaaatagcatttatgagcagggattatgtcaactcaaatagaaggcaagagatgagaacagggtgcttccacagagttactaggaggggcttctgtctgtctttttcatgctgctatgaagtaaaggaaggatgctttctagggataatgaaaacatggggtttaagagccaagaggtcctgggtttgatttcctactttgccatttattagctatgtgacctaaaacaaatatacttagaaagtctttcaacaaatatttttgttccagatgctggggatacggtgatttaatgagtttcctaatctccctaaatccatttttttcttccataaattggaatcaatatataatactccccacattgagtttttgtaaagcacccataggcacatagtcttcacactgttttgaatcagactgatagcctaaagatgaacatgttgtccaccctgccctcagttaccagggagactttcaggggcccagatgtaaaactatactgtgatttggtgagtgctatactaggagtaggaacaaattacctgggcagaaagaagaggaggaaataaattcatgggaagttcagagggagttaaaaagcttcacagaggaaggaacatttgggctaagccttagtggatgaggaagctcaacctacaagaaagcaagagtgaacgagatggacattttaggcagaagtaacagcatgaggtgtgagcattcaaaaaaatgttcaagaaatcaagagtggctggaagctagtggtgctgagttgatccttcttggaatctctccggggaatacctggagtggtgtcttgctggatcagcggtcatttagaggatttctttcttggccatttgcccgttggtcaaggtctgtaagtactgtattatgtatgcatcttcttaccagtcatggagaaacttttctttaaaacataaaggagtttccaacttcattacccgaagttactatgcctcttacctgtttacaatgcacttgacacaacaaaagtggaaaacagtctgggccaaagaggctaggagagctttgtgaaggagctagcacttgagctgtggctggaaggaaggaatactgagtctcaggcaagtagagaggaggggagttagtgaagaagtagaaatgagcatggcatatttggggacaatgcccaaacttaatgggcatgggtgttctttgaatgtcattcatgtctcttgggagtgggtgagaatgaaggtgagttcagtttggaatatgtttgtacctgtgtggtttataggtaaataaatatgtgcagaaagcagcaggtagcctgattttggaattcatgaaaggtcgtaatcaggtccgaacaggaattgtcagcatacaggttgattttaaagctttatacgtgggagtggcaaataatgagagagcggcagagggttgtgtgtgcactcttgcggtttggtttgtaagagtgaaaatagaaggaggctgagaaggcacaatcagaagtatgagaagaaccaggagagaaagaaacagtggtatctcacaagttaagggctgagagttctatagaacaaagaatagtcaacagtcttaactgctgcagtgaggtcaagtaagatattttgccattgacttgatctggcaactgagaggtgacctaagtaagagcagtggatcagaacagactggtagtttgagggacccctaggaggtaggcaggggaaaccctcagtgtggattgcttctagaaagtgtgctctggaaagaaggagagttgttggtccatagctagaaggagacactttctaacatgtagtcattgcaatgagacttaaatagtagacagaatttcaacaggcaaagccagtggcattaaagaggaagtggtggtgtgagcaccagcttagctgtgacaaagtgcagggcaggtttgagtagcagggggactgtttgggcagaatgtgggatgtgcatgagagggaactgaaaaagaagttggctaaatatggcccagagctaatatatacacttgactgtgtatattgtttgagataacatgatcaaagctgtatcggacacaggagcaggactagaaccaagacaacgaagacctttctttggcagcatgaactagtttacctatagtcagtgtgctggtgttattagtaataataatgaacatttgtatagcacttcacagatgacagagtgcttttaccttctgagctcattatcacagcaactctatggtaggtaagccaaggtatattacctctatttatatataagaactagagggccgtttcacaggacactctaatggagggagtgatttccagggtgttgcaggttagatttcctgaagcagatcttacccagaggttaagtgtgcaggaggtttttaggaagtactcttgggatcaatgcctagggaagggacaggaaggcatggaattggacagaaggaaaagtggagctgcaatacagtcacagtggaaatgaccctctggggagttctagggcagccatcagaggagtccagagttggggcaaggaggcctggcttttttttttttttttttttttgagacagaatctcgctgtcacccaggctggagtgcaatggcatgatctcagctcactgcaagctctgcctcctgggttcacgctattctcctgcctcagcctccagagtagctgggactacaggcgcccgccaccacgcccagctaatttttgtttttgtattttcagtagagacaaagtttcaccgtgttagccaggatggtctcgatctcctgacctcgtgatccgcctgccttggcctcccagagtcctggcttttatatgtctgtgctacttctaccagccaatgagtacaggagaggcttcccaggaagtggtgtgatcttggacaagtcagctgtcttcagccaaagcagtccagttatgggatgactgttggcattacttctagcagctggggaatgagtcatgtctgaagagatcagggtacatcccagcatccactccacagctaagcagccttgctagaaaaccttggagatagatactttcatctaaattcctcattttatacctacggaaatctgggcccagacagaatgaacagttatccaggatcaaaaagatacaaacagctgggacacaaatcaggtttccattgcagtgccctttccacagccgtatatgctgtcagcatagcaggacagacagatggagcaaggtgtgactagattgcagttgactttctgtccacctgacaccttagaaaacaattgggttggcatttttttttcttgatgtagaggtgtaatacaatcataacctaccacatgacctagctcccctcctactttaagtattcagtaaactacagtgaaaatatatcaaaatatatgaagaaataatccattctcagttgctccctcgctaaagtaactcttttggaagcaatggagaaggcatgtaaatctctgtccacccagcatgcctggaccacaccctccaccatgaggataccttttggaataactcatcaaagcacagtgttctttgagtatctgcagtgggcaacgcattgtgccaaaaattgcgatgaacaagacatgtggaacttgcttcttgaccttttcaagggcacagtcttgttactgagacaagacacacatcctggaagttaaatagcaatatgatgtgctgtagtatatttagctcgaaatgccagagtgaatggtaataaagaatagaaaagagggaaaagataatagctaagttttatcgagcgctcactatatgccaggaactaatctcataacccttgagattggtatttttatgaacttcattttcggttgagagaaataaagtatagtgaggtacaggaacttgccacactcacccctgctgataagcagcaggggtaggttaactggccctacatcctgtgtatataactatttccccatgctgcctctcgctaggtactagtggggatcagtggcctgctgggtacctttggttggagctgtggaaaagataacttcctcccagtttgtgcccaggacacaggctcatttttaagtgtagaatttcagaaagttctgccttcagctgtttcttgcataccgatgattttacactgaatgaggtcataggtgacctcagccaagttatttgacttctctgtgcctcagtttcttcatctatacaacggaaaaatattagtgcctatgtcacaggattggatgaggagtcaatacatgcaaaatacatgaaacagagcgtggcacatagtaatcagtaatttcccttgagagttcacctgtagaagcctttatcagaatagcacactaacagggacttgttaaaagaggtgggtagatgcagcattctgggccgagtacttactgtagtatgagaaatcgccacttccactgactcctctccttcctcttatactaggaccgaatgttgccatggctagcatgcagcttctgctgatccaaggagcaagagttgccttgcctacacaaactccagtttctcccaatattttacctcttcacacgttgctcatttataggaaaacacttactgtaaccccctgctcaaccaaaacccaagcattcagtagctatacagaatgtacagggaaggagtgactgagaactcatctacctttgtaattatatgacacactattgactggaaaggaatactacagaaagagcagaatctttctgtttttgaatattgaattatcgaattctcatattgaatttttgaaacttttttaggggaaagatacgttttaattacttgttagttccaaaggtggattctatatacttagtccttttttacaatgggcccatcgttagtcttttcttagaattatttaagacagtctacatcaacgggtggtctggaggcagatggtattccacaaactatcaccagggtgcaaaaaattaagaacggaacttgagagttaagcacttaaaaacctcagtagtctagatgtggtggctcatgcctgtaatcctagcactttgagaggccaagatgggatgattacttgaagccaggagtttgagatgaaccttggtaacatagtgagaccccgatctctacaaaaaattaaaaaaggccaggcctggtgtctcatgcctgtaattctagcactttgggaggctgaggcaggagaatcacttgaagccagaagttcaagaccagcctgggcaacatggcaagaccccgtctccacacaaaattttaaaaattagctgggtgcagtggtgtgcacaccactgtagtatgcacaccactggaaatcccagcactttgggaggctgaggtgggaagatcacttgaacccaggagtttgaggctgcagttagctgtgatcatgccactgccctccagcctgggttacagagtgagaccctatctccaaaaaataaaatataagtatttgggtgtagtggtgcatgtctgtggtcccagctacttgggaggctaaggcgagaagattgcacgtgcccaggagtttgaggctatagtgaattatgatcacaccactgtactcaggctgggcaacagagtgagaccctatcttttaaaaaaaaaaaaaaagtaagaaaaataaacctcagtagcaattcagtattgccaccatatctaagcttatgattagtggtctcttcttgttgaagaagctgtgggtcagtttgagtgacaaactcaaatggcaaatcacatctggtgggagttgtgttgcacattagtcctgtgaagtaaggtcacatatcagtttgcaggagtttggaaatctaaaaaaacgagtcctttaccatgggtagtttgagatgcactgctctggagaatgacgttagagagctctctaggttggcttaaaatgtgggattttgttggatgctcttccattaactggtcctgctactaagtgctgtattagcactggtgcacattgaactacagaagcattgttgctcttcactagtcaatgcaaacttgtaagtagtgttttaaaaaaggtgacacttagaaacaatatggactcaacccacattggccctcatagtcctcatctgttataaacatgcaacagtaacagatacgttgtgatttcttttacagagataccatgaaagataggtgtaaaaggagtagcagagtataatctacttctcattggagccactcttctattcccatgactacttttcgttagtcctatcctgatacttttcagccctaaacatatggtcctatttgtattttcaagtcttagtgaatggtgggaacaaagtatactcttagctgatacctgccctttctcattcttgctaaaagtttcttttttaaaataggaaaatatatttgttgatcgatcaaggatggccccgaagactccaataaaaaatgaaccaattgatttatcgaagcaaaaaaaatttactccagaaagaaatcccattactccagttaagtttgttgacagacagcaagcggaaccatggacacccacagctaacctgaagatgctcattagtgctgccagcccagatataagggaccgggagaagaaaaagggactattccgacccattgaaaacaaggacgatgcatttacagattctctacaggtaaacagactgtgctcctcagggattttttagaacttaaacaattttacttgattattaaaaaatcatagaactgtcaacttttcagctcctattgagccaaaagcagtggcaaactgaatatcttttgatttgtagtagaattctcattctatcttatttttcataatgaatgctttcttttctgtatgatactccctggaccagggctcatttaaaaatgataaattattttaaagtaatgatatttaatcatttttatttaatgaaggaatttggattctttaaatgctgctgtgaattttaattttgcccagattttagggataatgttaatgtaaatatttttgatttaggaaattccattattcttatatatgttcagttggttagtttggggctttattgaagttaagccatctttaaattacctgttctgtggggaaccagtgctgttgaataagcagcatgtctatacttcgttaaaaaaaaaaaaaaaggtaattattttcacttcccatcaagctttttctcagacttcctaagaaaagttttgcagatttcagtattcttaaccatttttctctttttggcggatttttcaagctataaaaattgccaaaatgaagaaattgggaagagagaaaaaagatgtctcgaattacaacttgaaattcatagaacagaatgaatttaatctgttatatatcttgcagtggtagagtagcggtagtagtaagagattctttcatgtaactaaatacaaatcacacagtagttcctatgtgcttgaagccagaggaatttcacaattcctttttttaagtctgggctgttctttggcttcctttccgtcttatgtttgatgtggatcacacaaggagctggtctaaggccttaggttcaaatcactagctgggtgagttggggatatcactcaggatctctgcatctcaatttactcacctgtaaaatgagggtcgtggtacctgtcctggttttattggggttctaaaaactaaataagattaaatgtgccttttgttgtcaaaggcatgtaagtattagattttttgtaatttttttgacaaaaatatagcaaagtgaaaatcagccaatgggaatcgttagtgacctctttcgcaaggtaacattgttgatctcttactttggcagaactagttgtttaacacgcccctaaaacaattaaaattttggttttctacccaggctttatagagagattttagcgatcagtcactagaaaggttcaccacctgtaggaagtaaatgcctaaaatttcggtggatttaaaacagactttcttttaaaatctagggctttaatatctttcagcagtgtttcacaatttttggtatacaggtgttatacatcttttgtcagatttatctctaggtttccaaattttttgatgctattgcaaattgtattttttttttagtttcaatttcccatagtttgtttctagtatatacaaatacaattgatttttttgtgtgtgtgtattgatcttgtatccagaaaacttactatactgatgcttttaatgtctgatttattagatcaaagtcaagtgttttaagtagtttttttttttctttctaacttttaagttcagtgggtacatgtgcaggtttgttacatgggtaagttgcattttgcgagtgtttggtgtacagataatttggtcacccaggtaatcagcataatacccaataggtagtttttcaattctcaccctcctctcaccctctaccctcaagtaggccctggtgtctattgttcccttcttactgtcttggggtactcagtgttaaaacagacttttttatacctttttaaaactagtctttattaccttttgatagactatttgatcatgtaaaatacacttatcctttgcagtacctttaacaccatgaatctacctctcagcccaaaaatggatgcgatgtaattaatttacatttctctccccaacagaataaccattcttctgaatttgtatttatagtcttagaggacttgcttttgtcaatcaacatacatcctttaggttcatttgtgttttcgcatgtagctgtagttctttcatggctgtatgatattccattgcatgactacaccacaatttattcattctcctgtttatagccatttgggttgtttgcagtttagggctaatacagactatgctatgatattcgttcttgtttatgtctgctggtgtacatatacaagtttgccttgggcagtggttctcaaaaggtcatctggggacctcagtgtccacagacagtctttcagagagtcaggaggtcaaaactgtttttcataattatacaaagacctttgccatttgaactcccattctctcccaagtgtacactggagtcttccaggaagtacacaatgtggatattgcaacagactgactacaaaaggcaagcacaagaatcagttctcttctattaatccagaaactaaagagatttgaaaaataatatataaaatgcccctttctcacaaaacattttaactgcctcaattttaatttctaacatgctaactatcaatagataacccacataaacaaaaagccctgtggagtcctcagtagtttttaagaacataaaggggtccttggagcaaaaagtttgagaactactgttttgggtacatacctactagtataggtgctacgtcattagatatacagatgttcacaagataatgccaaattgctttccaaagtactatttgcctccccccagaaatatataaacttttagtcacccatatcctctctgacacttgaaattgtcaaatttagtaatttctgctaatctcatgtctatacagtatgtatctttttgtgatatacatttgcttttctttgattactcatgagattaagcttctttccacatgtttactggccaccatgttttttgctcctctgtgaaatgcctgtttgtgttctttgccaattttaattggtttttttttgtcatgttgatttgtaggggttgattatataatgatactaaacctttattatatatgttatgtatctattctttcagttcggtaattgtcttttccctttatgttatttcttgatggacaaaagttcttaagtttaatatagttcattttttccttttaagggtaatgttttttgtgtctgaagaagctcttccctattccaaggttagaaaaatattctccttcattttcttcatttaaaatttgctttacatgaaatccttgatccatttggaattgctttttgtgtatggtatgagtcaagatacaactttgcttttctatacatatcatcagttgtccctgcaccatttattcaggaggtctttctcttccccctagctggcagtgcaactgctttcatattaaaattccatttacatgtgtgtctgtttctgaactcctcctgttccattgtccatccctgccctaataccctattgtaataagcactgatatcaggtaaaatgggaccctcaacttatttttcttcagtgtgtgggctactctgggctgtttgttcttccatgtgtattttagattggattttattgagattgcatttaatctagagattaaaaattaacctctttaagatactgagttttcttatctatgaagacaatatatttcactaaattttaagtattctttaaaatctaagttttaggattttatgcaaatagatttttgctagatttatttctaaaatccttatcatttttgttgctttcgtaaatgatgtcttttcaatttatttgctgttactgttgtacaggaatgcagcagactttaaaaaacatattatcttgtattcaactaccttgctaaattctaaaactatttttaatgatttgtctgaaattcttttgagtttttttgtatgaatagtgacatcttctgcagaaggaaagtagctgattactttccagtccctgtgcctcagtttctttttcgtgtcctcatgcattgactagagtcttcaatatgagatagaagagaaagtgataatgggcatccatattgtttcctgactttaagggaacacgtccaaggttttacaaatagatgtttgctgttgtgttttcatgaatacctttcattgaagaagttctctgttattcctaggtttttttaattgtatttttattatactttaagttctagggtacatgtgcacagtgtgcaggtttgttacatatgtatacatgtcccatgttggtgtgctgcacccattaactcatcatttacattaggtatatctcctaatgctatccctcccccctgcccccaccccacgacaggccccggtatgttattcctagttttttaaaggtgtttttgaaaatcatgaatgactgttaaatttatcaaatgctttttctgaatctgtagaaataattatatcacttttcttttgaatctgtttgttgaaaagccttttactttcttggggcttgaatggagcccctttcaaatgtgggttgaggagacaggatgctagtttaatgtatttacaaataaaaggataaggaagaatatgattggactgccttcattcactttcatcaacctttggtcgattgtaaaatataaaacagtttggtgacagaatgcaggccagtgcgtctgaaacttccacgtcattagaaatcacctagaatcttatgaaaaggcagattctgatacagctgatgcctgagcttctacatctcacaagctcttggtgatgctgattccacaggcctagcgagcgcactagtagctagactgtagcaacctgtaaatgactctcatttttcatttgtcaaacttttgactaatagactcagcctcaaattataaaggagaaaaaaatcagtccagagaagacaatagataaaacattcagggaattagattaggaaatgtattttaactagaatctaggatggtatggattgagatgtccccccagtttgccaacactggccattgccatttctccattaggatgttaactgtgacatcttccccctcccttctatctgccctctgtagcttgatgttgttggggacagtgctgtggacgaatttgaaaagcaaaggccaagcagaaaacagaaaagtttaggactcctgtgccagaagtttctagctcgctatccaagttatcccttgtcaactgagaaaactaccatctccctagatgaagttgctgtcagtcttggtatgtatcatcagattacctggaggtctgtctccagttacagtgggaaactggtttccttgggcaggctgaaggcttgaagtagagtgggcccctcaatcgggtgaagacagaggaacaggcagagcttcctttgtcatcgtcaaatttgttttcattatacatggaatttcagggagccttttagacctgaggaccaaatgaaaatgcagtcttttttaaccttaaaaaatatttctataataagtaatatttttataatagagttacattacaaattagtatctcatattttaaattcatcttacttcagacagacgcaaaactatttagaaatagcctgctttttatttttaataatgcttccaggagttcagaactagtgttatttcaactttgtaaagcaagatttgagaggaagagcattatgtttaaagccctatacaatgattggcacagcaagtgggtcaaattagaaaaaggtcatttggacataactcaaacaactaaaccttataacaaagaagaatccgtgtgtgcacgtgcatgagtgtatgatgtgagatgggtgtgtgtgctggaaatatgtatacacctgcttcagaatagagacccctagtggacattgcagttagttccagagtgaacatattgttgacactcgttaaataagcagaaatcacaatgacatgaaggtgtcagggtgtccccttaaaaataggaaggttttacatacacacaaaaaagaaaaagttctgaacaaatcagctaaataaataaatgatagattataatttttagtttgtttcttagttctatttcttccatatcctagagaaatgtgcccaagtagaggaaagtctacttgaattattcaagctgaaagctaaacagattttggttgttggaaactgagaagaagagacagtgggttatgataagaagaccatgggctgggctttgggtcacatagggctggatttgaagcccagctctctaatttacaggctgtaagagctttaaaaagtgaagtaaccttcttttggtctataacttggaaactgcagcacctaccttgcagagatatagcaaagttagggataatgtcagtaacatgccaaagtcaatggctggcatggagagctcttattatgtggaacagtttctagtcagctcttactagaatgttgataccctagctgtcctgtccatctctataggaagaggaagtagaatgctatggtttgggggccgatttggagcccagaagtataatatagtattctaggattgggggcaattaatcaagaaagggaaagtgagccaactgaacatcaaaaaattgggtccccttgctggccctgggtgtatcagttgcattcacatggcatttctaatgggagggtatatggaatgttatactccctcaacaagatgtgttaatatatgaaaacagactagaataaagaagcaggcagttttaggcaagggactgctgactgctcctgccagcatcttccagtaggcatggtgaaaatccagttgagggcttttgggtccagggtcctagaaagtagtcttacagtaatgaaggtaaaatgaaagatcatctgatatccttttcattggggttcatgaagcctacttcttccatgtacccaacttccattgaggagtgttacactggtgtcactgcagaagacaaaggattagatgttggagggccgtgttacatcccagggaggacagaaaagtggactcctacttttgtatggctgcagatcgttgtgcacatccccatgttatggctgcctggagcagaactccagagatttttccacagcttcccaatgcctcctgatcacccagacctaccaaacaagcatgccatcttttcatgtgacatcataaaatggcgtcccttgctggaagctgtttcactgacgactgtcttttggggttgagtctgaagtctgtgctacatcccaggttacagactgcaggactgtatttaactaaggacgtgcagagcattcaaattgcattgttttccagattccagtgccatgtagatttaacactggatatcatgggtaacagtttagagaactggaagtgacttaatagcacagcctaggaaactgttttctgggctgagaattcttagtaagtcccatcagcaactaagggaagcatagcaaaaattagtaaatccttgaccatataactaatgctgtgattgggattaatagaatgacctcaatacaaaagaaaaagaagactgaatgcaaggaaaactgttctgacagagcaagcccccagagtaacctacgggtcttgagacctgtgaagtggaactttttagtgcaccagccagtggatgggtaaactcagttcagatgaaagaggtaagggattgtgcagacaggcagctctcatgttggttttcaccaaaagcacctactaaacactcactgtgcatcctgagaatcatactgagaatctccaggtggtcagaaacttattttgttttcccttcttgggatgtctagccactagatggagacttaacagcttgttatcagatatcaactaacaaaacagccgggcatatggctggccctggggtgtcagttgcggtcacatgatatttctaatgggaaggtttatagaatgctatgctctaaacaagatgtgttaatacatgaaaacagactggaataaagaagcaggcagttctggacaaggggctgctgcctgctcctgccagcaccttccggcaggcatctggcaccgaagcctgagcttgtgagggtaacaagcctttcagggtcatgagctgaaatattctgatttactgtgaaatgcctcttcatgcatgtgatagaacttcctatcagctctggagttctcattgtaatttggtatatttctcatgttaaatttttgaagggccaacagctacattcagagtctgccctgattatataacagctcctggcaagtgaaatgaaagaaggcttctttgtagctgggctggttttctgcaagatgcctggaggcttttgctatgtgcccaagggcctgttggataacagaatgagtcacagacgtgagatttttaaaatctgtttctactatgacctcttatgctagcagggattttaggtataacgaatgtcatgccaaaaggaatgacaaaagtatgtatttaaaattaacacctactggggactctacagttacagttacatttcatcctcattattatataagataaatacaaaggcacaaaaaggttaaataacttcccaagatcactcagctagtaagggatatatcagggattcaaatgtaggcagtctgacccaagagccccccacccttaacaactataagtatttttgctaggtttaatggacagtttataatcctagctgccttgggagtgttgggaaagtgagtagtgagctgcggagcttcgtgatcagcttgtactggagtctctgtgtttcacttttgggctgtttgccgggttacggtgaatgagaacacagagaattgtctatagccatgatgaacaaaaggagactcccatgttgttccaaccccagctctggcttctttcagcaatatgagaagggtattcaagcccttgacacctgcatttccagttcaaaatagaaaacataatatttgcatccattttccttactggtccattgagagcgttatcaaggtaatttttttatatcattggaacttcacgaaaggatagacagtattgtctaatagggaagtgtcagttattggacacagttgattttgtagtctgcataattaggaacacaagtcacagtcaaccatccatttatcacgtgtccattaggcacactgttacatgtattgctcaggccaccagtttcagctgctgaaatgttcgcgtggtttgcctaatgggtctaaagagcagttgctgtactgtttgtcagacagatggaaatgtcaccatctctagatagatgttttatcttagatttttttaagggttggatctcaagaaggaaaaagaaaaataatttatattgcttgcatccttacaggttgaattccttgagcatccacgcagtgggcattatattggggatcagacaaagtagttcacagatatagtccaggccctcaaggaacttctcttcaaaaatgtttgtctgcatgatgtccatcagcctctgtttttcaaacaggtgtggaaaggagacgcatctatgacattgtaaatgtgctggagtcgctgcatctggtcagccgggtggctaagaatcagtatggctggcatggacggcacagcctgccaaaaaccctgaggaacctccagagactaggagaggagcagaaatatgaagagcaaatggcctacctccaacagaaagagctggacctgatagattataaatttggagaacgtaaaaaagatggtgatccagattcccaggaacaacagttactggatttctctgaacccgactgtccctcttgtgagtccattgtaacttcatgagtaatggcagagaaagagcaagtgatggtctcttctgcagattcactgctcagatgggaagtgccaggttgacaaccctggagggagatgttctcttattctcctcactgaagaaagagaagcagatggctccccaactggactgcccacttgacctcattgaaataaacctggctcatggcagttcactcgagtttggcctgttgggagaatagatcactagcattactcccatttttagattggcagccccatgctggttctttttgtgcaactgtaagatttactttgaaaaagttatattttcaaagaattttatctaattatatactggagtagacttagactacttagaaaagaactccattcacagaaaatgttgataagaaagacagacaacctctgctttcatttggtgcagaatttttatttacatcggcatcgttcttcccgattcatatttagcctcttcttgttttagccattgatcttcatccctgttgctaagatgacaaagtacaagtatcacgtctcacttgcaaatataagaaatggaaagaaaggtgggcctggttttcattagagttactgcctcctgccttttagttccaccccatgagccagtacttatcttaataaccagagaagacagccatctgttggggatggtttgcctgccatccacaggagcacatatctaatctgtctcctgtttatatatagttcatttattcacatatttctgaaaagaagtggaagaggcgggcatcttctatgtttagggtatagtctagatattgcggacacagagaaataaaaatggagtttttgcctttgagaggagagttgaggctctgaaaacaattctgtattcccaccctatctttttatccttctacattaatctttccaagaagttgcttcaggaaaactaccgtatggattctattataggaagtataagtgtaaagcattgagtggtttaaaatatgcatctcagagtttatgcctactgtagagtaattttacaagccacaagaaaatctgcctcatttcttcctgagctgacttctgtgatgtgtatccagtaagcttctgccaatgacaagggtgatctttccatctgctgatagggctagatcattttggcaagctgcaagtatagtctttcttgtagaaaatcatatactttgatgcttttgtttcattccttgtgtagcatctgcaaacagtagaaaagacaagtctctgagaattatgagccagaagtttgtcatgctgttcctcgtctccaaaaccaagattgtcactctggatgtggctgccaaaatactgatagaagaaagccaagatgccccagaccatagtaaatttaaaagtaagaatcttcacctccatcaacttactagcacataaagggtgggatttcatgtgttgatattttctgcttccaagattaaaaatatatatattgtttttgacatacatactcctttcctgcattcatcaaggtttttggtgctgtgagaggtaagttagtcacctactagaattcagcttagagtcctgtcagtgccttttcctcggtggtttcagtagagtgaaaaacagaacactatcctgagaactccggtcagggagggtgtgaattattttgcatttctctttagtattgctgcatccaagacagaatgtctgagttttctttccccttttttccccaccccctgcatactcttctgaagggtggagatgaaaattgtctacaggtaagaaccagaagaatggccagggtaagggtggtgggacatggacagggagagagtttccaagtatcacacccagtgcatcctccttttctgtccatcttggatactgagccaaatgccctgggctgctggtagcctgtaagccctgggaaaccatgagctgcaacatctggctattttttgtttccagctgaaattacagtcaccctatgggtgaaatagctagataaaatcaggattgggaagaagaaagctgcatccagggtgaatgcttcctatttctggatgataattcaaactcctttgcttgatcttaacactgaggtcaagtgggtttcctacctgtaaatcaatttcttgaatagaaaatactttgtggtcattatcgtgcctgtctcatgtgctaccaccccttctgagtatttcctgtactttgtatatatttaagtgtttctcccaaagccacttaagattcaggcaaggcccatccaaccccttctcactgggtggctagaatgctacaatttcaggtgaggagctgcctgtctttagtacagttgtactgttgaccttgagcatcctgtgtgcccaggagtgcagcctggcaggaagctctggggaatctttgtcattttcacagaccagctgccttgtggagctggcgccacagtctcctgcttggagaaactcagggcatgcttttgacgtgccatgtcagaattacatttactaagcttttaattacagcccattccctcccttggtgtttttgcaatcacagtgctccctgtttgtcgccaggtgcctcttgtaagaggtgtgaagttgtggaaatggaaggacacactgaccttcccttagccttcagatactgcaggtacataaatcctgggtgattttatgacagagccactggtctcctcatcccaacctgctgctttccacctgaggtttatatggcagccgagaaaagttacctgtcacataaactaaactgtcatggtgtcacaggcagcatgaccgtaatcgtgttttatatcttcaagcaaaggtacgacgcctctatgacatagccaatgttctgaccagcttggctctgataaagaaagtgcatgtaacagaagagcgaggtcgtaaaccagccttcaagtggatcgggcctgtggacttcagctcaagtggtaaggtggcgtggttttgctagcaggctgttttatttagaattctcagttccttttccaagtctcacatctactacacagtgagactgatctttttcccatgtcacatacaaaatagactagtgactccactcttggaacagttaacattagcctacaaattgtgcatgctggtttgcccacacatggtaggaaaggaaatactgagtgtttataatatgggagtttctgtaactactaatttgcagctctttgttctgaagctttttcctgaaagtttgggaccgagaattaaaaatgacacctcttttgaactccagttgttgctacattagcagagtaaaacgtggtttctctttgaaattctacataatgtaaaaactgtaagtaaaattatgagtaaaaatcacatcagttaccatcacaaaacaaattacatctaaagatgtggttaagattgcatctaaatatagtatggatgtaatggactttttgtatttaaaaggttataaatatcataattttacaaaactggagtcaaagaggatattaatcttctacttatttcatgggtaatatatgagcaatcagggactagatccaactgcaccagctattttacatatagctgtactgcctgggaaaaagccattaaagtcatttttaaattacccttccaattttggtgttagtggtgtaaatgtgagccacttaacccaggcgtataaatatatagctctccacctcacttgtagcacattattcacttaggatctagatgaaaccacttaaaatcaagtataacaaattcaacccagtgcgtatgcactgagtgtggactgtgtgccaatgactatattaagggccctgagagattgaagatgtgggtaacacagtccctacctgcatgaagcatacaactttgcctttttctcctttctgcctctgatttctcccgttcttttcacctgtgaagccctcttcttaacatgaaaatattctcaaccttcaagatctggctcaaatgtcaactcctctatgaagttttcctgatagcccagagcagagtgtctcatctgaacaactgcaattgagtattgtgctgtttgtgctgggtgaggtagatatggtggtgtcgtccctgccctacacatttgagaccagacattatctttatttatccttgattaccccatagtatccagaacagtgccttactcactttagttggttaatgagcttctataattaggcatatagttagcatacatttgaaagttaggagagcaattacatgctagacggggtggtactggctctgtaggcattcagagaggatacagattaagttctgatgggctgttagattttggaggcatgaagagaacatgggatagaaaataatgagatacaatgtgatcagtggggactgcatttttggaaggcctcaaaaattgaggcaagaaatttggactagatgtgatagacagaattaaccaagagtcttcagacaatgattaaaagagaggaaggactcaaaggtggtcgtaccattgaagaaaataagatagctgggctgggcacagtggctcacacctgtaatcccagcactttgggaggccacggcaggcagatcacctgaggtcaggagttcaagaccagcctgaccaatatgatgaaaccccatctctactaaaaataaaaaattagccaggcatggtggcatgcacctgtaatcccagctactcaggagactgagacaggagaatcacttgaaccagggaggcggaggttgcagtgagccgagatcacgccattgcactccagcctgggcaacaagagtgaaactccgtctcaaaaaagaagaaagtaagatagctggaagatgagcggctgttgagaagtcgaggagttcgtgtatttgcacggagggacagaactgggagaactctgatttgacatgagagaaagactttggaggcaagtcaggaatattaaattgaacgtattttctctgccctccagaaacctgatctttctgtattccctagtttcattactgataacatcaagtttcctttgattccttgagccactctccttcaccccttggctagcaattcctcacaaatttcataaatgtctttctcctcttctttcctaccagcagggtacagtgtattacgaatagtgttttctttttaacagctttatcaaggcatcattgatatgcaataaatggcaggaagttaaagttacaattcgataagtttttcataggtatgtacctgtgaaatcatcaagaaaatgaacatatccattaccttcaaaagcctcctcctgccccctttgtaattcctccctcctggtccccactcccatccccagacaaccactgacctgctttctgtcattctgggtttgtttgtattttctataattttttggtaagtgaatcatgtatggttgatcttcgttattcacagatttcatatttgcaaatctgtctacttactaaaatgtacttttaactccaaagtcggtactcagggtgtttccacagtcagttgtggtcatgcacagcttggtggagaatttgggtctcccaatgcacttgttcccagatgaatcaggcggtactctgccttcttgttccagctctcataccataagccagcattctgtttgcagtctttttagtgccactttttcacatttttgtgctttttggctcccaaatattgctgtctagtgtttcttagcacaagaaagctgcattgtgccttatggagaatatacatgtgttatataagcgttgatcaggcatgagttacagtactgttggccaagttcaatgttaataaatcaacaacaaatattaaacaaggtttctttaaaaagaaacacacataaacaaggtcatatattgatcagcttatgaaaatattgtaaccagaggctcacaggaacctaaccctttatgtcccctagaagcaatgggtcagtatttgctaattcagtgtttgcagtgactttatagaacataactactgtgaataatgagaatcaactataacctgtactcttttggtccggctcctttcactcagcataattattttgagattgatacatattgtagcatgtttcagtaatttatttttattactgaagaggctattataaataaagctcctgtgattatttatgtacatgtctttgtatgggcatatgttttcatttctcttgggtaaatacctaggaatggaaaggctgcatcgtatggtaggtggatgtttgaaatttttgagaaacttccaaactgttttccaaagcagttataacattttacattcctaccaacagtatatgagagttctagttcaaccatatcttgccaaaacttgatatggtcagtctttttaattttagccatcctgataggtgtgtagtggtatctcattttggttttaatttgcatttctctagtgattaatgatgttaaacatctgttttgccatctgtttatcttccttggtgaagtgtgtgctcagtttttttgtccatttgttgctattgggttgtttgctttcttattactgaattgtgagagttgtatatacattctgcatacaagtctttttatcagatacatgatttccaaatatttcctctccatctgtggctttgtcttttcattttcttaacagtgtcttttgaaaatcagaagatcttaatcttcaggaagtccactaatgtattagtttttattaattttttctttagtgggacatgctttcagtttttatctaagaaatctttgcctaacacaagatcacacatgtggtgtgaggtatggatcaatggggtgcttttctgaggggatgggaggttgcatatggatatccagttgtaccagcaccatttgttgaaaatattatcctttctctagtaaatttcttttgtgcttttattaaaaacaaattgacgacatatatgtatggtaatgtttctggactttccaaactgctgcattgatctgtttgtctatttggtgtcatgctaatactggcctcttaaaacaagctgggaagtagttactcctcttcagttttctggaagagtttgtgtagaattgttactattttttccttaaacgtttggaagaatttatcagtgaagaattgataaataaataattttccagtgaagtcatttgggtctggtttttatctgtagttaaaaactttctatgtgagaaggtttttaactacagattacaattttttaatagctatagagctattcagattatctctttatagctcctttaactttgagttaactttgagttcttattctagtttctcaaggtggaagctgaaatcattaatttgagacctttcttctcttccaataagcatttagtgctataaattttcctctcagtactgctttagctgtatctaacaaatgtcaatatgtgtgttttcattgtcttccaattcaaaatactttgtattttcccttttgatgtcttctttggcccacaaattatttagacatgtaacatatagtttctaaatattctgggattttccacatacctttctcttagggatttttaatttcatttaatgtaaccagagaatatactttgtataacttgaatcttttaaatttattgagacttgttttatggtacagatagagtccatcttggtaaatatacacaaatatacagagtatatattctgttgtttggtggaacgttctataaatgtccagttcttttatattcttactgattttatgtttacctgttctagcaattattgatagatggatattgaaatcttgattatagttgcagatttgtctgtttcttgttgcagttctttaaagttttgtggaatggattttgaagctctatcatgaactctgtctgcataaatatttaggatcactgtcttcttgatgaactgacccttttatcattataaaatgaccctctttattcctggagataattctttgctctgaaatctactttgtctcatagtgatatagtcacttcagctttctttttattagttagcataatatatattgtttatcctttaaataatttctgtctctatttaatgtgagtgtctggtgggcagtatatagttgaatttttttaaatctaatctgaccatttatgcttttcagttgggttatttaatgaccatttatacttaatatgattcttgatctacttggattttaatctgtcatcttgctatttgtgttctgtttgtcccatttgcttattgtttctttttcctctttttctttcttttggatttataagtatttcttatgcttccattttatctcctttgttggtttcttggctataattctttgttgtgttatgttaatggttcctttagggtttatagtatacagttttaatttgtcccagtctactttcaagtgatagtatactacatgtattgtacaagaatcttgcaataacttgctttcatttctccctgcctggcctttgtgccattgttgtcaaacattttactgctatatatgttacaaaccccatagtgtgttactggggtttttttgtttgtttttttggtagagacagggtttcactatgttgcccaggctggtctcgaattcctgagctcaagtgatccacccgcctcagccttccaaagtgttaggattaggggtgtgaactactatgcctggcccacagttaattaccttttgaagaaactttaataagaaaattgtctaaccctaacccatgttgttaccatttccagtgcttatcatttttttgtaaatgtaagtttccatctaatatttttttctgcctgatgaactttaacatttcttttagtgcaagcctgccaatgatgaattcttctagctgttgtatgtctgagaatgtctttattgtgcccttgcttttgaaaaacatttttgctgggtaaagaattctaggttgggccgggcgcggtggctcacgcctgtaatcccagcactttgggaggccgaggcgggtggatcacgaggtcaggagattgagaccatcctggctaacacggtgaaaccccatctctactaaaaatacaaaaaattagctgattagccaggcgtggtggcgggcgcctgtagtcccagctactcaggaggctgaggcaggagaatggcatgaacccgggaggcgcagcttgcagtgagccgagatcgcgccactgcactccagcctgggcgacagagcgagactctgtctcaaaaaaaaaaaaaaatggagaattctaggttgacgccaggtggtatcgcccatgcctgtagtcccaactacttgggaggaaggtggtgggaggattgtttgagcccaggagttcgagcccagcctagacaatacagtaagacccctgtctcaaataaataaaagaattttgcgttgaagatttttttccttttgttcctttttttaaatttattttattttttttggagacaaaggtcttactctgtcacccaaactggagtgcagtggcgcgatggcatgatcatggctcactgcaatctcaaactcctgggctcaggcaatcatcccacctcagcctcccaaagtgctgggattacaggtgtgagcccacacactcagccttttattaaagaagttgctccactgttttctagcctgcatagtttctggcagggaatcaaccatcatcctattctttatatgtaacatggcatttttccctggttgcttttaagtttctctctatgattggttttaagcgatttgatgatgtatgacttggtgtccttttcttcatgttttgtgtacttggttttgttgcgtttcttggatctttgggtttaaagttttcatcaaatttggcaaattttcggccattacttaatcaagtatttttcctgtcccctcctatttttacagattccacttatgcttgcttttggttacctaaagttgtcccacagtttgctttgttcatttctgtcttttttctcgtttcatttatttattcatttattcatattctttatttctacaatttctaatctgccattaaatgtatacactgtatttttcatccccccactgtattttttttaatctctagaagtttgatttgagcctttatatttttgatgtctctaagacttaacatatccagtctttcccctagtgtcttgaatttatggtatgcaatactagtatatgttttagtgtgctggtctacttctctatcatctgcgtcacttctgggtccatttcaattgatttttctcctcattgtgggtaatattttcagttgtataccagacactgagaattatacattattaggtgatagacatttctgtattcctaaaaatgttcttgagctttgctctgggatgtggtgaagttacatggaaacagtgatgcttttgggtcttgcttttaagtttggcttagcaagactctatcagcttttagtctttagtacgttttccccattactggggcaacaccctttttagtacactaacaaatgcctcctgaattaggaggtttttctactgtagccattggcaacaggcacttttcccagtcctatatgagctgcattgtaccctctagtgcttttgaatggtcctttccctggccttgggtatctttctcacatgcatctgtactccactgaaggttcagtttggacctttgcaaatccccagcattctctttctgtatagctcccctctccagcattctgccctgcaaaccctagctgccttgactttccaggactcccagctctatcctcaacttagggagacctacagtctctgtctaggtccccctcccttcatcccaacctagaaacattctccaggcagtaagcaaaaatcattatagagctcaccctatttgattcctgtctcacagagatcactgtccttcatgtcctgatgtccaaatgtgttgagagccacagttttatgcattatgtccaatattttgtttcaagaaggaggcagatatggcccctattactgacttgacctattttctttttgatttcgtaatttctgatttttctaattgggcttttgttgtaagaaaaagaaaactgtgaaggtgactttttgttgttgtttttcatttttaagttgcattaatgtgaaagcgcatgttttagaaaatataagtccagctgggcctttcagtttattaaatcaatcctctaactaaaatgtgcatgctttgagcttagaaaaacatcagcacaaatgaatatggtagagatgactgtctgtacaacaaggatagctgcctcagtctatatagaaagttgtgtcttaaccccacatatactccgttaaacacaaactgtgtctccagggcctaaccttttattatctcactgttctgcagcatttcaaccatgaggtttctgctgaccttattcctttggtcacgtagtaactgagcctcctactgcataagaaagaaataataaagcatcacagaaaatagagattctcctattcattgctgtaggtctgtggcataggaagctgatctcaattaatcttgaaagtgaatctcaaaatatgcatgttgggctgagcatggtcgggctttcctttgatactctctgctcaaatagagcatctaaaatgtgaggctcattctaattcgggttgaagaacatcttgctctacttctgttgcaattcagataattttagaatatatatggattcaatctcattttatagtcatccactaacttaaaaaaaaaagtacattgaaagaaattggggtttgagacaaggctcataaaattcctttgattgtcttagtttttgatttatagggtgatagctccattacaattataggttcaaagccatctcttaaatagacgaaaattatcctgaattacagctgtataacaacactaccaattctctcgtttatgtagatgaagaactggtggatgtttctgcatctgtcttaccagaattgaaaagagaaacatatggccagattcaagtctgtgcaaaacagaagctggctcgccatggttcttttaacacagttcaggcttctgagaggatccagaggaaagtgaactcagaaccgagcagcccgtacagagaagaacaaggtatctgcccttgcataatctatggagtccatcagttgccatgtagctgtagcccatgccagtgcagcacccacgtgctggcgttttaaaacaaactgactctcagccctggctgttttttccagtggtctactttttacttagctgaagtgaaacaattattggaagcaaaggagatgctgatatcacagtctatgaacatgaccccttgcctaaaattgatcctagtcaccttgtagaccaattggtttggcatagttgaccctatttgatgtatctcagaaattcattagacttaaagcaatgcttgttttaaatacttcttttttctttttctttttcttttgagagaaaggtcactctgtcacccaggctggagtacagtggcatgatcacggctcactgcagccttgacctctcagacttaaagagtcctcccacctcagcctcccaagtagctgggaccacaggcgtgcatcaccatgcctggctaatttttcgttttttgtagagacggggtctccctgtgttgcccaggcttattttgaattcttaatgagacctgaattcatgaacagctagctactgaaaatttctctttgaatcaaaaccataacagatttgagtaatctttgagctgagaataatgaattctcagctagataattctcagtatatagttggtatgtataagtctcttgctatatttgttaagccttcatcttccttttcaggatcaggtggctactctttagaaattggaagcctggcagctgtctatagacagaaaatagaagacaattcacagtaagtagtctataaaagctcagagtgtattcttttctatctcctagtgttaactttgactaaattgcagtgccacccatcaaaagaaaaaatttaggtcagccgtttatttgttaggaattggtaagttttctctttgtgccctacactgtgcaggaagtagcatcagggatacaaaagtatgaaaaatgtatcctgtaagctatgatggcttataggaacaagataaaaagaccaacacggaaaagagacaattcataattaacatgaccctgagaaatgaagtatcagagttccatgaatcacttcatcattatcatagttggttttgccactaactaccaggtaccgttccaggagccttagtgtatattgactcatctgatcataagagcaatcctttgaggttttacagagaggtattaccctcattttacagagaggaagctgaagtgcaaaaaggttatgtaacttgcccagtcacattgctaataggtgacaaagctgggattcatacccaggctgtctgacttaaatttggggcccaattttgaaagaaatcatgtgtcaccagagaaagcagaagaaacgctaaacagagtaattagaaaagtgtttaacaacagatgtgggaagaagcagattacaaggcagggccagggagcagaagataccaaagcctggctcgttttgctgtcatggtttgtccaaacaggacaggaaaaggaaaaatcattcagcaaaagaggttaggtgttggaggcaagtaggtcaagttggcaaaaagctttgaaagccagagaagagttggattcatcagggaaaccataaagagctattggaggttcactgatgaagatcatcctggctactttttgcaggtgggattaggagtagagaaagacaggccacagaacagagcatttgtagtcgttctggtctgctgtagggcagagctgagctgtgctcaccagaggtggaaagaaagggaaaccagtgtgagacagtgagttggcagggctcgctaaaggagacaggcatcagaaagaatgtctgcatgtcaggtgatagtgatgtcattggtggagatggagaagttgaaggtggatggctgggtggagggatggtgggtgatatacccagggtgggcatgttcagtttcacagagctgagcaatacccattactcaaccagaggcagctgattggagagatgactcatctctgcggcccagggtactgcattttattctcagcagcgcagtaggcagtgagatggtaggcaaaacaggtcttccatgattccatcagaaagacggaaagaaatcctggtcctctgtttactgttttttttgttgtgtgtttttattttgttttgttttgttttctgctttttgctttttctttttggagacagagtctcactctgttgcgcaggctggggtgcagtggcatgatctcagctcactgcaacctccgcctcccgggttcaagcgattcttgtgcctcagcctccagagtagctgcgattacaggcgtgtgccaccatgcccagctaatttttgtatttttagtagacacggggtttcgccatgttagccaggctggtcttgaactcctgacttcaggttatccacctgtcttagcctcccaaagtgctgggattacaggcgtgagccaccacgcctggccctctgttcctatttcttaaaggatcgttcttctctattcctaaaaatatactaagaacataaacatggttttaaatatttggaaatttttccaaacaaaaggcccaaacattgtttatatcttatttatttcattttcttattttagagacagggtcacccaggctggagtgcagtggcgtgatcgtagctcactgcagcctcaaactcctgggctcgagcaatcctcctaggccccccacaggaggcatgagccaccctgctggcctataaacttgtacatttatgggacttaattttgattgtgtgctgcctaaaattttgttaataacaccgagcagaatgggacaagaatgacagaaaataataatttagaagataagtttgtttcctcactgtccacttcatttctttcatactggatttgtgaaatgagacaaatgagattaatctttttttaaatcaaagtccagtctctgttactctcccagcgtctctcacagtcactgagaacatgggttttgccatcaaacagatgtgggcatggggcccagcttctcacttcagagctggctcacccgaggcagggtgatcaacctctgcgcttcagtcttcctcgctagtaaactggggaaatgagagtagctattattataataattgcataaaattgttatactattaatgctaattataatagtatgtacatgcctggcaagggtgtaagtgcttgataattgataactatcagatgtggaagagatgaaggaggaatgaatgttcactctcacctgagattccaatggctcttcccacttcggctctcccaccccatcctaaccatttatccaggccatacctgggcgtctaactctgggatgagctaacacgtgctcagcaagtgcgctttcgtatctgcctgaggagtattatctcattcttgatttggcatggctgtctttgggaaagtaaagggtcaggagttggtagaatgtgctaacttcgttacgtttcttttttattataggggaaaagcctttgccagtaagagagtggtgcctccatcaagcagcttggaccctgttgctcctttccctgtcctctctgttgacccagaatattgtgttaatcctttagcccacccagtattttctgttgctcagacggacctgcaggcattctccatgcagaacggtctgaatggacaagtggatgtctcacttgcttctgcagcctctgctgtggagagcctgaagccagcactccttgctggccagcctctagtgtatgtgccctctgcctcactgttcatgctgtatggaagtctgcaggagggaccagcgtcagggtcagggtcagagagggatgacagaagctcagaagccccagccacagtagagctgtcatctgcaccctcagctcagaagcgcctctgtgaggagaggaaacctcaggaggaggatgagccagccactaaaaggcaaagtagggaatatgaagacggcccgctgtcgcttgtcatgcccaaggtaagggagtgcaggtggatgtgtctggtgacatcctgttagccctgagcttcttcctaatgaagatacactgatattaataagcaatggagtctggaatatggagctgtttcatgtcacttgcataattaagcactggagtggctctgccaaaaatcttgccttaaaatagtgcataagaaaggtgatttttataaaactcacactttctataaaatgctaaaaagtataaagaagagttacccagaatcccaccacatagaggcatcactattaacatgtttatatatttccatccagtcttttttacatcctttttttaaaacaaattaggatcactgaaataaacatcttaatccaggatgcagctgagttccagagggaggaatgtgggtgctgtctggctatcagatcttatgcttggtcacttctcttcagtgttcagtgatcctgtttccctagcttcaaaatgaaaagaacaaaagtatgagctgtccacatctcctgcttagtagccattcagaggttaatgagatatgaccagtaaatccagaaagcaggagcactgtcattacagtggtctgcagtaggtaggctgggcacacttcgtggaaatcattacaataattaagaacctttctctattttttttctcttaccagagtgaatttttctcattttgtagatagcctggggttgcagatcagaagtgaaagactgactggcatatgtcttaggtaaccaagacatcttgggccagcccacagttcttataagacccgaaaagactagtatcaacaccctttatgtgtgttactagctcagaaatatatttcacagtctaaccaccatggccagttttccattgctaaaatctcttgtcatttctctacttcgaaatcacaatactatcaatgcacaggacatgaccttttcagaccattcctacaaatacagtggaaacctctgacatacacaaatcagtgtggcacgcagctatatgctacctttatgtgttagcaatattaagaaagctgttattaagatttactaatcccagccgggcgcggtggcttatgcctgtaatcccagcactttggaggccgaggcgggcggatcaccgggtcaggaaatcgagaccatcctggctgaaacagtgaaaccctgtctctactaaaaatacacacaaaacaaaattagctgggtgtggtggcgggcacctctagtcccagctactcaggaggctgaggcaggagaatggtgtgaacccaggaggcagagcttgcagtgagccgagatcgcgccactgcactccagcctgggtgacagagcgagactctgtctcaaaaaaaaaaaagatttactaatcccagtactttgggaggctgagacgggcggatcacctgaggtcaggagttcgagaccagcttagccaacatggtgaaaccccatctctactaaaaatacaaaaattagccaggcatgggggatgcccctgtaatcccagctactcgggaggctgaggcaggagaatcacttgaaccttggagtcagaggttgcagtgagctgggatcgtgccactgcactccagcttgggcaacagagtgagactccatctcaaaaaaaaaaaagagagatttactactggaattttaacttactttcttgcttcctggtttggttgtgtttagaaaccctcagattccacagaccttgcctctcccaagactatgggtaacagggcatctatacccctcaaagacattcatgtgaatggccaactccctgctgcagaagagatttcaggaaaggcaacagcaaactctcttgtttcttctgagtggggaaatccttcaagaaatacagatgttgaaaagccttcaaaagaaaatgaaagcaccaaagagccttctttgctacaatatctttgtgtgcagtctcctgcaggtaagggatgtcatcatgtcttagagtcccttgcggcagtcagatcaagaattggatttttaaatttttgtctgtgtcacctgacccaaagtggcttattgatgtgcctgagtcattttactcttagcccctttgttttctccatctataaatgaagggagaagctgcttctactttcaccaacttcaggagtaatgggaaaataattgaggcaggtgattcaaaaaaaatacattaaacattatttggtgaaaaagcacggtaattcagctgagtctagcattggtttagtataatagtgtgaacctgttggccattgcatgcagctagtgttttgaggtcttgaacatctagaggtactgagtatatagaattgtggccaagtgccaggtctggagtaagagggcttgacatttaaaaccacttattatctgcgtgaacttaagtattcttcatcctcattggttaaacagcagtaataatagcacctgcttcatatgggtgctgtgaaaattgaattaaatttaataagataatacatctaaagcacttagaataatagcacctggcacttagtaagactcaataaatgctgttactattttgtattaaagccgaaatacagatgccagattttaaaaatatgtactttgtacataaagctgctcttgatgcaaagatatctaaattgattttcctcaattccttgttggcttaagcctaacctgctagaacaggttaggttagtatttatgattattcacttatctagaaaaaattctttatttctttagtaagtatcttttagtgctttctctaagcactgagtattggggatacacaaatgaacaaaaatagattcagcccctgctgaatgaaaattacagcccagcacaggggtttttaactttttctgtgccatggaccttttggcagtctggtgaaggccatgaattcctcctcagaatgttacggatgcatagaattaaatacatgggattacaaaggaagccaattatattgaatgcaactagaaaaatcatttttaaaattactgatagtaataaaaagacctggcagcaagcccaatagtgtcaaaatttccaagttgtgatgagcttaacagtatattaagaaatctgtaataggtttaatgtaatatgcacatatctgtactatttcctaatgacaaagtcaaggtactgttaaaattgttaatttgttgcctgtgataattgagggaaataaaaattttcagttaggaacttataaagatattttggccaggcacagtggctcatgcctgtaatctcagcactttgggaggctgaggtaggaagatcacttgagcccaggagtttgacaccagccgggcaacataggaagaacctgtttctacaaaaaataaaaaaaaattagctgggtgtggtggcatgcttgtggtcccagctactctgcagactgaaatgggacgactgcttgagcccaggagggtgaggctacagtaagccatgatcacaccactgcactccagcctgggtaacagagcaagactgggtctcaaaacaaaacaacaaaaaataagtaaataaataaaaataaagatgtaatctttcccatctaagctttttgccttctcagtttgggttcagtggaactcatgttaaaaacttcacaggcaccaactaaatgatcacacagataaatgtgggattacaatcttggccacagctgtgaaggagcagggtgtgggctgtttggcctggtcagctgggggaaggtctcatcattcattgatttattgtggactcccgtttgaaagggccatgacaaatgtgagcttgaatgatatcctcatgatgacatatattgattttcgcctgttctgcttttctttcaggattaaatggtttcaatgtacttttatctggcagtcaaaccccccctactgtgggcccgtcctcaggtcagctgccgtctttcagtgtcccttgcatggtcttaccatctccacctctgggcccttttcctgttctctattctcctgcaatgccgggcccggtttcttctactcttggtgctctcccaaacacaggacctgtgaatttcagcttgcctggccttggatcaatagcccagcttctcgtcggccccacagctgtggttaatccaaagtcgtccacactcccttctgcagaccctcagcttcagagtcagccctcactaaacctaagtccagtgatgtcaaggtcacacagtgtcgtccaacaacctgagtcccccgtttacgtgggacatccagtctcagtagtaaaattacatcaggtgaggcctgaagtttcctgaagacactgtcactctgggaaggggtatgcctgtgtttagctttcattttagccacatgactgccggacagaggcactaggtcaggctccacctggcttccgttgtagacctagagttatctgctccttttataaagcactgagacatgaggtgagagatcctgtgctttaaagacaaaaatgtatgtttttagttgtcattctgtttcttataattagagggacctgttttaggcatagttcggggggatttttgaggaatgctaaatatttttattattttggtgatcttcaagcttttatttcactaggtcaataaaagaagctaccctaaattttaattatacagctataaaaacaatcaaaggaaacagaagtcttgatagtaactcagagattcttagcctgtcagtcatttcttaagatgtgatgtttagagactgtgtgtgtgtataatgtctgtatgtatatacatctataatacatagatgtatatacatctatacatacgcagaaaacatacaaatatacacaaagatacgttatcaatataagttaatgagtctatatttgtcccccaacctccatttgtagttcaagtattcgttgaattcctattacacattaggttgttcacagtgattacttactctcccagacaaagaattatgtttagccaaaaatattttagacaagttattcagaggctcaaaagtttgcgagacattgaaatgaacatgttaggtttgaaacaagatgattatagcataacatagaattttctatcaccatgtgccaggcaccgatctaggcagtgaagatagagcagtgaaccagtgaacaagataatggtccctgccattttatggcacattaagggaataaatatttaacatttaacattaggggataaatattagcaagtaaagagaaagagccaacacacaaaccatgttggcctcacatgctctaaagtgctttacaattatcttatttaattcctacaaccttgtgaagtcagtaattttaccatcgccgttggatggaggaagaaactgagggacaggttgcttaagtaacttgtccacagtggcagagcccagtccctggctccagataccaaagatacctctttggtagactgcctttctgcacccaaaacaacaaatatgaatttaattttcagttgtggtaagcaggggagacaaacggggtaagtgtgataagaaagcaaagaagaaggaacgcctgccttgggatcctaacacacaggtcaagaaagggctgcctttctactcagagatcagaaacaatatgacttcacttctgttttttcttttttcttttttcagtcaccagttccagtgacccccaagagcatccaacgcacacatcgtgagacgtttttcaagacacccggcagccttggagaccctgtcctgaagagaagagaaaggaaccagtcacgaaacaccagctcggcccagaggagactagaaatccccagcggcggcgctgactaacctgccgctttgccaggtgggggtgggatcaaacgccctgagagtcccggatgtccgaggcgggatgcaaaccatcccgtcctgagcacgggtccttcctctctctttcatccacacttctgttaacttcccaccaccatcaatcatctgatttcctgaaagtaattaattgtgcatttaataccagttagagttccgactctgcatggtgtcacagtgaaagcgccgactgacttatggttttgattcaagaatcgtcttattctggaagtagatctgaataggctaccggagccttgtttttctaaaggggggcgctgtctagcacttaactagggtaagcattcttaacatgtatttccacttgccctgagtaaatctgtggtgagagaagcttcctttctgcagtttaaaaaagctactgcttccttaggcttcatcaggaagccaccttcagttgtgaatcctatggtgttatttattttgttcctgaaatgggatttagtgcaaaaagtttacaactacagtctttaacacatttttttcagggtatgacgacttgaatgtttatacttttattctataatttgccctgcacttattttacaacctagtaataatgtggataaatgtatctacatgacacatgtcaagaccaaaataactgtgaatgacacaccttgctgtaaatgaactgtgctaaccctgactgtgggcttgagaacaaagatgaactctagaactctagcagcctaactgctgcttctcaaataactgtgtgaacagtgagatattactgtttgtttctaaaaatcctactgtgcccagtttccttcactacatgccctgcattttttatttaaatatttagctgtagcgccatcagatatggatgccttctaacaattgctgtttgtaaaataaatcaggatggtagaaagtgattatatggaaaattggaacctggatgagaccttttcgttgaattctgaagagtaatgatgtgaaaattgatacagggcaagagatgattcttttgtttttcttctacttcatgtccagaagagtaagagggaaaatggacatatgtttcatatccaagggtattcaaactgtagttagttggtacctctgaaaaatgagaatggtgagcgcacgggttggttgttctagcatgaatacaattctggaaactgttatgcaatttcccttttttaacccacattactttaggggtgcattaagtcgccaaactatactagttctttgtattcctagacttgctgatatttacctctctcttgtctcttcagagtaaatggttcccttctttccttcctactttccttcattctctcttccttccctccttcctacttcttttcttccttcctcttcctctcttaaaactatcttagatgtagaatcctggtgtagggttttattttatttttattttttgacccaataaaatgttatatgaaagaatgaaaatattaatttaagagactctgggagtctgaataaagtagctttatattaactacaggataatattagccttattacccccacaagattttttaaaacttgaggtaggtagctacattaaataaatttgctacttatataaaaatttttatcaacactaaacttttaaagtttacaagttttttttttcttttttacagtcttctatagagttaggttaaaaatgtggttctaaccatcaacaattgcatggttaaatgaccctgaactaaaactgatgggttccctatcaaaacaaataaaaatatacctttttcaggtttcaatctgtgcagggtatatgcatgttaattctaccatgcttaagaacttccacaaaatatttcatggagaggtctgcatttagacggaaacagaaattgcttttcccctcactgttcctgaatgctctatacttgttttaacatttttgctatctttttttattattctgatcatgatatgaccatttaacctcagaattcataattcctgaggggtgttaagaagcagtcccattggtgaggatattatgacttggtgaccattcttaggagtagaaaaccaaggacaattgcttctgtattcagtatccacttcttaatgtggctttatatgtaaaaataataatgcagtggttgtttctgtcaggaaaataaatcttacagaacaactggtggaattgaagctgctgcgctagacttggatattttgggtagtgaagaagcaatggcaatcttgagtctattattgtataatttagtaaaagaaaaaaataatcgttggtggtcctactaagagaatgcagcttttttgagttgtcacagaggctgtgtgtgccctacactgaccagggtttgtaaaaccctttcattctggtacaagagtcgggggtataacttttatacttgaatctacctaccaagtttacatttctcaattcctttttgtaaggtgctatttctgtatttaaataactttcttttaacgtaaagctgctttctgcttatcttattgcactgctagttgtatgtaggtattaattttattgctgcttactgcttttgttttcttattatttagctctgctctttttcctaatggctatattatctatagctatttacttgtaactgtactacatgtaaactgattttttgttctgattttttttctaatatttttaggaaaatattaagctttataaaatagcaataaaaaataattcatttaagaag

SEQ ID NO: 608 - DNA, 1273 bp, Homo sapiens
agcccagtcgccgccgcccgcccacaaagccacaggcaggtgcaggcgcagccgcggcgagagcgtatggagccgagccgttagcgcgcgccgtcggtgagtcagtccgtccgtccgtccgtccgtcggggcgccgcagctcccgccaggcccagcggccccggcccctcgtctccccgcacccggagccacccggtggagcgggccttgccgcggcagccatgtccatgggcctggagatcacgggcaccgcgctggccgtgctgggctggctgggcaccatcgtgtgctgcgcgttgcccatgtggcgcgtgtcggccttcatcggcagcaacatcatcacgtcgcagaacatctgggagggcctgtggatgaactgcgtggtgcagagcaccggccagatgcagtgcaaggtgtacgactcgctgctggcactgccacaggaccttcaggcggcccgcgccctcatcgtggtggccatcctgctggccgccttcgggctgctagtggcgctggtgggcgcccagtgcaccaactgcgtgcaggacgacacggccaaggccaagatcaccatcgtggcaggcgtgctgttccttctcgccgccctgctcaccctcgtgccggtgtcctggtcggccaacaccattatccgggacttctacaaccccgtggtgcccgaggcgcagaagcgcgagatgggcgcgggcctgtacgtgggctgggcggccgcggcgctgcagctgctggggggcgcgctgctctgctgctcgtgtcccccacgcgagaagaagtacacggccaccaaggtcgtctactccgcgccgcgctccaccggcccgggagccagcctgggcacaggctacgaccgcaaggactacgtctaagggacagacgcagggagaccccaccaccaccaccaccaccaacaccaccaccaccaccgcgagctggagcgcgcaccaggccatccagcgtgcagccttgcctcggaggccagcccacccccagaagccaggaagcccccgcgctggactggggcagcttccccagcagccacggctttgcgggccgggcagtcgacttcggggcccagggaccaacctgcatggactgtgaaacctcacccttctggagcacggggcctgggtgaccgccaatacttgaccaccccgtcgagccccatcgggccgctgcccccatgctcgcgctgggcagggaccggcagccctggaaggggcacttgatatttttcaataaaagcctttcgttttgc

SEQ ID NO: 609 - DNA, 8907 bp, Homo sapiens
cgcggatcggacccaagcaggtcggcggcggcggcaggagagcggccgggcgtcagctcctcgacccccgtgtcgggctagtccagcgaggcggacgggcggcgtgggcccatggccaggcccggcatggagcggtggcgcgaccggctggcgctggtgacgggggcctcggggggcatcggcgcggccgtggcccgggccctggtccagcagggactgaaggtggtgggctgcgcccgcactgtgggcaacatcgaggtgaggccgggccgagggcggggacgtcgcgggcgggtcgtttccccggagtcgggttcacctgcccgccacgccggggccctttgctctagtcggggcggcctctcggatcccttaaggcaggcttctcccttccccttaagtctcatctttgaaggagccgtttgccctgacagcccctgctcgagttaccgaatctccgaccccggcatctccccacccgcccctcgggtctccccagggtattggcccgaggaaggggaagccggaggtcgggggtggtggtctcgcccctgtggccttctcgcccccggcggccaagtgcctctaatctccagaagtcacccaccacgcagggcaaggtggctggccaaccagatgggcaggagccaggactgaggttggggttggggtgggagctttactgaagagcctcagccccgccccctcacctcgggggtaactcatgcccagtggcatgaggaatgaatggaatattcattagtgggccctcctccactctcctggggcgaacagagtgggtgaaatcgggcggaaaccttgagaggataaagcaacctggaactccttactctgctcttgacgtggggttgggagccctcagagctcagagaaaaatcaagatggccattttggagcagggaggaatttctgtgctaggctctctctggatgtgccctgtaagctcattctcagtgtcgggctagtgcttagctgcagggctttatctccaccgtgctcaaagtcctcaggcagggaaagggtaaggaggccttgggtgggggcagagggagaaggtatacaggaaggaggactgtcccctcccctgctgctgaccaaaggtatgctttataacccagataatcccaaggtcacctggctccatcactgccccactctttcctccctttatcctattctgaggagctcaggacccagccccagccttggagcccagaggatcaggccagggattaaacaactggattctgtaattctgaagccactcttgccttctcacctactcccctaccgcaagctagccaggaagggggggcctgagccccaaggggatccccaggctgatcactcagtcccagggtgactccatgtctgagaggagaatgcccctgttgtgagggggtgacatgatgttgtagatcattactgaggggaggtagggagatcaggtggcacaggtggggcaacaggaaggcagtgacagggagaaatacattctgagctcatcccttctggttttcttgtggcaggaattttgagtctagaggaggaagcgggaagatgtacaccaggggaggggaaagctgcagtcttccttgcccacagtctgctttgattgattcagtcattgatgttaaagcagaatttgggttctagcttcctacagagaaaactcctgtttcctgaagtgatcaaatgtgggtaaaatctggtgaaggggggtttctgattctcagaggactataccttttgaactcacagaaagtcaaagcagaaaagaatgtcccaagacacccgatcctgtcctttattcctggctcagcttgggaggaggaaggggctccaggccagggcagctggccaagctggccttcctctagggcaccgcacgccccttccccctcgcccacgtctacacagtcaccatcacaaggctcaagtgcccagtcactggcttccaaagaaggccacagaacgtattttcttcttgcctctgaatgtcagcttccccctgggctgcctctcagtggctctgccttctcaggtctttcttggcatgctgagggcctggagatgcacagggggtgttcaatggcacctgccacctgaattgcctcatagtctcctgagaaacctcagaggggagggtggtgcaccagggctcagagagaaagaatctgtcctgactttctgacccctcctttaggtagggagagaagattggcagctgggcttggttgaaaggcatgtctgagaactctgagccagttggctgcagtttgcgaggggaggggaatagttcagagatgagggactggctgacacaatgcagaagaagctgggttaaccagcccagtgactctcgggactggtgtagaagcatgaagtggtggagaggcgcatattacctatgggcagaagaggtgttcctgttgaggaagaggcagaaaagagagagcactccattctctaggtccctggcccctgttccacccaggacttgagtttatttatttatttatttatttatttgagacacagtcttgctctgtcacccaggctggagtgcagtggcgtgatctcagctcctgcaacctccgcctcctgggttcaagtgattcttgtgcctcagcctcccaagtagccaccacacccagctaatttttgtattttcagtagagatagggttccaccaagttagccaaggctggtctcaaactcctgacctcaactggtccacccgccttggccttccaaagtgttgggattacaggcatgagccaccacgcccagccaggacttgagtttatagtgaggtttctccattgataacagccttttcccttcatcactcggggagcactgtcatcccttagactttgaccaaagaggacagacttaggggatgggcagtccaacatcttcgtggctgaaagtcagctgccaaaggagcatgttttatgagtgtgacgggggtcggggtctgaggctggctagggagccgtgggagtgagctgctcaccccagtcagacccctgttgggtttcataggagctggctgctgaatgtaagagtgcaggctaccccgggactttgatcccctacagatgtgacctatcaaatgaagaggacatcctctccatgttctcagctatccgttctcagcacagcggtgtagacatctgcatcaacaatgctggcttggcccggcctgacaccctgctctcaggcagcaccagtggttggaaggacatgttcaatgtaagagctccaagcctccatcttccaggtggagggtggggaggagagaggggagccaggggtttgtgaaccagagtgctgctggggacgggacatctaggaagagggagcttcgggttcccacctggggcatcttgactctctcttggcttcttgccctaccagagggatagagagtggatgaatggccatatcagctcttctcttctttgagcccctggaggtagttcttttttttttttttttttttttttttgagatagagtcttgctttgtcacccaggctggagtgcagtggcatgatctctgctcactgcaacttccgcttcccaggttcaaacgattctcctgcttgagcctcctgagtagctggaattacaggcacccatcatcaatgcccatctaatttttttgtatttttagtagagacagggtttcaccttgttggccaggctggtctcaaactcctgatctcaggtgatctgcccatgttggcctcccaacgtgctgggattacaggcatgagccaccacgcccgacctgaaggtagttcttaaagtctagagtgatttccttgtgttagaagaaagattgttaggggagagaactgctgcctgttgaatgtttcccacttgtcagtcctgtgcctgggtgcttgggaacgtgatgttatgggaagaaaaggaagagagagacaagtgatgatattcttacctagcctcactagtaactatgtgactttaggcaggttggttaccttccttgagcttcagtcttgtcacaattaattgggatgaacacacctctatcatcaatatctggggtcacagctccaatgtcccctggggccaggtaggtacataaaggagtgagggaggttaggaggggtctgtggtgtgtgaggaagcacacagccactgctcaaatcctgcatagttgctctatggtggtgtgggcccagtgtggcctgatttgatgaaattttttttttttttgaggcgaagtcttgctctgtagttaccaggctggagtgcagtggcgtgatcttggctcactgcaacctccgccttctgggttcaagctattctcctgcctcagcctcctgagtagctgggactacaggcgggcaccaccatgcccagctaattttttttgtatttagtagagatggggtttcatcatgttggccaggatggtctgtatcgcctaacctcgtgatccgcctgccttggtctcccagagtgctgggattacaggtgtgagccaccacgcccagctgatcttatgatttctttgagagaagtggggagtctgattttatgtgacacccccccactcccattcactaaaatgacagctccatgagggcaagtattttatctgttttattctctggtatggcttgatcccataagcactgaaaagatagttattgaataaatgaaactttccagtacatgttggaagggtttttaaaatgttttgaaactgtgcacaggccaaacccaactttcaggacatgggttttcaacttctggatggtatgatggggtgatagtagggtataaaagtatcctgagaagttgaaagcagtgtgtgaatggggtgttcttttctccccacaatcctttcccatctgctgacagtagacttagcacctcacagatgcttgggcctggaaatgaagccatgaaaatgaagccctcagccttcttggagatcagagccatggtcctcacccacagcacatgggtctctaaacctggacctcaactcgcccatctgtaaaatgagggacttacattaaattcctacagctcctttcagcttgaacattatctgagtctattaggatcatcctatgaggcatcttctctttccctgcccctgataccctagacctgggagatttactcacctggtcccaggggatctatttctcccactctacctgccaggggctgagttctctgcctcacaagcccacattgccaagaagatgagaaacacggctggaaacctccctgtcctggcacccatctcttcctactgccatgaacaccaagacaggttcacaccaaaggtgttctgttcctcatggcaggctctgccacctgattaagagaaacatctaatctcctgctggttccctctcttcttaagaggagaggcctgaggacctgctgaaagctttatctctgcttgtcctccgggtgaggctaatgagtggggccaacgggtggggcagtgtaggcgctttacagcagacacgccttcagacctctgttccctgaagggtggggatgtgggggtcacctctgccagagggagtaggagtggcaagttacctgaccctctagagtctccgtgcctagtcttgtagatggaacccacgttaaaggaaggcatagaaaggagggtcaggccttctcttctccactcatctcaagggaggggatggggaaggagcagagagtagctgaggaaggtagggagaggctaggctgtgtgccggaggagagagatttgtaagccattttggtaaggattttgagcagtttaggagggagcagggccagagactgtcacagagaagagaagagtagggtatttgggggaagaaatggaaatgattccctatggaattagagggtctgtgctactgttcatagaggagatggccaagacagagtctcctgggtcaggagtgggtttgaagggtttccattcttgtttgcaggaacttggggggtcagccaggtgaggagctacctctgttatcaactgggggttgcggctttagggagaggggcatctcgtgtagaagacaagatgctctgtgcctgtggctggtctccggggggacctggacactgttttggaatgccacactgcccccttcccccctagcattctgtggctccatcacttgctcagttgggccggagtggagacacctcattgccctccctggcctgcaggtgaacgtgctggccctcagcatctgcacacgggaagcctaccagtccatgaaggagcggaatgtggacgatgggcacatcattaacatcaataggtgagggcaggtggccaatgggtaccactcacccaccaggctgggtaatgtgctgcagctcacctgacctctttggacctcagtttccttggtgggaaaatacagatttaatacctgaatggcacaattatggtgagggaaagaataatgttgtcaagtaccagcccctggttggctggaatgggcagcttagccccttccctctacagctgaagcctggggcctctcctgggactaagtgcctcgattcctcaggcctggggatgaaccccacctcatggcacaaagagtactatgtacagtgtctgccactggggagccccagtctgaggggggacatggcctctacctgccttgagatgtcccaatagaaccgtatcagtgaacatacagattagatggagagaattctgacattctgcaccaccaggagagtgcattctgtcgtcagcttagggatgagttccaggaaaaggagggttttccaaagctgtttgaataaccaaaattagattagtgagctgtaggatggccagtagaggtcccctttagaagtcttcccgatgggcatctgggtggtggggctgaccgggtacggcaggagcaccactggtctccctggaacttcattctctcctctttccccttcctctccccacccagcatgtctggccaccgagtgttacccctgtctgtgacccacttctatagtgccaccaagtatgccgtcactgcgctgacagagggactgaggcaagagcttcgggaggcccagacccacatccgagccacggtgaggctgtggcctagccctggtgggcacagggtggcgcaggccctccccacccacacacaccgttcaggaagcccatgttcagaatgtgccgctcagagctcctgggagtggactgggcacagaactgggtgctgctgctccaggcatggccctatgcagcccttcatttcctcatttcactgatccaggagccaacgaccagacttagactttgagctgggagggggctgacctgagggaaagcaagggactgtgggaaaccaggtgcacagtggctggaaaccgggactctgggctcttctcttgaaggccgcatgatcgtgagcgagtcactgaacctccctaagcctcggccttctcacttgtgaaaaggagatgatgagcttttcagggacacttttttgtaaaacgtttacctgacatataggaaaggctctgtagatggtaggtatcattgtggtcactgccagtggcagcttcggagggaggaggccgctgccggatatcaggcagccatcactgtgaagctggggttctgtggcctccatcctctcccctcgacctccccaagacctggcaaagctcagcccctgagaaggccctctctgttggcccagtgcatctctccaggtgtggtggagacacaattcgccttcaaactccacgacaaggaccctgagaaggcagctgccacctatgagcaaatgaaggtggggcctccctctgagcctggtgaagccactgactccctaaatgaaggcagagggaagctcggccttcagactccactcttccagcctttgtggctcctcctggagggttggggtggatgtgtggatgccacagagaagctcagtggtgggagggaatttgagtccattctgtccttgtctcaacccattcccctggtgctctcagtgtctcaaacccgaggatgtggccgaggctgttatctacgtcctcagcacccccgcacacatccaggtgagtctggccctgactgtctactcactggaggaacccaaccagccccagaggaggggagcagggagccctgcagggccaggggagagtgtcacagctgcctcatgccttgtaccttccacagattggagacatccagatgaggcccacggagcaggtgacctagtgactgtgggagctcctccttccctccccacccttcatggcttgcctcctgcctctggattttaggtgttgatttctggatcacgggataccacttcctgtccacaccccgaccaggggctagaaaatttgtttgagatttttatatcatcttgtcaaattgcttcagttgtaaatgtgaaaaatgggctggggaaaggaggtggtgtccctaattgttttacttgttaacttgttcttgtgcccctgggcacttggcctttgtctgctctcagtgtcttccctttgacatgggaaaggagttgtggccaaaatccccatcttcttgcacctcaacgtctgtggctcagggctggggtggcagagggaggccttcaccttatatctgtgttgttatccagggctccagacttcctcctctgcctgccccactgcaccctctcccccttatctatctccttctcggctccccagcccagtcttggcttcttgtcccctcctggggtcatccctccactctgactctgactatggcagcagaacaccagggcctggcccagtggatttcatggtgatcattaaaaaagaaaaatcgcaaccaatc

SEQ ID NO: 610 - DNA, 13947 bp, Homo sapiens
gtgggcaggaactgggcactgtgcccagggcatgcactgcctccacgcagcaaccctcagagtcctgagctgaaccaagaaggaggagggggtcgggcctccgaggaaggcctagccgctgctgctgccaggaattccaggttggaggggcggcaacctcctgccagccttcaggccactctcctgtgcctgccagaagagacagagcttgaggagagcttgaggagagcaggaaaggtgggacattgctgctgctgctcactcagttccacaggtgggagggacagcagggcttagagtgggggtcattgtgcagatgggaaaacaaaggcccagagaggggaagaaatgcccaggagctaccgagggcaggcgacctcaaccacagcccagtgctggagctgtgagtggatgtagagcagcggaatatccattcagccagctcaggggaaggacaggggccctgaagccaggggatggagctgcagggaagggagctcagagagaaggggaggggagtctgagctcagtttcccgctgcctgaaaggagggtggtacctactcccttcacagggtaactgaatgagagactgcctggaggaaagctcttcaagtgtggcccaccccaccccagtgacaccagcccctgacacgggggagggagggcagcatcaggaggggctttctgggcacacccagtacccgtctctgagctttccttgaactgttgcattttaatcctcacagcagctcaacaaggtacataccgtcaccatccccattttacagatagggaaattgaggctcggagcggttaaacaactcacctgaggcctcacagccagtaagtgggttccctggtctgaatgtgtgtgctggaggatcctgtgggtcactcgcctggtagagccccaaggtggaggcataaatgggactggtgaatgacagaaggggcaaaaatgcactcatccattcactctgcaagtatctacggcacgtacgccagctcccaagcaggtttgcgggttgcacagcgggcgatgcaatctgatttaggcttttaaagggattgcaatcaagtggggccccactagcctcaaccctgtacctcccctcccctccacccccagcagtctccaaaggcctccaacaaccccagagtgggggccatgtatccaaagaaactccaagctgtatacggatcacactggttttccaggagcaaaaacagaaacaggcctgaggctggtcaaaattgaacctcctcctgctctgagcagcctggggggcagactaagcagagggctgtgcagacccacataaagagcctactgtgtgccaggcacttcacccgaggcacttcacaagcatgcttgggaatgaaacttccaactctttgggatgcaggtgaaacagttcctggttcagagaggtgaagcggcctgcctgaggcagcacagctcttctttacagatgtgcttccccacctctaccctgtctcacggccccccatgccagcctgacggttgtgtctgcctcagtcatgctccatttttccatcgggaccatcaagagggtgtttgtgtctaaggctgactgggtaactttggatgagcggtctctccgctctgagcctgtttcctcatctgtcaaatgggctctaacccactctgatctcccagggcggcagtaagtcttcagcatcaggcattttggggtgactcagtaaatggtagatcttgctaccagtggaacagccactaaggattctgcagtgagagcagagggccagctaagtggtactctcccagagactgtctgactcacgccaccccctccaccttggacacaggacgctgtggtttctgagccaggtacaatgactcctttcggtaagtgcagtggaagctgtacactgcccaggcaaagcgtccgggcagcgtaggcgggcgactcagatcccagccagtggacttagcccctgtttgctcctccgataactggggtgaccttggttaatattcaccagcagcctcccccgttgcccctctggatccactgcttaaatacggacgaggacagggccctgtctcctcagcttcaggcaccaccactgacctgggacagtgaatcgtaagtatgcctttcactgcgagaggttctggagaggcttctgagctccccatggcccaggcaggcagcaggtctggggcaggaggggggttgtggagtgggtatccgcctgctgaggtgcagggcagatggagaggctgcagctgagctcctattttcataataacagcagccatgagggttgtgtcctgtttcccagtcctgcccggtcccccctcggtacctcctggtggatacactggttcctgtaagcagaagtggatgagggtgtctaggtctgcagtcctggcaccccaggatgggggacaccagccaagatacagcaacagcaacaaagcgcagccatttctttctgtttgcacagctcctctgtctgtcgggggctcctgtctgttgtctcctataagcctcaccacctctcctactgcttgggcatgcatctttctccccttctatagatgaggaggttaaggtccagagaggggtggggaggaacgccggctcacattctccatcccctccagatatgaccaggaacagacctgtgccaggcctcagccttacatcaaaatgggcctccccatgcaccgtggacctctgggccctcctgtcccagtggaggacaggaagctgtgaggggcactgtcacccagggctcaagctggcattcctgaataatcgctctgcaccaggccacggctaagctcagtgcgtgattaagcctcataaccctccaaggcagttactagtgtgattcccattttacagatgaggaagatggggacagagaggtgaataactggccccaaatcacacaccatccataattcgggctcaggcacctggctccagtccccaaactcttgaacctggccctagtgtcactgtttctcttgggtctcaggcgctggatggggaacaggaaacctgggctggacttgaggcctctctgatgctcggtgacttcagacagttgctcaacctctctgttctcttgggcaaaacatgataacctttgacttctgtcccctcccctcaccccacccgaccttgatctctgaagtgttggaaggatttaatttttcctgcactgagttttggagacaggtcaaaaagatgaccaaggccaaggtggccagtttcctatagaacgcctctaaaagacctgcagcaatagcagcaagaactggtattctcgagaacttgctgcgcagcaggcacttcttggcattttatgtgtatttaatttcacaatagctctatgacaaagtccacctttctcatctccaggaaactgaggttcagagaggttaagtaacttgtccaaggtcacacagctaatagcaagttgacgtggagcaatctggcctcagagcctttaattttagccacagactgatgctcccctcttcatttagccaggctgcctctgaagttttctgattcaagacttctggcttcagctttgtacacagagatgattcaatgtcaggttttggagtgaaatctgtttaatcccagacaaaacatttaggattacatctcagttttgtaagcaagtagctctgtgatttttagtgagttatttaatgctctttggggctcaatttttctatctataaaatagggctaataatttgcaccttatagggtaagctttgaggacagattagatgatacggtgcctgtaaaacaccaggtgttagtaagtgtggcaatgatggtgacgctgaggctgatgtttgcttagcatagggttaggcagctggcaggcagtaaacagttggataatttaatggaaaatttgccaaactcagatgctgttcactgctgagcaggagccccttcctgctgaaatggtcctggggagtgcagcaggctctccgggaagaaatctaccatctctcgggcaggagctcaacctgtgtgcaggtacagggagggcttcctcacctggtgcccactcatgcattacgtcagttattcctcatccctgtccaaaggattcttttctccattgtacagctatgaagctagtgctcaaagaagtgaagtcatttaccccaggccccctgccagtaagtgacagggcctggtcacacttgggtttatttattgcccagttcaacaggttgtttgaccataggcgagattctcttccctgcaccctgccgggttgctcttggtcccttattttatgctcccgggtagaaatggtgtgagattaggcagggagtggctcgcttccctgtccctggccccgcaaagagtgctcccacctgccccgatcccagaaatgtcaccatgaagccttcattcttttggtttaaagcttggcctcagtgtccgtacaccatggggtacttggccagatggcgactttctcctctccagtcgccctcccaggcactagcttttaggagtgcagggtgctgcctctgatagaagggccaggagagagcaggttttggagtcctgatgttataaggaacagcttgggaggcataatgaacccaacatgatgcttgagaccaatgtcacagcccaattctgacattcatcatctgagatctgaggacacagctgtctcagttcatgatctgagtgctgggaaagccaagacttgttccagctttgtcactgacttgctgtatagcctcaacaaggccctgaccctctctgggcttcaaactcttcactgtgaaaggaggaaaccagagtaggtgatgtgacaccaggaaagatggatgggtgtgggggaatgtgctcctcccagctgtcaccccctcgccaccctccctgcaccagcctctccacctcctttgagcccagaattcccctgtctaggagggcacctgtctcatgcctagccatgggaattctccatctgttttgctacattgaacccagatgccattctaaccaagaatcctggctgggtgcaggggctctcgcctgtaaccccagcactttgggaggccaaggcaggcggatcaagaggtcaggagttcaagacctgcctggccaacacggtgaaacctcagctctactaaaaatacaaaaattagccaggcgtggtggcacacgcctgtaatcccagctatttgggaagctgagacagaagaatttcttgaacccgggaggtggaggtttcagtgagccgagatcacgccactgcactccaccctggcagataaagcgagactctgtctcaaaaaaaacccaaaaacctatgttagtgtacagagggccccagtgaagtcttctcccagccccactttgcacaactggggagagtgaggccccaggaccagaggattcttgctaaaggccaagtggatagtgatggccctgccagggctagaagccacaacctctggccctgaggccactcagcatatttagtgtccccaccctgcagaggcccaactccctcctgaccactgagccctgtaatgatgggggaatttccataagccatgaaggactgcacaaagttcagttgggaagtgaaagagaaattaaagggagatggaaatatacagcactaattttagcaccgtctttagttctaacaacactagctagctgaagaaaaatacaaacatgtattatgtaatgtgtggtctgttccatttggattacttagaggcacgagggccaggagaaaggtggtggagagaaaccagctttgcacttcatttgttgctttattggaaggaaacttttaaaagtccaagggggttgaagaatctcaatatttgttatttccagctttttttctccagtttttcatttcccaaattcaaggacacctttttctttgtattttgttaagatgatggttttggttttgtgactagtagttaacaatgtggctgccgggcatattctcctcagctaggacctcagttttcccatctgtgaagacggcaggttctacctagggggctgcaggctggtggtccgaagcctgggcatatctggagtagaaggatcactgtggggcagggcaggttctgtgttgctgtggatgacgttgactttgaccattgctcggcagagcctgctctcgctggttcagccacaggccccaccactccctattgtctcagccccgggtatgaaacatgtattcctcactggcctatcacctgaagcctttgaatttgcaacacctgccaacccctccctcaaaagagttgccctctcagatccttttgatgtaaggtttggtgttgagacttatttcactaaattctcatacataaacatcactttatgtatgaggcaaaatgaggaccagggagatgaatgacttgtcctggctcatacacctggaaagtgacagagtcagattagatcccaggtctatctgaagttaaaagaggtgtcttttcacttcccacctcctccatctactttaaagcagcacaaacccctgctttcaaggagagatgagcgtctctaaagcccctgacagcaagagcccagaactgggacaccattagtgacccagacggcaggtaagctgactgcaggagcatcagcctattcttgtgtctgggaccacagagcattgtggggacagccccgtctcttgggaaaaaaaccctaagggctgaggatccttgtgagtgttgggtgggaacagctcccaggaggtttaatcacagcccctccatgctctctagctgttgccattgtgcaagatgcatttcccttctgtgcagcagtttccctggccactaaatagtgggattagatagaagccctccaagggcttccagcttgacatgattcttgattctgatctggcccgattcctggataatcgtgggcaggcccattcctcttcttgtgcctcattttcttcttttgtaaaacaatggctgtaccatttgcatcttagggtcattgcagatgtaagtgttgctgtccagagcctgggtgcaggacctagatgtaggattctggttctgctacttcctcagtgacattgaatagctgacctaatctctctggctttggtttcttcatctgtaaaagaaggatattagcattagcacctcacgggattgttacaagaaagcaatgaattaacacatgtgagcacggagaacagtgcttggcatatggtaagcactacgtacattttgctattcttctgattctttcagtgttactgatgtcggcaagtacttggcacaggctggtttaataatccctaggcacttccacgtggtgtcaatccctgatcactgggagtcatcatgtgccttgactcggggcctggcccccccatctctgtcttgcaggacaatgccgtcttctgtctcgtggggcatcctcctgctggcaggcctgtgctgcctggtccctgtctccctggctgaggatccccagggagatgctgcccagaagacagatacatcccaccatgatcaggatcacccaaccttcaacaagatcacccccaacctggctgagttcgccttcagcctataccgccagctggcacaccagtccaacagcaccaatatcttcttctccccagtgagcatcgctacagcctttgcaatgctctccctggggaccaaggctgacactcacgatgaaatcctggagggcctgaatttcaacctcacggagattccggaggctcagatccatgaaggcttccaggaactcctccgtaccctcaaccagccagacagccagctccagctgaccaccggcaatggcctgttcctcagcgagggcctgaagctagtggataagtttttggaggatgttaaaaagttgtaccactcagaagccttcactgtcaacttcggggacaccgaagaggccaagaaacagatcaacgattacgtggagaagggtactcaagggaaaattgtggatttggtcaaggagcttgacagagacacagtttttgctctggtgaattacatcttctttaaaggtaaggttgctcaaccagcctgagctgttcccatagaaacaagcaaaaatattctcaaaccatcagttcttgaactctccttggcaatgcattatgggccatagcaatgcttttcagcgtggattcttcagttttctacacacaaacactaaaatgttttccatcattgagtaatttgaggaaataatagattaaactgtcaaaactactgacagctctgcagaacttttcagagcctttaatgtccttgtgtatactgtatatgtagaatatataatgcttagaactatagaacaaattgtaatacactgcataaagggatagtttcatggaacatactttacacgactctagtgtcccagaatcagtatcagttttgcaatctgaaagacctgggttcaaatcctgcctctaacacaattagcttttgacaaaaacaatgcattctacctctttgaggtgctaatttctcatcttagcatggacaaaataccattcttgctgtcaggtttttttaggattaaacaaatgacaaagactgtggggatggtgtgtggcatacagcaggtgatggactcttctgtatctcaggctgccttcctgcccctgaggggttaaaatgccagggtcctgggggccccagggcattctaagccagctcccactgtcccaggaaaacagcataggggaggggaggtgggaggcaaggccaggggctgcttcctccactctgaggctcccttgctcttgaggcaaaggagggcagtggagagcagccaggctgcagtcagcacagctaaagtcctggctctgctgtggccttagtgggggcccaggtccctctccagccccagtctcctccttctgtccaatgagaaagctgggatcaggggtccctgaggcccctgtccactctgcatgcctcgatggtgaagctctgttggtatggcagaggggaggctgctcaggcatctgcatttcccctgccaatctagaggatgaggaaagctctcaggaatagtaagcagaatgtttgccctggatgaataactgagctgccaattaacaaggggcagggagccttagacagaaggtaccaaatatgcctgatgctccaacattttatttgtaatatccaagacaccctcaaataaacatatgattccaataaaaatgcacagccacgatggcatctcttagcctgacatcgccacgatgtagaaattctgcatcttcctctagttttgaattatccccacacaatctttttcggcagcttggatggtcagtttcagcaccttttacagatgatgaagctgagcctcgagggatgtgtgtcgtcaagggggctcagggcttctcagggaggggactcatggtttctttattctgctacactcttccaaaccttcactcacccctggtgatgcccaccttcccctctctccaggcaaatgggagagaccctttgaagtcaaggacaccgaggaagaggacttccacgtggaccaggtgaccaccgtgaaggtgcctatgatgaagcgtttaggcatgtttaacatccagcactgtaagaagctgtccagctgggtgctgctgatgaaatacctgggcaatgccaccgccatcttcttcctgcctgatgaggggaaactacagcacctggaaaatgaactcacccacgatatcatcaccaagttcctggaaaatgaagacagaaggtgattccccaacctgagggtgaccaagaagctgcccacacctcttagccatgttgggactgaggcccatcaggactggccagagggctgaggagggtgaaccccacatccctgggtcactgctactctgtataaacttggcttccagaatgaggccaccactgagttcaggcagcgccatccatgctccatgaggaggacagtacccaggggtgaggaggtaaaggtctcgtccctggggacttcccactccagtgtggacactgtcccttcccaatatccagtgcccagggcagggacagcagcaccaccacacgttctggcagaaccaaaaaggaacagatgggcttcctggcaaaggcagcagtggagtgtggagttcaagggtagaatgtccctggggggacgggggaagagcctgtgtggcaaggcccagaaaagcaaggttcggaattggaacagccaggccatgttcgcagaaggcttgcgtttctctgtcactttatcggtgctgttagattgggtgtcctgtagtaagtgatacttaaacatgagccacacattagtgtatgtgtgtgcattcgtgattatgcccatgccctgctgatctagttcgttttgtacactgtaaaaccaagatgaaaatacaaaaggtgtcgggttcataataggaatcgaggctggaatttctctgttccatgccagcacctcctgaggtctctgctccaggggttgagaaagaacaaagaggctgagagggtaacggatcagagagcccagagccaagctgcccgctcacaccagaccctgctcagggtggcattgtctccccatggaaaaccagagaggagcactcagcctggtgtggtcactcttctcttatccactaaacggttgtcactgggcactgccaccagccccgtgtttctctgggtgtagggccctggggatgttacaggctgggggccaggtgacccaacactacagggcaagatgagacaggcttccaggacacctagaatatcagaggaggtggcatttcaagcttttgtgattcattcgatgttaacattctttgactcaatgtagaagagctaaaagtagaacaaaccaaagccgagttcccatcttagtgtgggtggaggacacaggagtaagtggcagaaataatcagaaaagaaaacacttgcactgtggtgggtcccagaagaacaagaggaatgctgtgccatgccttgaatttcttttctgcacgacaggtctgccagcttacatttacccaaactgtccattactggaacctatgatctgaagagcgtcctgggtcaactgggcatcactaaggtcttcagcaatggggctgacctctccggggtcacagaggaggcacccctgaagctctccaaggtgagatcaccctgacgaccttgttgcaccctggtatctgtagggaagaatgtgtgggggctgcagctctgtcctgaggctgaggaaggggccgagggaaacaaatgaagacccaggctgagctcctgaagatgcccgtgattcactgacacgggacgtggtcaaacagcaaagccaggcaggggactgctgtgcagctggcactttcggggcctcccttgaggttgtgtcactgaccctgaatttcaactttgcccaagaccttctagacattgggccttgatttatccatactgacacagaaaggtttgggctaagttgtttcaaaggaatttctgactccttcgatctgtgagatttggtgtctgaattaatgaatgatttcagctaaagatgacacttattttggaaaactaaaggcgaccaatgaacaactgcagttccatgaatggctgcattatcttggggtctgggcactgtgaaggtcactgccagggtccgtgtcctcaaggagcttcaagccgtgtactagaaaggagagagccctggaggcagacgtggagtgacgatgctcttccctgttctgagttgtgggtgcacctgagcagggggagaggcgcttgtcaggaagatggacagaggggagccagccccatcagccaaagccttgaggaggagcaaggcctatgtgacagggagggagaggatgtgcagggccagggccgtccagggggagtgagcgcttcctgggaggtgtccacgtgagccttgctcgaggcctgggatcagccttacaacgtgtctctgcttctctcccctccaggccgtgcataaggctgtgctgaccatcgacgagaaagggactgaagctgctggggccatgtttttagaggccatacccatgtctatcccccccgaggtcaagttcaacaaaccctttgtcttcttaatgattgaacaaaataccaagtctcccctcttcatgggaaaagtggtgaatcccacccaaaaataactgcctctcgctcctcaacccctcccctccatccctggccccctccctggatgacattaaagaagggttgagctggtccctgcctgcatgtgactgtaaatccctcccatgttttctctgagtctccctttgcctgctgaggctgtatgtgggctccaggtaacagtgctgtcttcgggccccctgaactgtgttcatggagcatctggctgggtaggcacatgctgggcttgaatccaggggggactgaatcctcagcttacggacctgggcccatctgtttctggagggctccagtcttccttgtcctgtcttggagtccccaagaaggaatcacaggggaggaaccagataccagccatgaccccaggctccaccaagcatcttcatgtccccctgctcatcccccactcccccccacccagagttgctcatcctgccagggctggctgtgcccaccccaaggctgccctcctgggggccccagaactgcctgatcgtgccgtggcccagttttgtggcatctgcagcaacacaagagagaggacaatgtcctcctcttgacccgctgtcacctaaccagactcgggccctgcacctctcaggcacttctggaaaatgactgaggcagattcttcctgaagcccattctccatggggcaacaaggacacctattctgtccttgtccttccatcgctgccccagaaagcctcacatatctccgtttagaatcaggtcccttctccccagatgaagaggagggtctctgctttgttttctctatctcctcctcagacttgaccaggcccagcaggccccagaagaccattaccctatatcccttctcctccctagtcacatggccataggcctgctgatggctcaggaaggccattgcaaggactcctcagctatgggagaggaagcacatcacccattgacccccgcaacccctccctttcctcctctgagtcccgactggggccacatgcagcctgacttctttgtgcctgttgctgtccctgcagtcttcagagggccaccgcagctccagtgccacggcaggaggctgttcctgaatagcccctgtggtaagggccaggagagtccttccatcctccaaggccctgctaaaggacacagcagccaggaagtcccctgggcccctagctgaaggacagcctgctccctccgtctctaccaggaatggccttgtcctatggaaggcactgccccatcccaaactaatctaggaatcactgtctaaccactcactgtcatgaatgtgtacttaaaggatgaggttgagtcataccaaatagtgatttcgatagttcaaaatggtgaaattagcaattctacatgattcagtctaatcaatggataccgactgtttcccacacaagtctcctgttctcttaagcttactcactgacagcctttcactctccacaaatacattaaagatatggccatcaccaagccccctaggatgacaccagacctgagagtctgaagacctggatccaagttctgacttttccccctgacagctgtgtgaccttcgtgaagtcgccaaacctctctgagccccagtcattgctagtaagacctgcctttgagttggtatgatgttcaagttagataacaaaatgtttatacccattagaacagagaataaatagaactacatttcttgca

SEQ ID NO: 611 - DNA, 85238 bp, Homo sapiens
  misc_feature (12955)..(12955): n is a, c, g, or t
agtttgaggccaacactaggaagtgtctggaaccggatccggaggcttcacaatctatatgttgcctccaaaggtaaataataactttataagacaagtgtagttaaaaaccaatctgtagagctaaactctttttcttacagtaattctttattcaagttcctcttgctgtatttaatattgcctctgttttcttattccatatttaaacatttttttttatcaagaagaaagatcaagtttacttttttcttatgtcccactcgaaaatgtgttctcttcccctgttttctccatttccgctttatctcacagggttaaaatataactgttgaacttctactttttaagcttttgaaaaacaaatgactctctgtcctttagactttttgagttcttactttggacacacatactcaacaaaattctgagttcttctatgtgataattgttttctttgatttggtccaatcattaatgcaaggtttcataagagatctaattaagtgtgaaaggaatctggacctttgagacatatcctttaaccagctcttacttaacctgtcagcagtgttgtatatttaaccacaaaccaaatagagtcaaactgagtgttaattgaaaacagtagcagaacgtcctattcttcctctacactgtattattagaccatacctttggggtataaggaccacctcctgttgatgtgatgtgcttctcctcaaacccctatatttgagatttgttggaacccattatcaggtcactcctgttttcaggcagttgtttcttttctctgggaacttccaggcagtagacaaggtggtccgaatcatctattctgaagccagactgcttgggtcacttcctatagttcgacagccctatgtctctcagcttccttacttataaaatgagagcctagctcatagggttgtagagaaaacgaaatgaagtaactgatgcaaagtgcttagtacagtccctggcatatgggaaacctttaatctatgatagattgctgtcattattatcctcaggtgggagcaaaagtgatgtggcttccttcaaacttacactcccccttacacttagaatgacctcatattaacccatcacattggcccaaggaggtgattatgttccacaggaacctaggcatagttctgctggaggtatagatctaaactggctgacctcgcagggcgtcttttggttatgttattttgggagctggaagttacaactaggtaccataatgtgacttgagacaagaaaagatacatgataaacatcctttttcaacaagtaataagagtcttaatatgcaagtgttgtggctttataattggcaataggtcatttttttcttcagtcttcaaaaatattcattcagttcctttttgccagattgggctgggcagccaggccaagttgtaaacaaaacacagctactgttctcatggagttcaaagcttggtggggaacatgaatgaataccgaaatggtgcaattacaattgggggaagtattgggaaggatatgctcacggtgttatgaaggatatagtgagagatgattcaagaactattagcagtagcaacttctgggagcttgttggcatccataatcctagtccccctgagacctactgaattcagaatccacattgtaacaagatccccagtgttccatacacatcttatggtttgagaagccttgcgaagctcatgtgactaagtgttcctgccatcttattgctctggctattgagctatgtgacatttggacaagttgcttaatctctctgggtctcatactcctcctgcattaaaataaagagagacacaaacaaaaatggcacaaataccacatgctttgcgtatcacatataaatatgtgaatgtcaaatgaattgggcagaaactgacacaaaaatgcataccagaaagtaagggctccacccctcatattgccttatgcccaatttctgcctccaaagaaagaaaaagtaaaaactaaaaggcagaaatgaaatccacaggcagacagcccagcaccacaccctaggcctggtagtgaaagatcgacccccgacctcatcggttatattatctatagattacagacattctatagaaaagcactgtggaaatccctatcctgttttgttcctatctaattaccagtgcatgcagcccccagtcacgtaccacctgcttgctcaatcgatcacgaccctctcacgtgcacccccttagagttgtgagcccttaaaagggacaggaattgcttactcagggagcttggttcttgagacaggagtcctgccaatgctcccggctgaataaaccccctccttctttaagtcggtgtctgaggagttttgtctgtggctcgtcctgctacatttcttggttcactgactggaagtgaggtgattggcagatggttgaggcagctccttaggtggcttaagcctgccctgtagaacatccctgtgggggactcctaccagcccgagtgacgcagatcctgagagcgctcccgggtaggcatttgccccagtgggacgcctcaccagagcagtgtgtggcaggcccctgtggaggatcaacgcagtggctgaactccaggaaggaatgggcacttggagtctggacatctaaaacttgataagactagtctttgaaacttgcccactccgtttgagtgcaagcgtggcctgatcacccatggagtgcctttattggcacttgattttggtttagacttggtttgaattgcttgacaggactggtcttaggaacttgcctactccatttgagtggaagcgtggcctgatcacccatggtgtgcctgtaccggcactttggtttttgtttttgacttgacttggattgcttgatactttagttttggttttgacctggcttggatttctggatactctgattttggttttgattttggtttggtgcaaactgtgtgtatgtgtgtgtgtgtgtgtgtgtgtgtgtgtgtgccctttttacctgttcttttgtggtgtgcgtgtggtgtgagcgtggtgttttgtctcaaagaagagtaggtcaggcacagataagcccaccctactaggaactatgttgaaaaatttcaaaaaagaatttaaaggagactgtggagtactatgacaccaggaaaacttaaaactttgtgtaagagagactggccagcattagaggtaggttggccattagaaggaagcctggacaggtcccttgtttcaaaggtatggcacaaggtaacctttaagccagggaacgcagaccagttcccgtatgtagacacttggttacagctggttttagacccccctcccccaacacacagtggttgagaacagcagcataagcggctggcagaggcaaggaaagatcagcagagagagagaaaggaaagagacagagaggaaaagaggcaaagagagaaaggaagagacagagaggaagagacagacaaagaggaagtcaaggagaaagacagcgagagagaaagaaagagagaggcagagagagagagaggaagagacagaggcaaaaggaaagtaaaagagagagagggaaagacaaagagagaaagaaagagagaaagagagagatatacaagcagttaagaaaaaaaaaagtgtacccattcctttaaaagccaaggtaaatttaaaacctataattgataattgaaggtattctctgtaaccctataacacttcaataccactttgtagtcagcgtaaacaagggagtatcctgaaagcactgaggccttcctatcaaaaatccttaacccagtaacccgcagatggcccaaatgcattcaatctgtagcagcaattgctttgctaacaacaacaacaaaaaagtaaaaaaaaaacttttagaggaaacgtcattgtgagcacacctcaccagttcagaagtatcctaaggttaaagaaaaaaaaaaaaggaaaaaaagggggggcggaatttatataaaaagagtattgtatggtaaattcttgtcctgaaataaattaactggttgtttaaagaaagaaatatttgtcataagtcagaaagttgaagcagcatgtcgaagaattgtctgcaaaagtcatgaaagagaaaaatgttataaaaaagaatttatgcaaaaaatgttgtataatttaaaagtaactaggcctcctgaatgtaaaactactgaaaaaaaaaccaaaacagtttatgtgcacgttgtataagaaaagtaaaatatacctttggtaaaaggattataaggaggcataagaatgtacatttttacctacattaaaaagttaaaaaaaattattgttttgaagatttaagcaagttttaaaatattaattataaagaaaattctgtgtgtaaacatcttaactaaagttaaagaagtatcatccagttttgctgtgaactggacattaaagtaaaagcataacaggtttttcttaaagcaccaacctgctctttagcaaaaattataaaaggttaaaaagagtttataaaatcttaccttatggtctgacattaaaaattagataaatatatctacaaggttttattaaaattaggtttaacattaataacatactaatataaagataaaatttagcttatctgatataaaaatcatacgagaagcattgttaaatgtaaaatggtatttgggtttctttggtttaaaaaactaataaaaataggtgctaaaggaaatttctcagtaaaaaggcactaaggactataaagtccactgctaaggtccccacatttaaaacaaaaggtcaattcttaaaagttatatacttggtttatcttccactttcctttctctcaaaaactaaaagtcttttagcatatgtaccacccctagaatttccagtaaacgagcgttagcctgaagatcacgttctcatcaaagggtgaaaagaagaaaaactcgagccagcctgggaaggaccctaccttgtgctgctaaccaccaagacttctgttcgtatagcagaaaaaagatggactcatcacacccgagtcaagaaagcgccaccccctccagagtcgtgggccatagtcccaggggaaaaccctaccaaactaaagctaagaaaaatttaactcttttcatctattctatttctctttcatcgttctattgctaagcatctagttagtaacataatcaagtcaatttcacctcaaactattgcatttaatgcttgccttattataccctgtggggacttgccaagtcaaagcagctttctacttcagaaaagtacttctgtccctcatgactctcctcagactgggcattagtaaactaggaccatttaatctggggagattttgataaaatcctggtgccaaccaggagtcttgccccccgatgtagaactttcatgccatagttggtccaacgttctgtggaccactacagagcaaggatggactgctccaaccggtttttgtaatttcctaaaaccatacattcattttactagaggatcatagaagttaaagacttaaaacaaacttaagcaattaaaacaggataccaagatgcaaatgcctggttaaaatggatcaaatattccatctgcatgttaaacaaaaacaattgttatgcttgtgcacatggcaggccagaggcccagattgtcccctttccactaaggtggtcctccagtcaaccaggcataggctgcatggtagctcttttccaggattctacagcctggagtaataagtcgtgccaagatctctctgctatatcccaaagtccagcaccctgtggataagcccccgagggccatccagcctccatctcccaacactaagttcacttcgtgtctctcatgacagggaggaaacttaacattccttggagacctgaaaggatgcagtgagcttaagaattttcaagagcttatcaatcagtcagcccttgttcatccccgagcggatgtgtggtggtattgtggtggacctttactgggcactctgtcgaataactggagtggcaattgtactttagtctaattgtctatcccttttgccctggcatttcatcaaccagaaggaaaaaaaataagacattgtaaagcaagagaagccccttatgggtctttcgactctcatgtctatttagacacaactggagtcccacgagcaataccagatcaatttaaagctttaaatcaaatagctgcaggatttgagtcaatattttggtaggtgacagttaatagaaatgtagattagataaactacatctattacaaccaacagcaacgagcttttcatgagttaaaagaaaaactcatgtcggccccagccctgaggctacctgacctgacaaaactcttcacactctatgtgtcagaaagggaaaaaatggcagttggagttttaacccagactgtggggccctggccaaggccagtggcctatctctcaaaacaactagacagggtttccaaaggctggcccccaggtctaaaggccctagcagcaacggccctgttagtgcaagaagcagataaactaacccttaggcagaacctgactataaaggccccgcatgctgtggtaactttaatgacatcattggttaacaaatcctagatcaaccaagtaccaaagcttgcttatgtgaaaatccccacataaccattgaagtttgcaacacactaaaccccaccaccttgcttctggtatcagagagcccagctgaacgtaactgtataaaggtgttggactcagtttattccagcaggcccaacctccgagaccatccttaaacatcagtagactgtgagcggtatgtggatgggagcagcttcgccaacccctgcaaagtgactctgaagaagatgacaagccctgctccagtcacacctggaagctgactggtccacgcatggccgaagaatgagaaaactcatcgcgggactcattttccttaaaatttggacttgtacagtaaggacttcaactgactttcctcagattgaggactgttcccagtgtatacatcaagtcactgaggtagggcaaaaggttgctacagtcctattatattatggttattatatgtgtactggaactctaaaaagaaattgtttgtataatgttattctatacaaggtgtgtagcccaggaaatgatcaacctgacgtgtgttacgacccatctgagcctcccatgaccacagtttttaaaatgagattaaggactgaggactggtggcggctcataaacgatacaagtaaagtgttagccaaaacagaagaaaaaggggtgcccaaacaagtcaccttaaaatttgatgcctgtgctctcattaatagtaataagttaggaataaggtgtggttctcttaattaggaaagaggctatatggcagaaaataagtacatctgtcataaattaggactgtgtggaaataaatgtaaatacatttatttacatttgtagtcttgtgtcgtttaggccacttggataaaaaaaaaatgaaaaggatccagcccaccttcagaaaggaaaaaatgtcccttcctgtactaaaagacaatgtaactccttagagctagtaacaaccaatcgccttgatcctcgctggaaaaaaggggagcgtgtgaccttaggaatcgacgggctggactggatcctcgagtaaatatcttggttcaaggagaagtttacaaatgctctcctgagccagtgtttcaaactttctatgatgaactaaatgtgccagtaccagaaattccaggaaaaacaagaagtttgtttttgcaattagctgagcacgtagcccagtctctcaatgtcacttcatgttatgtatgtggaggaactgtaatgggagatcaatggccatgggaagcccgagaattagtacctccagacccagttcctgatgcattcccggctcaaaagactcaccctgttaatttctgggtcctataagcctcaattattggacaatattgcatagctagaggaggaaaagaattcactcaccccgcaggacgacttagttgtctgagacagaaactgtataatggtaccacaaaaacagtcacttagtggagttcacatcacacagagagaaatccatttagtaaattcccaaatttgcaaaccgtgtggacccacccagagtcccaccaggactggacagcccccactggattatattggatatgtgggcatagagctataccaaattacctgaccagtgggcaggtagttgtgttattggcactattaaaccatctttcttcctactgcccataaaaacaggtgaactcctgggcttccctgtctatgcttcctgcaaaaagagaatatggctataggaaattaaaaaaatgataaatggccccctgagataatcatacaatattatgggcctgctacttgggcacaagatggcccgtggggataccggacccccatttacatgatcaaccaaatcatacggttacaagctgtcttaaaaataatcactaataaaaccagcagagccttgactcttctggcctggcaagaaactcagatgggaaatgctatctatcaaagtaaatcagctctcgactgcttgctagcagctgaaggagaggtctgtaaggaatttaaccttactaattcctgcctatacatagaaaatcaaaggcaagtagttgaagacatagttagagatatgacaaaactggcacatgtgcccatgcaagtgtggcatagatttgatcctagggccatgtttggaaaatgaatcccagtgctaggaggatttaaaactctcataataagagttataatagtaataggaacctgcttactgctcccttgtttgctacctgtacttcttcaaatgataaaatcttcattactaccttagttcaccaaaatgcttcagcacaagtgtactatatgaatcactattgatctgtcttgcaagaagacatgggtagtaaaaatgaaagtgagaacttccactattgagtgagagtctcaaagggggggaataagggaggagaccacccctcatattatcttatgcccaatttctgactccaaagaaagaaaaagtaaaaactaaaaggcagaaatgaaatccacggggcagacagcccggtgccacaccctgggcctggtagtgaaagatcgacccctgacctaattggttatgttatctacagattacagacattatatagaaaagcactgtggaaatcctatcctgttttgttctgatctaattaccagtgcatgcagcccccagcccttgaaagggacaggaattgctcactcagggagctcggctcttgagacaggagtcttgccaatgcccccagccaaataaaccccttccttcttttaactgggtgtctgaggagttttgtctgtggcttgtcctgctacaaaaggagttatgtaaatccaagtcattattataaacattaggaagacaagagcagctcttcgaggtaaggaatctgtgactgcctttagtagaattggaaaagggttgtaacaatatccatggcaaatatgtatgtatacagtatggattgggtaacatataatttcctctggtagaattctgtgatgtttcatagaacttaatgtccatcagtgctgttataattaaccctccaactgaagtggatggtgtttcttaacttgccactaataagcttggcatacctgaacacagatagctctgtgctattaatttcataatctcttggtattaattcaagtggacttgcattcttcccagtgctatagtcccttgaagaaattattctgagttgagaagagaggtcagaaaatgccttccagaaagaaccctttttatttatatgtcagtatctagaattagagtgtactgtgctgtgttttgcatacgtcatgaaacaatctgtactaacaagtatatgaggtatttccatttcatagataaggaaatgcaggttaagagaaatgaagtaaaacgcccaggttcatataggacatcctaactgtggtgatgcagctagaaggcgagagaaccaagacctcccagctcaaaaccatctgcctctagaatcctgttgttaaatgattaaaaccattcagttattctgcctcataacaagccagagaagttaattacctcactgcttcctcatttggtagacaagaggtttgaactgtaatgaggcaccccaatcctaaactcaaggattcagtgagtgaaaatgcaacctgttgcatctgtcctaaatgtgtcaggagaccatttgcaaggtctcactttacagataactgtttcctcttctctaaggcttccgtctgtaataaaatggcatatgtattcgccagtcattaagctctgttgggaacaggcccccccatatctggccataaactggccctaaaactggccataaacaaaatctctgcagcactgtgacatgttcatgatggccatgatgcccatgctggaaggttgtgggtttactggaatgagggcaaggaacacctggcccaccaagggcggtaaaccacttaaggcgttcttaaaccacaaacagtggcatgagcgatctatgccttaaagacatgcatgctcccgctgcagataactagccagagcccatcactttatttcggcccatccctttgtttcccaaggaatacttttagttaatctataatctatagaaacaatgcttatcactggcttgctgtcaataaatatgtgggtaaatctctgttcgaggctctcagctctgaaggctatgagacccctgatttcccactccacacctctatatttctgtgtgtgtgtctttaattcctctaatgccgctaggttagggtctccacaactgagttggtctcggcaaagctccattgttttttgttattaaatatgaagtcaggccttataaatgtgagtctcagatcactgttctgtgttcagtacccaaataaattaaagctgtacccataaaactcattttaatgtaattttttaaataatttaaaaatctcaaatactattttaagcaatttgttttcaaagaactcacaagtattggtataatttggaaacaatttccaattgtttggcctttataataatacctcttgtgtgaccagcactcttcagtttatgaagcattgagtgactcattaagagttgtagatggggtaacatttgagtgtccacttgaataaaatgactttcaagaacagtaagccagagagccattccagtaagaatgaaaaattcctaagtctatcgcataattgggatgaactgcctctgtagtgatggggggcaaggtttgagagaggatcttaaatgtgtggagtttgtatgaccacttagacccagggtgttgttctgggctgttctctgcatgactgtttactgatcttactgggagttgtcccactcactgagcaaactcagggcaagatgctatgtaggccagtctaagatcaacaatgatcccagacttatttataaacccacaggaaaggcccctgagagtgctctgccatctgacctgagactagggtgaggaaggattagtgctaaggcacgggaagtccttggtggccaactaggtttccagtgtgagccaggagactcatttggcctttcagccagtaggcagctgcagactgttctctggactcttgtacaaggtgcaatatcaactacagggcttgccattttgggtgttgtatatggaagttgattatgactcataccatggagatcattcactcaataaatatttatcgagtacccttagcctacctggcagtgttgtaggtacagggatatattaagagtaccaggtaggtggggcccctatccttatggagcttgctttcagtgaggaaggcaggcaagaagttgataaacacatgagaatttcatgtgctgtggagaaaataaaacagaggaaagagagagagagcttaggtagaggaagaatattttcgctagcaggagctaagaaagttttcctgagaaagcaacattggagcagagacttgattggtgaggagcctgctaggtggaggcctagaggaagagtgaggactcagatgccaaggaaagcagatacaaaggccctggggtaggtagaactcattaaagcattaggaagctgatatggtttggctgtgtccccacccagatctcacctagaattgtaataatccccatgtgtcaagggcagggccaggtggagataattgaatcatgggggcggtttcccctatactgttcttgtgatagtgaataagtcgcatgagatctgatggttttatgaagcacacactcttttgcctgccatcatgtaagaaatgactttgctgctcttttgccttccatcatgcttgtgagggcttctcagccatgtggaactgtgagtcaattaaacctcttttctttataaattacccagtctcaggtatgtctttaatagcatcatgagaacagagtctcacactgctaataaagatactacagaagctcactgtgactacagcttagtgagtaagtggagagctaatttttcaagattgataaaaatcagcttctacataatttctctgacatttatcctgcaacctggatggttagggaaaccttccaatggcagaagatacagattctctatgtattgttgtttttttttttttttttggttggggggatggagtctcaccctgtcatccaggctggagtgcagtgatgcaatctcagctcactgcaacctctgcctcccaggttcaagtgattctccctgtctcagccacccgagtagctgggataacaggcacacgccaccatgtccagctaatttttgtgtttttagtagagacggggntttcaccaatggccaggctggtctcaaacttctgacctcaggtgatcctcccgccttggccttacaaagtgctgggattacaggcgtgaaccactgtacctggccctatgtattgttctgtgtcctttgtgccagcatatgtcacaacttacattaaacagtgaatcctgtctctgaaggttgcaatttttcatggttattccagcctgatcttgtctgacccctaacttggcacaatattaagcagctctgttactctactagatgaatttaaaggctgtgttttgctgacatatttttaaaaactacaagcggagctaaaattacatctgctgtatttttttagtaacagctttattgagatataattcatatatcatacaatacaattgacatacctggatgggtagaatctatcttgtaaaaatgataatactgccaaaagcaatctacaaattcaatgtaatttccatcagaataccaccatcattcttcacagaactagaataaacaacactaaaattcatatggaaccaaaaaaagtgcccccatagccaaagaaagactaagcaaaaagaagaaatctggaggcatcacattacctgacttcaaatatactataatgtcatagtcaccaaaacagcatggtactggtacaaaataggcacacagaccaatggaacagaatagagaacccagaaataaagccaagcactttcatccaactgatcttcgacaaagcaaagaaaagcataaagtgggaaaaggacaccctattcaacaaatggtgcttgacaagccacatgtagaagaatgaaactggatcatctcttaccttatacaaaaatcaactcaagatggatcaaagacttaaatataaggcctgaaaccataaaagttctagaagataagctagaccttggcttaggcaaagacttcatgacctggaacccaaaagcaaatgtaacaaaaacaaagataaatagatgggacttaattaaactaacaagattctacacagcaaaagaaacaatcagcagagcaaacagcccacagagtgggagaaaatctttgcaatctacacatgtgacgaaggaccaatatccagaatctataaggaactcaaataaattagcaagaaaaaaacaaacaatcccatcaaaaattgggctaaggacatgattagacaattatcaaaagaagatatacaaatggccaacaaacatataaaaaaatgctcaacatcactaatgatcagagaaatgcaaatcaaaaccacaatgtgataccaccttgctcctgaaagaatggccatgataaaaaaaaatcaaatcaaataataatagatgttggcatggatgtggtgaaaagagaacacttttacactataggtgggaatgtaaactagtacaatcactatggaaaacagtgtgaagattccttaaaaaactaaaagcagaactaccgtttgacccagcaattccactactggctatctacccagaggaaaagaagtcattatacgaaaaacatactttcacatgcatgtatatagcagcacaattcacaattgcaaaaatatggaaccagcccaaatgaccatcagtcattgagtggataaagaaattgttttatacacacacacacacacacacacacacacacacacacaccacggaatactactcagctataaaaaggaatgaaataatggcatttgcagcaacctggaaggaaatggagaccattattctaagtgaagtaactcaggaatggaaaaccaaacatcatatgttctcactcataagtgggaactaagctatgagcatgccaaggcataagactttggggacttgggggaaagagtaggggatggtgagggataaaagactacacattgggtacagcgtccactgctccagtgatgggtgcactgaaatctcagaaatcaccactaaagaacttattcatgtaaaaataaaataaaataaaatagaaaaaaaaatcagaaaaaaatgaaagcaaaaaaaaaaacacaagcagagctaaagttacatctgctgtatttttttaaataacagctttattgagaggtaattcatataccatacaattcacttgacatacaattgacatgcaattcaaagtgtaaaatttaatgctttttagcatatttacagagttctgcaatcaacatcacagtcaattttagaaattttcatcattccaaaaagaaaccccatgcccattagtacatgttaggagcttctccccattttccctcagcaggtccccttcttcagccctaggcaaccagtaatcttctttctgtctctaaattcacctaattctgtgatgttcatataaatggaatatataacatgtagcctttcctatctgtcttctttccacttagaatttataagtactttttacagcagaataatattccattgtatggatataccacattttctttatttgttcatcagttgatgggcatttgggttgtttccactttttggctaatgtgaataatgctgctatgaacattcatgtacaagtctttgtgagggcatgttttcatttttcttggttatgtacccaggaatggaaaccattggctcatctggtgactctatctttaaccttttgaggaagtgccaggctattttacaaagtggctgccccacttttatagtttttgaaaagattttctcctaatctctagaagggggagcacatttttgacacctgataattctcagcatttgaaatgtgaaatacagattatgaaataaagaaatttaaagaaaataaatgagttttaaaactcaaaccaaagtaagaggtttgagttttaaaactttcatttattttctttgaatttattttttatgccatctaataataatttaccttattattggggttccttattacccattacatattaaatagttaattacataagaaattcctcacattttcttcaagtgccttaggtcaagtaatgaggagccaagttaacctgagatactttttaattgacagtcattaaatttatttacctactaaatcattgggtacctactctatgccaggcatgtgtgcagtgctgaatattttctttgctattttatactttgagaggttactttattatttcagggttggaggaacactgtgtacttcaaataattatcatagctaatgttccacaagcaagctctttgcatattgagttttttgctttgggtatttattagttacatacttctttttataaaatatgccatttgggccacacttgacaagtcaaactttttgcaaattacagttgtcagcaccacaggagttccattaggtatttatttttccacctcacagtaatgttcatttcttaatttatttggtgtatattataacattactggctggagaacctgctgaaaaataatcttgaccagccaaagaaaagttgaactagtggcctttccaagaattacatcgaaggcagaatccaatcctttacttcattaagaccacagttgacagaagatgtacccgagttatagaaatattgatgtgatgtggaaggagggtgatgcctgaggagtgatttaattctatttaaattcacattaaaaggccaagtttcagactattttggttgctggactttgattctctgaactggttaccatacctgcgtgtcactacagaaacttcttggatgaatttgaataactcagatgccagttgtgtaatggagagaaaaggatagtgcatatgacatccgttcattagtcattgtaaatttgtcaatggatagaattttcttcctttaactttagtacagataggttcagaaccttacttgccatgggattctttggtatactcatgaaaacaagtactcatatagaacttacgtactatgtgttaggctgttctgaacactttttctggtttaattcatgaaccttcacaactaccatttgaggtaggtattattttccctgttttatagatgatgaaacaggcacaaagaagataaggaccctcatcaagattaagaagctaataggttgtttgggcttcagggtctgtgcttttgtcctatatgccctctgcttcttttaacctcttgggatttctgtttcttcatctgaaaaattagaagattaaatcctacattgaatatgaggttgcacctgctaatctccagggcccttttcctaagactcaggttcagattcagcagtctcaaaaagagcattcatgaccacatgtgactaagaaataatcaagacaaaaaataccctaggaattaaaacacccagaagcagcttctttgtgcctccaaagatgtctgaagaaccagattcaataaaaggaaatgcccataattatcattgtacatgatgttgacaatcaattcagccttagattggtgggtaccagagtctttgtgatggatccaagtatttgtaccatgggccatacctctctgtagacttggaaacataatgacttttaatctaaatccacagtgacagatttggttgaggataaaggagctattgccatgcttctatctgagccagctgtacccctggggtttgacagacgttagcttcttactgccaaaagatattgtctttttttccctaagacctctttagcctaatcatcaatttctcattcttcttggttaggacagttctatttccagtgaaactttagcccttgctttaccagacaccgttccttaatatactggtatctcataggttttctattttttgtttctgttgcatctcttcagtgatctatgattatattttccaagccacaaatcaagaaactgaatttgacaaaataattttgtactatttccagttgcaaaagaaatcttgaagatgtattttagattcaataatgctggagtttcatgaaattttgatgtgttattggaatgatgagatatcatatttgaaattggaactattctagaggatcctgcaatgtgaggcacacttccctcactttctagcaattctttgttcttgttattctaagttctaaccggaaatccagaaactgtcttagacctttatctactaatcacagccactaccagttatgtggtaattctctatctttcaaattggtccctatatcattttataattttatagattttaagttttcctatcttttgcctcagctattaaatcagccttctaactagtctccttcccagtcagtgtaccctctgacatggtttctaagagtgatcaccttgaaacacaaattcaaccatgtcattcctctgtttagaatgttgcaatggttctcctttgctggatagtcttcacatggagatgagaacttccatggtctaaaccattgtagagaacatttgttgttttttggctagtcagcatcccagtttgtttttggagaagtatctctcccctaatgagtactctcaaagtgccctgttttcccctagcttagagatggctacatggcccaaaccaggccagtcacactttcttctgggactttgaatcttgaataaaactctgcaaggatggagctcattaatgtcctcatgagaatacatagtccctaccaatgagatctctaaatgaacgtgggtccttccaagttctccaatttatgctatcctgccaagagatgggaactgttaactgcattcaaaagccctatgattgtttaccttccccttcccacaaatactctgacttttaatcatttgtaacaatccattgtaattccctagcataccatgggagtctttcatgccatgaagactttgcagatgctctcctctctgtcttggaatgcctccctctcaagccaagcagtgcctcagactctgtgtttctttaacatggcacaagttccctgattggggtggttagcccattctagtattactgtcagtcttctttcctagattgcaacctcctttgttttatatgatgcctggcataaaataaacaagatatatcatttatttttaatttttattttttgagacagggtctcactctgtggcccaggctggagtgcagtaacacgatctctgcccacttcaacctctgcctcccaggttcaagcgattctcatgcctcggcctcttgagtagctgggattacacgtgtgagccaccatgcccaggctacaagaattattagatgaatgaataaataaaatgacagtatattttgtagttcatacatgggaatttatgttatagataacaaataaggcacatctccagaactgaagaaaaggatagaaggtttaagataataggatcaacataaaattcatgagactgactataggagaattgctgatgaaatcagggcaaatttattaaaataggagtgatgatgatgataaagttacgtgacaaacacagagcatgtatgtcactagctaagtagtttctaattaggtaagtagttttaaaatatcatttaaatttatttatttatttatttttagagttggggggtcttactatgttgcccaggctggactcaaacttctgagcttcagcaattttcctccctcagcttcccaagtagctgggactacaggcatgtgccaccacactcagttcaaaatgctatttttaatacagcttggttaaatagtagtggttgagagcacagaatccagagtcagacagcctgggtttaatctccatacctgtattttttcattttttggatggaataaattgtacctacctcataaggttgtcattatgaaaataaaataatataggtaaagtacttagcacagtgcctggtggttctagtcattcttcatttgccagcccaccccatcccaatccaatttctgcccctctttgactctctgttcctgggaggctgaacccttatgggcagtattccattctccctcaatgcctgccttctgcgtgggcttggtcaagggtaggcaccaccaagagatctgagagcagagagagaggtgagagtattggctgtacacccattttgatgccttgtctctgggaacaaactaccttccttcccaatttcagcccccttcaggggctgctagcccaggccctgggcacactaggtcttccctttgtcactgaagccccaggagcagtaaaggcttcccactgtccctcagctttgagtgcctcctatttattcttttgactctgcccacattgctataaagtatttttcccttaagatttctttgactatctgggatgaatcctgtttcctgcccagaccctaatacactgtacatagtaatttctttaaaatgtgagctttggttattatattaaattattaatattaaatatttaaattgttaaattatcagtgatttgataattgttaaattatcaaataataaatatttaaattgttaaactatcaacgaaattttcatatagtttgattaactatataaaaacaaacattgatattgagaaggcaggattcagaagcatcttcaaaataaagcaggccaggcatggtggctcacgccaataatcccagcactttggaaggcagaggcaggaggatcacttgagccctggagtttgagatcagcctgggcaatatagtgagaccctgtctacacatccctcaacatacacacgattagctgagtgtgatgctgcctgcctgtagttccagctacttggaggcagaagtaggagaatcgcttgagaccaaaaggttcgggttgcagtgaaccaaaatcatcccattgcactcctgcctgggcaacagagaccctgccaaaaaaaaaaaaaaaaaaaatccgaactaaccaaccaaacaaacaaaaaacataaaccagaggacacatttcatatctacagcaagttgcttgcctatggtttggaataactcccaagtactttgatggaaaagtgtaagtagctctgcaatgtggtaggtggtagggacagagatgagtaaaccattctatgtgagcccagcctgggggtagggtaagtagaggataattcatgtatccttttagattgcttctgtctgcattgatttcagtctatgttcaaactgttaggaaactgcttgactatattttttttcctcaagggtatgttttttcctgtataacttttactttcatggattagttaccatcttctaaattactcccaagaaatcaaaattgcagcctgttgaatagatagatctaaggtgaccatatttgccaagtaaacattttttacttagtgaaccagtgggcaaagtctttggactacctacacattttaggcaggatggaccctgtacatagagtaaaagtcatgctctttctcttacatcatgtaatgaagagaagaaggctaaaatgtaacactttgaactgaaaaactggtgccgtctgaaactttatgtaatacatctaaatcaaatacttaggcaaaagcacattaaaaaaaactggcactgtttcataaaaagatttgatgcactcatcttgtgtttatttttatatagtatgcatctactccacctgtattttcacaagaagaaattggatccgttggtatatttgaactccacaccctgcctttggtagtaagcccttcttccttaataatgacactgtagatcatgtaaactgaatttgtagcacataagattctatgggtggatttaaaatgtgggaaatggctttaaagtgccctggacagatgcagaaattttctcttcctctccttcagtgaacttttgagaacctgctatgtgccaagcactctgctggagcctggtataaagcttggtaagcacagctggaggtcctacgttatgtgtggaccctggactcactttgcctgtgtctgcctctgtctcagccattttggtgccctccaacttcgggcacctctttaacctcatgaggccttaattttccttatacataagaatatgcacattctgtataattttatgtttctgatttccactttcatgagaatttagagtgacaattcagagcagggttctctgtagcctggtcaccaagattcaaacctcagcttcacctctcactatgtgattgagggcaaattattcagcttctctctagttcattttcattattggcaaaaggcaggtgataatagtagaacctacttcttgggtttcttgtgaagctttaaattagtgtaagaagtcagtcctcattgttagctctccccaatcttgaatcattcttccaaagtagattgggaagagcacaggcttaacaatcagccagatcaggctcggaatctcactccatcactgacccagcaagtgactcagcaagtaacttaaccattctgaaccccagtgtcctcatctgtaaagtgaagataacaatacttagccaggctgggcacggtggctcatgcctataatcccaacactttgggaggccgagaagggaggatctcttgagcccaggtgttggagatcagcctgggcaagatggcaagaccaagtccctacaaataaatttttcgaattagctgggtgttgtggtgcatgcctgtagtcccagctactcaggtggctaaggtgaaggatcccttgagccccggaattcgagggtgaagtgaaccgtgatcatgccactgcactccagcctggatgagagagtaagaccatgtctctaaaaaacaaaacaaaacaataccattgatttatattccccatttcccctaaagtaaaaatcacttgagccagataatatgatgaaagataaaggcaggaaaatatgaaatgatattctggagaattgcaagtaaaaatacaatatagtgtatctttaaggtcacttttaacatttgaaaatttgtccttttaaacaaaagctctataagcataagagaatgatttatccacttttattattttctgactgtttgtctgttagagtgtgagagaataaattggaattaatagaatggtttatagatagatctccaagccaactgctataaaaaccacaaaatcagttttctttaattgtttttaacacaaagtgtagtgtctttgtagctatgctgtcattcataacaggagaagaacatcatgtcaaaagaaaagaaacctgaatggtgtggtaagtcagggaggaaagtctggtcagccaggcaagcactggaccagtgactcaggtgctggtcaagtgtaccaccttcccctgacctgatgacaccttgctctgccctctgtgtttcatgtttctgcttccatgctgggataaggaccaaagaacaattttaggttaatttctccatctcattctctaaaggactaaggtggcaaatagcttaagaaagggaagtcttagaacatttcacaaattatgaagttcttaataaatacctaataataacaatgaaaagcaaaaaatgaactcttttatttagttgacacctctatatcaacttttctttaaaagcatttctcaggttccttttcttccaaagccgggttcatttaaatctggcttatgtaatagcctgcctttttccatcttgttgaaactatttctgagcctggagagtgacccaaagggcagatgctggccagagctgtaaagccagcaatatctaacttatctgattctcgcttggcaagcacagcttgcattttttttttgtcactggatggaaaaaagtgggggcatagaggggtggttttagctttgtctctgctgacttatctgcctccctcacccccagggtgatctggagcacatcttgagcttctcccggtcaaattccatttggaagtaaagtgtcaggactcaactagatttctgagttcttttacatgtcttaatgctcccctgcagatgatgggggcaattttcacattccagcctggcagcagtccccttagccaagtgtctactgccccagggcaagattctagctctctgattcctccaagctcccttctagccacttcattcattacattagaagcctggccctgcagccatctgagtttatgacccctgagaaccagtctttctctctaaagctgggagcatgcctgtgtgtgagcacaagctcatttttggttcttagttgataggcaagggctggcctgagtagaaatggaagtgctggctatatactcttctaaaagaaatctgggaaaacttggtgcaagtgataacaggcatgtgtcaatttcagaaaccagttggtggatgtagaatattttccaggcacaatttccttgtccccaaaacataagttcatatacattgattggtttgagcaacaatcaagataacatgtgctctggtgcttaggaagtatttgaatcaaagacagactttctaaaattacctttcattggctgggtgcggtggctcacacctgtaatctcagcactttggaggccaaggcggtggatcacttgaggttaggcgttcaagaccaggccaacgtggtgaaaccccatatccactaaaaatacaaaaattagccaggtatagtgctgcgtgcctgtaatcccagctactcaggaggctgaggcaggagaattgcttgaaccctgggagatggaggttgcaatgagctgagatcacgccgctgcactccagcctgggcaacagagcaagactccatctcaaaaaaactattttattgaaacatagagaaaagaacacaaattatcagtgtataggtcaacgcattaccacaaagtgaacgcacttgagtaaccataaaccaggtaaaaaaatacagcctaagaatcccctattgtgttcccttgcctctttagaagtaagttttttatggtgttgacagtacagtttctccatttttccttccagaacttattcttgggaccatgttgctctcattctcactgttacttttcccctcttctctttttccttcttagaacaaaacaaaatactattgactagcagtggtcattctcttcactctaacctgaaagtcaataaattgagtagaaaggactgatgggggccaaaagggctgaacctccaccacatttgtgctgtaagaaaacatgacatggttgcctaggctccacaggttttttaaactctcatctcacacaaactccatgatacaggcaagattcttgtaatttcatagacaaggaaacagaggctcagcagcttgatcagcacttctgaaaccaaccctttgccaggtgtagagtcttcgtctaggccaggacctgtcacttcagtgtataaaggaagttctcatcaaggtggttgatggccgcagtcccctttaagaagtagaaagtgtggtgcggcttcccagaaaaaacacagaggaacacaaaaagtgcatatcactttggaggtttcccacggccggcgaaccactggtacctatggacagcccccagctgctgcagtgactgagggataaaacagccatccatctctgcgcgcaagcccattaccaaagatagtattgccaatggtagtattgttagtgcagttcaactgcaggacagactgaacgtccttagaagcagcctgtgtgtgtgtgtgtgtgtgtgtgtgtgtgtgtgtgtgtgtgtgtgtgtgcaccgcaggacgccctcctttcccgcggagctgtcacaaaggactgtacttggcatcctcactcctcacttcccaggatcacggactccacaaagttctggtgcccgtttctccgggaccactgccagctgagcatacagctccggccaggagggcgccagcggccccgggagccagggagaccaaggaacactcgcattcatttgtacaccccggctccccccaaacgcgcacggcccttggcgggcttggccagggcacgtggtgggcggcgggggcacagcggcgcctggggacgcgcgtgtgtgcgcaccgagagggcgcctggccgacggcgcccacctctctcgtggctttggtggctccaggcctggtagggccggggccgcggctcgggcagtgccctccctactcctggccgggccgggagcagcgggagcaggcgcagcgcccctaccgcccgcttttccgcctccatctcctccgcctcctcctcctccttcccccaaccacccgcgcagtcacaaccggttcagactggccggggtgccccgcaaagagagacaagggagaaaaagacagcagggaaaaccccggggaggagaaggcgaaagagaaggtggagctcagagaagggggccggctccccagctccatgtggccgccgccgctgcgggtctgtgggggcagagggcggcggctcccggggcagcgcgtagcgggaccgattgcctaatactccggcaggggccggggccgcagctggctcggataaatagccgcccggctggcccggagctgcaggggagagcggcggccgcgatccccaccacaccaccagcccggccgcacggggcactgagccgggtgctgagcaccggaggccccgccgaggccgggactcaggtaaagggctggagcttgcggggagggttccaaaggtgggcagcagcccctgctgcccagcgtcctagaggcaagaagtaactccgactcggagcagtaggagggggcggtggagcagcatggaaccgggcttttgtctggggtgtgtgccgggggcttcgagtgtccacggtgcgcccgcccctcgccgccccctttttgatggggtgcttctacaaagtgggcaagttttcccgggaatccgaaggcggcattttgtacggagttgaaagagagggagggggtcctgggggtggtacggtggccccccagagagctgcctctggactccagagagcttccagggttgctggtggaagagcagggagaggtgcatgtgatgcaggtgggcctccatttcccagaggaccgaaaggcctccaactgccttggtccggagcgcgagcaaccaggtgcccccggagggttgggaatggggcgccgcgggtactcctgacctacgtggagcgcagcgcgcagggccggcggattctgcacgttggcgccaggttcagcaccacccggcagccctgggcgagcgcgggagcccagccttcgccaccgccgcaggaggcaccggcaccgcgcccacctggaccctcagccagcacttgggaggacttggtgcttaatgccccatctttggttcgccctaggtaacctgctctggcttcagcagcgcccagaggctttccagagagctgataaccacgaacaaacttggctgtcaaaagcaaatcaatgctttaccttgttttctgggtgcctagtctatccaacacaaactatccccgaagtttagtcaggatttacgctaaatatattacttatatagtaagttattcgatataacatttttggtcaattttctaggctacagttttgatgtgttttttaaaaatcttgaattaactgaataacagttcatattgaaggtggattctcccattccctgcacccaggattttccgttgttccatcaaattctgtaaatcggtatgccctaacagtttcttatatttgagttggcttcagcttcgagaaattcttcaggcaggtttaggcagagggctgaggaagctagagaagattccgaagagaaaggatgattatttgttgcatgattatagcttcttttaaaacttctaataggaaaacccttccactttcctggaccaaatgcagagtaaagtcattttctattatctgttgcaataattaataataaatatgtaaatgcagaaaacatggttagtacccatatcattgccagaaaccagtcccgctctccctccaccatcaaaaaaaagtcctcgcaagtaggaattagataaaataatttaacctgcaattttgcaacaactcagactttcagcaccaccgaccccctaataacatccctactggtttcttccattttttgtgtaggcaagtggaataacaggtatccttcatatccataggaagagcattgggaggagccaaagatatggggaggtagatcaagacattaggaaatcttttctggcttctgactttgagtctgaaaaggtggtgtgaattggttggtgtctgaatctttatcaggacacattatggtggtctggggtggatctggccatgcaactcaagctagaggatgacaactacagagatgtggtcacattttcaagttttacttccttacctcaatctttcaaacccctaattaattaggtaataaaaattgtatatatttatgatgcacacaacacagtattttgaaacagtaatacattgtagaatggcccaaccaacataattaacctatatgtattacgtcacatttttatcttttgttttttttttttttttggtgtggtgagaacacttcaaatctaccatcttaacaattttcaaaattgtgactatagtgactatagtcactatgttgcacaatagatctcttaaacttattgctcctatctaactgaaattttgtatcctttgacaaacatctcttcaccccaaccctacctactggtaaccagggttctactctattctctgagttcaacaattttagattcaagtctcccttcccttcccttcccctcccttcccctcccttcccttcccttcccttcccttcccttcccttcccttcccttcccttcccttccctcctctcccctcccctcctctgccctcccctcttttccttccctcttttcttctctctcttctctctctctctttcttctcactgcagcctcgacttcaccaggctcaggtgatcctcgcacctcagcctcccgagtagctgggactacaagcgtgtgccaccacacccaggtaatttctgtgtttttgtagagatggggtttcgccatggttcccaagctggattacaggcatgagccactgtgcccagctgacttccctttttttttttttttttgagatggagtttcactcttttttttgagatggagttttgctgttgtcacccaggctggagtgcagtggctcaatcttggcttactgcaacctctgcctcccgggttcaagcagttcttctgcctcagcctcccgagtagctggcattacaggtgcgtgccaccatgcctggctaattttttgtatctttagtagagatggggtttcaccatgttggccaggctggtctcgaacttctgacctcaggtgatcaacccgcctcagcctcccaaagtgctgggattacaggcgtgagccaccacgcctgactgatttccttctttttcaagtctgaattagtctcctattgtgtgtgtgtgtgtgtgtgtgtatcacatttcttcatccattcatccacttatagacatttaggttgattccatatcttggctatggtgaataatgctgcaaggaacatggaagtgcagctatctcttcaatataatgctttcctttgggtatatagtgagattgctggatcatatggtagttccatttttaatttttctgaggaaccactgtattgttttccatcatggctttccaagatagtatcacttaatgacttcaattttaattaatgattgcaaaaatgtatgtattttgagctacttagccttttcttctggaggttcttggcagacaccaaagtaacccttatggatgatgagactgaactataacaaaacaccaagttcaaaaaaaagaacacatggtccctgcctccaaatgtttagtgagaaaaatagatttacaaatatctgcattacaagatagtataaatggagtcatagggtagaacatcaatagtgtgctactgaatgacaaaggaaaggagaggttcattcaaggctaagtgtgaagaaaagttgtggggtgggtgtagcaatttaggaagaggatttccttgatggaaaagaggcctgctggaacaagagaatagcacagagataaggaagtctagtgtgtttataggaagcaaagcagtttggagtagctgaaacctggaatttaagacagataaggctgggaggtgggatggggctagattatagagactatgacatgtcatgctaagaaattaaaatatgattgaacattattggtatatttacataaacagtatcaacatccttaactgtactttttgcctttaatttcagttttatgagtttccttctaaaataagtagttgattaaaatctcaatattcacttcctatcagtttctttcaatcagtaaaagaataatgtattcctaatatccttcaatgctttatctaaatccaacagtgttttacccccaaacctgcattcctatgatattaatagctcttagcttgattaaaacttccgatagaaaaacacttccactttcctggggcaatatgcagtgtatagtcattttctattctctgttgcaatcattaataataataattaatgtttattaaacatgttatgtcaagggagccacatagccttatgttatctagggaggcattattttgatcttagactgagaatttttacaaggtcacacaactaagtaaagggaccaaggagtctacccccagagtctgtgctttgaactattgtactatcatgtaacggggcatagtgtatgataattattgttaatattagatagaaactgggcctgattcctgtagcaggactgtttctctgttttttttttctttgcatcttaattttcatcatttggattaattttatcttacactttcagtgacgggacatattttaatgttttaatacacttttaaactactcatgggatctcgtatttttatgacccacccaaaagaaactcttaaactctgagaagagacaggatgtgggacgaaaaaaaatgttagcaacagtgatggcacaagatgtgaagaccaggcctctggaagaatgttgattaccaatattctcatgattcccaataaactccccaaatcaccagatctttttgcatttcagcatcccatatatttttctgtgtgtcttgatttttttattatgaaggtaatacagtaaacatactactttgtacatgacatactaaagtatgtatttagacaacagatcaaacatcacatgatcatgtataaattgtgcaaaacgtttgctaactgaaagaacacgtcagtgttattatcatagatttcttcaccagaacactattctcaggccaagctctggaggagagggttgtgtggagtagagagaagctgaaatgagagcctggcagtccagtgaccctggtaacagtgtgggacacagggagatgatgataccaatgtatctcagtgtctggccctcactctgcctaaatttaactgttacatctttatttttgtatttactttgttaaatatttggacctttccatcttttctcaggctctgagtggtttacagattctgctattttcacttttgagtttgagagtaggacttagaaatagatgactcttcaatggattggtgagtaaaggatcctgaaactgttctctcctttagcatgacgtctctcaacttcagtttcctcatgggtagattgagggattgaataagataagtggtggcaatcacaaatcttcacaaggtttacccggatgagacaggcatcataaatgagcaaagaagactgggggcagtggttgggtagtaggtgtgtggaggtatgggggatagcacaggtgaaactaaatgcaaggcaacgttagtcctgcgtcagggagatattagggagtagaaggacctggagagaaaatgcctcatccaatgagagccagacttactcagttccagttaattgttatgtaagaatgagggcccagtgttatcagaactttcaatgttttgagagaatcctaaagttcagatttttatgtgaaatctattctagtgttaaaacatcagcaatttggccgggcgcagtggctcacgcctgtcatcccagcactttggaggcagaggcgggcggatcacgaggtcaggatattgagaccatcctggctaacagggcgaaaccccgtctctactaaaaaaataccaaaagaattagccaggcatggtggcgggcacctgtagtcccagctacctgggaggctgaggcaggagaatggcgtgaacccgggaggtggagcttgcagtgagccgagatctcgccactgcactccggcctgggcgacacagcaagacttcgtctcaaaaaaaaaacgaaaaaaaaaaatcagcaattcattcaaatttactaaaaacaaaaccaaaaacattgagtccgccaaacgaaacacattaagagaccagacttggccagatttggcctgagtggtgccaaagtttccaaaattccttctgacttcagacttttgtgatcctatatagccaatttcttccccttttgctaaaacatatggtagtactccctgtatccaaattatgacagctttggaggagctctttggcaaatgctagactataaaaaatctacaaggcctcgaagattaaaaaatatccttttttcatagccgcactattgataaaattcagaggcctcataccacgggaggccatgataggagaattgcttcagcccagcagtttgagaccagcttgggtatcatagtgagacttcgtctctacaaaaaatgaaaaattagcggtcatagtggcacctgcctgtagtcctagctatttgggaagctgaggtagcaggatcatttgagcttgggaggtcaaggctgcagtgatgagctgtgattgcaccactgcaccccagcctggcaacacagcaaggacctgtctcaaaaaatcagaggctccagaagttaattacctgtatttattgtccctttcaggaacgattagtgtgatttagttccaagattcagaactgctcctctaaatattttacttcctgttctgcctttccatcttaatgtgaaagaatcaattttggtttccacttggatgaggggtatttataggcttggctgatggtgttcagacaaagcaatcttcattgtctttaacctggcaatatttcaccacgtattctgtccctcttccttaacagagctatctggggatgttcttgaatttcaactagatggataaattaagtgtttgacttgtagaagttaatatggcaatttcgatttttttaaaaagctatttatatggatccaaaaaataaaaaggtaaacataatgaatggatttgcagtgaaattctttaatacaagtgtgtttttaaagctgagtttcttggatttgactggctgggatgtgttatttgctttatgtcaatgagctattctacaaacaagtgggcctgacttaaagttcagagcagatgttgacaatgagaaggaagcatttgagtacataaaacaagaatgacatgttgagagaaaccacataccttactgtgactgagctgactacagaggacaaacaagaggctctgaatgacagttttgagccacgatttgcccttgtcctagccccagtaatgagtcagcccccaccctttcacatcagcgagtatgttaaccatcactgaatgtttaacatttaaaaccgaatcggaaagaatcaggtaattatttgatcattacagccatgtcatccgatgttatattggtaaaagatttggattttaatttttttactcatgtatttggctagcttttcagattcaatggtggagacagactctaagctccagagaggaaggggccacatctccttcaccccacaatgccttctaaatgcactcagttcattttgttgaatgaaagatctttgattaatcatttgaatatataggagattttaggtaagtaggctttcaatgcattcattcattcattccatacagatttgttgagctttccctatgtgccaatcataattcttagtgctaggcatatgtgatagacttgtgggctagtcccttaacaaataacaatctattgtaataaatattatggcagagatgcttaaatcggtgtgagaccttggaggaggaatgactgatgtagagtttcacagatggcatcaagatgagagaaacagtttgggctcagtcttgaaggaagagtagaattggagaaaggcattccagctgcctccagctactaacaggaactgaagagtcaaagcttggacgagggagggagcatagctaaaatgctgagtcgtgagctgtgggttggggggcacagatttgttggacatcctagcattacagacttttagaagaaagaatcaggtaactggctagttatttaaagatctggatatctgatgtcatatgaacacaacatggttttataaaaccaatgctttcatttttgtttataatttttgaataacattatagttttagtgatggacaactgtaagcttcatgagggaaagaatgattgtcattgatatcttagtgtccttttgtaattaatgaaataaaaccttgtgctctgctaatgggtaaactgtgggtaatgaggaaccatggaaggatctgaaaaattggaagcagaattgagatgaccagagagccacggtttaggaagatggatctgggagcagctcggcagatgccctgcagcagggagacagtgtaagctgagggatccacctgtaggcagttgtgatggtccaggcattcgcagaaaagatggagaggaagagtctgattgcagaactctttgggggaccctaggatgctggagacgggtagctgggattcaaggaagagctggaatgcaatgaagtggaggctttgtgcttgggcaaatggaagtacggtcatgacagttttccaggtaaaattcaggaggagaaattaagaattgagtttgaggggcctgggcacatccagttgagatcttgacatggaaaatggtgaaaaattcgttagaaatgtggatctggagttctgaagagaggtcagagctggggatggagacttcagacttcttgcttgagtatctgtgatcacttggtggcgttagagagagcctgggagagtcttgcagtgggctcacgaaagccaagggggcagtggttcataaaaacagagacgtaaacagtgtcaagaatgaggaggctgtgctgacaaactgtgaggatgcagggaatgccatagtgaaacactttttattgtctaggtgcatcagaagccagaaatcactgagtagaggaatgatgagaaggtgaggaagcagaggtagggagagtaccctttcatgcttttctaagaaaacctttgaaagatgcaactacagtaacaagattgaacacttactaaatagttactttatgcgaagctccgtgcctgtgcttcatggccaggcttgaaatcccctgtaggttttagcatatgcttggatggttactagaaacatgctcatgtgaaatacaaacttaaaatggagttcttcatttgctttttgatgcacattgaattaccacctttttttgcaaactggttttgaaagggagatcctaggagtctttgggataaggaaggggtctctgaactggggaaaccgcagcaaactggggtatgaagaatgcaaagatgaacttgactgtgcagtgcttatgagacaaagtcagcatttgtcagctttcattctaccaacaggtaccctaataactgtactgcaacatctggaaagggggtggtagccagctatgtggtttcctgatttgaggagaaaaggaaagaaggaaagaaaggaaacaaaagcaaaccttgtttggacttcagtgcttcttgattttgtctttttttggctgtcactaacctgggggcttttcaatgatctaagagcagcctatgattgtcattctggtctttcctcactgagactttcttcttatttgctgacttttctttccatcaggaaattattctaagagatgttgaaaaatgccattaccatatcctgttattatttttgggtggggggagagatgtggtactaatgtgtgtatgtgtgtgtgtgtgtgtgtgtgtgtgtgtgtgtgttttcagtgcagttgaatctgaaataatgaaaacctagaaccaagtatctaacagaagatgtcctattatggcagggaaggaggagagtcgaggatgttctggccagaggtctttatagggaaagtaccttaaagattttgggggagctatatgaggataaaataactttttctgactaccagttatgtctaaagggatttaaaaaaaaaaagagtgatacttcatattgagattactatgtgccaggcactgggctaagtgctttacagaaattaactcatataattattaccacaatctgatgaggtaaatactgtcattcccctcacttttcagatgaagaaaaagaggcagagagctatttaagtaacttgctgaaggtcacactcttggctggtaccagagctgcgatgtacactcgggttatccaagacaccagccagtgtgcttattccttatgcgaaattttctagaatagacgttctcatgtactcacagatgtaagtatctgtgtgtgtactcgtatgagactgtagttattgaaaacacagagaagtggaaattcaacctgccattcttttgaactacataatacctttaccaaatgatcacagcctctctcctgctacctttcccacactgagaggttgtttggttaatttgagcaaattaataggtgacagtcattatcctgacagccttataattatcatcattcacaccattatctttgttagaatcttctcaggggttttcctgccaggcccatgcctgttctgttggggactgcggataaagcagaattggggaaagagcagaacactagggtatgaaaaatgcaaagataaactcgactgtgcagtgcttaagagacaaagtgttgtaatcccagcacttcgggaggctgaggcagacagatcaactgaggtcaggagttcgagacaagcctggctaacatggtgaaaccccatctctactaaaaatacaagaaaaaacattagctgggcatggtggcggatgcctgtaatcccagctactcgagaggctgagacaggagaattgcttgaacccgggaggtggaggttgcaatgagccaagatcctgccattgcactccagcctgggtgacaagagtgaaactctgctcaaaaaaaaagaaaaaaaaaaaaagagagacaaagtgttggcttttgtcagctgagtgtggcttggacacaaagaattggggcaagtatctgggcactgactgcccagaggttcttggagctgctcctcctgggtcttttccttggctgctgcacagcagaagggtggcatttggggtggttgaacctgtgcttggctatttgggacaatgggaaagagacagaacaagacttttctctcttctggctggcagtggtgtgttcttgctctttctggagccataagggtgaaactgtgctcattctctagccagagaccagccaacagattctggggatttgccacgttaaagtgtggggttaatagcattgccaccaccagtggggacagagtcaaatacagcaagtcaggaaggagcaggcaactgtacattcctttggtcttcctctatggtccagtgtgcttaggaaaaaaaagtcatattctcctgaaaggatctaattattctgctcttttgttttgtaaagttttgtttaagtgttctaagtattaagaaataactaaagatttaaaagtttccaaagccctagatttctaaataatccagtaaccagttgttgttctagaattctggggtaaccagtaactactccttagacaatggctatgaaattaccagaaatcccttaagttccagattcttcaataccagaaaaaaaccctaaggttgtgaaagtaatagctaacatttattgagggttttttgttttgttttgttttttgtttttttttttactgtgtgcccagcagtgagctttgaatttgcaacccactcttatcctattttacaaatgagaaaactgaggctcaaagccaacaaacaattggcttaaaatcccatgctaagtagcacagactggaccagaacttagatacaaacttgatttaagaagcctctgatcttttttttatttttttatttttttaattatttatttatttatttattttttattttattttttttattgatcattcttgggtgtttctcgcagagggggatttggcagggtcacaggacaatagtggagggaaggtcagcagataaacaagtgaacaaaggtctctggttttcctaggcagaggaccctgcggccttccgcagtgtttgtgtccctgggtacttgagattagggagtggcgatgactcttaacgagcatgctgccttcaagcatctgtttaacaaagcacatcttgcaccacccttaatccattcaaccctgagtagacacagcacatgtttcagagagcacagggttgggggtaaggtcacagatcaacaggatcccaaggcagaagaatttttcttagtacagaacaaaatgaaaagtctcccatgtctacctctttctacacagacacggcagccatccgatttctcaatcttttccccacctttcccccctttctattccacaaaaccgccattgtcatcatggcctgttctcaatgagctgttgagtacacctcccagacggggtggtggccgggcagaggggctcctcacttcccagtaggggcggccgggcagaggcgcccctcacctcccggacggggtggctggctgggcggggggctgaacccccccacctccctcccggacagggcggctggcggggcagaggggctcctcacttcccagtaggggcggccaggcagaggcgcccctcacctcccggacggggcggctggccgggcggggggctgacccccccacctcccttctggacggggcggctggccgggcggggggctgaccccccacctccctcccggacggggtggctgtcgggcggagacgctcctcacttcccacacggggtggctgctgggcggaggggctcctcgcttctcagacggtgtggctgccgggcggaggggcttctcacttctcagacggggcggttgccaggcagagggtctcctcacttctcagacggggcggccgggcagagacactcctcacatcccagacggggcggcagggcagaggtgctccccacatctcagatgatgggcggccgggcagagacactcctcacttcctagatgggatggcggccgggcagagacgctcctcactttccagactgggcagccaggcagagaggctcctcacatcccagacgatgggcggccaggcagagacgctcctcacttcctagacggggtggcggccgggcagaggctgcaatctcggcactttggggggccaaggcaggcagctgggaggtggaggttgtagcgagcagagatcacgccactgcactccagcctgggcaccattgagcactgagtgaacgcaactccgtctgccatcccggcaactcgggaggccgaggctggcggatcactcgcggttaggagctggaaaccagcccagccaacacagcgaaaccccctctccaccaaaaaaatacgaaaaccagtcaggcgtgggggcccgcgcctacaatcgcaggcactcggcaggctgaggcaggagaatcaggcagggaggttgcagtgagccaagatggcagcagcacagtccagcttcggctgggcatcagagggagaccgtggcaagagagggagagggagaccgtggggagacggagagggagaggggagaggggagaggggagagggctttaaaaatcttttgtagagacagggtcacaccgcctctgatcttaacattactcagttcctatcgttctggaaccagatgctagagaaatgtgccttcttcctgtctaccccatcttcatggtaaaattaagaataaagaataaaggaaagctaggaagtaattgaaaaaattgttaacttgcttaaaatagttttctgttatctccttcctccatatgtacctaaagcagcccaaggacactgatgttgacctcggaaaccctgaatttatgtttttttctcattgttcagattcctctttcaggctatttaggcattcctgcacctgaggagaagctttgctctgttgctcctttgtttgaggagccataataaccaatgaaataagcaatacataatttcctgattgtattttcctcatacaaacctgttactaggttagaaatttgggtgtaggtataggtggggagagtggatgtgggtggcaaggagggccattgacgaggtgggggggctcgtatttatgaaaagtctcatgcagctgctgttaattttctaagtcaggccatatatttggtcattgtaactgtgtgtttatagcatacatcttttaaaaagtaaatttgttgtgttataacctacatccagtaaaattcaacaattataagcatacagtatgatgagttttgacaaattcacatagggtttacattaatttttttggtaacagatttattaaattataaattacatataattcacttatttaaagtgtataattccttgatggctttagtatattcagagtagtacaaccatcactaccatcaattttagagcattttcatcacccccgaagaaacctcatatgcattagcagtcactccccatttctccctaccccaaaacctcccagccctaggcagccactaatctactttctgtttctacagatgtgcctgttctggacatttcacataagtggaatcatacaatgtgtggtctctttcaattacattttctcacttagcttaaggtttttaaggttattcatgttgttgcatgtataagcattccatccctttttattgctgaataatagtccattgtgtagatatatatcatactttatccattcatcagttgatgggcatttggatccattatctatatatgtttatcagtttttatcacatataatatataaaaatatttagtgtatatatatgtgtgtgtgtgtgtgtatatatatatatatatttgagatggagtctcgctctgttacccaggttggagcgcagtagcacgatctcaggtcactgcaacctccacctcctgggtttaagcgattctcctgtctcagcccccaagtagctgggattacaggcacccaccatcacagctggctaatttttgtatttttagtagagatggggtttcactatgttggccaggctggtcttaaactcctggcctcaagtgatccacccaccttggcctcccaaagtgctggaatacaggcatgagccactgcacctggctgaatatttagtatacttaatgtattctatctatagtctatcttaatatatagactattttctatatatattaatcactggctaatagcattcatttttaagatgtagatatttaatcgaaaccttgattttcatatcctcttttttcttttcttactttcaatatttagtatgctagtagtcagaaacatgaaagtagcttaatcccatcttgatttctgagacaatctgatcaaggccaccacaactggatttacagttgtacgaaaattattatttggaggccaggcgtggtggctcacgcctataatcccagcactttgggaggccgaggcaggtggatcacaaggtcaggagatcaagaccatcctgatttacacggtgaaaccccgtctctactaaaaatacaaaaaaaagttaccgggcgtggtggcgggcgcctgtagtcccagctactccggaggctgaggcaggagaatggcctgaacccgggaggcggagcttgtggtgagccgagatagcgccactgcactccagcctgggcgacagagcgagactccatctcaaaataaataaataaataaataaataagtaaaattaaaaggccgggtgcagtggctcacgcctgtaatcccagcactttgggaggcagaggcaggcggatcacgaggtcaggagatcaagaccatcctggctaacagtgaaactccgtcttactaaaaatacaaaaaaattagccgggtgtggtggcgggcgcctgtagccccagctacttgggaggctgcggcaggagaatgacgtgaacctgggaggcggagcttacggtgagccgagatcacgccactgcactccagcctgggcgaaagagtgagactccatctcaaaataaataaataaataaataaataatacataaaattattatttggagttcacccccttgaatagctatttcaaaccgtagaaaattcttatagaattgtgtgtgtgtgtatatatagacatacagaatgaagatgactcaatatgattttacaaagagttttaatactttagaagcacaacagggtggattctttttcttttccttaaaaactgatgttgatatataagtatatttttttgactttagaagagaaatgatacactgacatcttgaaacgtcattggaaagtgacaaaattgatctagtgactataacttttaaaggacttacgttagtgttaacatgatgacatttgctaatacatcaatcaacaaagagagtagatttacttgacagtttaggtctttgacccagaggagacttactttaaagttctgtcctacttaaaaattgttataaaaatcagttataagtgtgttgacactgttgcagctgatgaccgcagatgcactttttaccccttgaacagtataaaatgaaattgcttaagaaatgggaaggcaaaagtagaagtagaatattacatgtggtatggagaaggcggactcaagaactagagataagatcacttgtgttatgtgtctcatgaaatgaaatgtaattaatttgtatttgaattgggagcttcagtttgttttaaatatatttgtgtacctattgttttagaattcccaaaaagttatctacatttttgcttacatttcatgaaaacacccaaagaatgacttgtttacctacatttttttgtttgtttttaggtattggttaattatttctcaattcccaggattccttcacccaaactgaggtggtatagaataaatgatacatgtttggagggacaaaagtcattgtttgagggaaagagtgatatcagtattacaactgcttctggctgaacaggtttgctttttagtttataaaacttgttacctacattggagtcagagctaaaacataattttcagtagcttttgaagtgttttattttaacagctttattgaggtatataactcatacatgataaaactgatccatttaatatgtgcagctcagtgatttttagcatgttcatagagttgtgctacctgcaccacaatctaattttaaaatgttttcatcatcccacaaagaagccctgcaccctttaacagtcattccccatttccacccctcaaacttttttccaaagtggcttcagccttttcatctgccacagcagcatgtgagggtttcagtccacctcctcgcccatggtttatagccttaaagtgtcataaatgtaactgtaggaaggtcatggaacccagcatgatttagatttttgattcacctcacagataactagatcaaggcaaaatcaacctggaatcaaccatttttttcccaagataaagtcacaggattctaggctcttaaagtgcttcagcaccagacaatccggtagtgattgagattcaaataaaaatgtgctactgttgacctccttttatatttcaagtgaaaagtctatctatgaatctttaaggagatgtttatagacaatgctcaaatgggggttattagggaaagataattttggggaagggagcaaaggcaacaggaaactgtcagctgaaaataagattaaatacttgtaaatcactttgtatttggcaaaaattagtatagtgcatatgtatacatttcagggatagaaatactcagtgttcttaaatgtcacacctgcagttctgacagcctatatccagagcagaaattttcagccaatgtaaagagttgaagaaacaaaggattggcattatttgagcagaactaaacataatcgaaggtgctggaacttaaagctttattgtgaatgaaatgtagtctttcatcaatagtctttttcgtttcccgaaggaagggattagaacttgccaactctcctttccccttaaacaaaacaggttctggctttaggagatatactatcctttctactaatgataatctaattttgttgaatagtgatatcttcttatggttaatattatttcatgctcttctctctcctccaagggaggctcataatacatgtactgtatttaatttttttaagttaaagttaagaaagatgcttacaagttcaagttcaaattcaaattaattctgtgaaacttctttaaaccctgtagtataaaaaaactgcccctaaattagtgttcttcaaatgatctctcaaaatggtttctaattttgagttttataaggtgtctggtcactcagagtcctggtttgttaacactctggttgaaggagattccaaattctcaaatagtttactagaatgtagtacaatatctatttcttagaaacacattttcatacatttgaataagactccaaaacgttgaatgtatgcatggatcataaatctaaataacatagtgccttctgatacttacagatcttgtttcattcatttatttacttacttatttatttagagatggagtcttgctctgtcacctaggctggagtgcagtggcgtgatctcagctcactgcaacctctgcctcccgggttcaagcgattctccagcctcagcctcctgagtagctgggattacaggcgcgtgccaccatgcccagataatttttgtattttttagtagagacggggttttgccatgttggccaggctggtctggaactcctgacctcaggtgatccacccacttcggcctcccagagtgctgagattataggtgtgagccaccctgcctggccttttttttttggaaaaaaaattccaccacttagataatataaatgattaattctacaatatgtagaaacaattatttcttgtggttataaacacagacttcttgaaacacatttttcttgaatttacatggagagtaccatttttctaatcttgttttgctctgtgagccctgtaagaactgccctctccaactccaccaaacctatcgggcctatcctgattacacatgtatgttcatgttattcctcttgccttggccgcccttctatgaatcccttcattgttcttcacaactaacctactttatgaggcccttccactcctgctcccatcttgagtgctttcatttccttcgactcctaaacatttaatatccatccacttgtatggcacccaatcgtgtacgtactcttttgcacatacctttccacgtggacacaccttcccatgtacacatatcttaccttcctaagtgagttaaaagagttcctgaggtcagggaccataccttatatgccttctggtctcccttagtagctagtgcaatataacttaaatgtaagtgatcaagaacattttgaataaagaccactttcttcttttttttctttttgagacagcatcttgatctgttgcccagggtggagaacagtggcataatcatggctcactgttatggctcacctcctcagctcaagctatcttcctgcctcagcctcccaagtagctgggaccacaggtgcatgccaccacacccagctaatttttaagaccacttttatcttgctgcatttctataaacattaggataaatgggcttagtggaagttttagttaatttggaatttttatgaaaaagagtgccaaataagggaatgtatcatattagatcataagatatgaagaagggaggataataagaaattttcataaaaatagatatggcacatctatatttcttatattctatggtcatcaacaatattcctcagctttacctttgtcccaaatggaaccaagtggggtatggatggttaaaataatcaacttgaaattactgcatactcacaatatatttattcagctgcaggtaaagaaatgagtaccgataacttaacaaaataatttactgggttagctcacaaacgtggaaggttggagaaaccaggcttcggtatctctaggaggtcaacgtagtaggactgacagaggtctcttcagtgcactttcatggggatccataaactccgcagattttcctttccttatatagcatttcactcaagattcaggcatttcaatcaagattcagagtcctgaaagcctactggcttctcttgggttagatgccctttattgctcaaggtcaaggaaacttaattaacagtcccacaagccctctagccataggactgatctacatcctcaaaaaggaagttgagcaccattacaaaaaaggagaaatgaaggctagcctattcataaaatcaccttacgcagtacagaatatcagaaaaacagctggtgagaggcacctagggaatagaggaagccacgggaggagggtactagagtgacagaatacaggaaatcactcaatggtagttttaactgtgttctattgacactacatgtatcttaaactctgagatgatgacagatcagaagctgttagtcatcgctataaaaacttgcctttctagtcagagttgatgtgcatgggaactttgtatttccaaggtttgctctcttaaatatttactgtgagaatttctttggctcttgtcctacatcctgaaatgtcaccgaaggcagggcatggcaatgcaagggagggcggaggtgtgtggtgtagaaaggcatttttgtctacttaggtttgaaaactggtaagggagataattctcttcatcctcccccattgcccgcaacctcccaggaatactggctttattcatgattctggtgctttgtctctataaatgtgtacttttcctgaagtgctgtgattggagcatttgaatgaaggacaatctcgtatgcatttgtcttcacacaacctcttagtctctttagatgtttggctatttctatcatatcctatctagtttgaggagttcagacaatattttctttaaagaggattctggacagaaattgtaaagtactaaattgtcattagaaagatcagaattgcattgtttacttttacaatagagtaggtaccagagagagcaaatttccaatggagggacatatttgattactacaaaagtttctgatttggaagtttggataattctgttaacacaatcatatggtttgagtgtctagattttatacctacagttttgttcactaattgtaacatctctctgtttttgatcattaaatgttgaaagttaatttgtgtaaagacttatgcacgtggtgacatgagttctgcccagtgctctgaaatcaaagtgaagaaataaatccatggaagcccaggcaaatgatgggtgtagctatgactctctgaaggtagccaaatgccttgtcatctaattaggctgtgtgtgaatggataattgatattcctactgtcttcagagattatctgttgaaaccacagccaagtgcatggtttggcagaatccgtgggcaaagactctgttgcacctgacagtaaacctggcatagtgaagagacatggaaggtacaggttaagtgggaggccctgctggggacctgaaggttaagccttggatctccaaatccattgccatgtaagctgtttaggaaaagaaggaaaatttttcttttcttttctttcctttttttttttttgttgttgttgagacagggtctcactgtgtcacccacactggagtgcagtggtgcaattactgctcactgtaacctcaaactcctggactcaagccatcctcccacctcagccttttgagcagctgagactacagctgcaccaccacaccagtctaatttttgtatttttttgtagagatagagtttcactatgttgcccaggctggcctcgaactcctgggctcaagccattccttggcctcctgaagttctggcattacaggcatgagccactgtgcccagcccaaagctttaaataaagtaaacaccatttggttaccaacactagtagaaatcaaaaacaaaaatagacaaattttgcctatgaagtaaaaaattcctccgccaaaatagactaacatagtcaaaacaatgcatgaaccaaggaaatttaatccaataattcatggatgcttcagtagtagaaaacatatattttatcatattaagagttataaagggaaaattgtatgaccatcttcctatacactggaaatacattgataaaatgtaataacaattatttataataacactcaaaaatataaaaatgcaaattactttcttaacttcgtaaaagaaatccaacaaagcaccagaggcaacatcatggtatttgagggcattcccactaaagttaagaacaagacaaaaatgtatacttttgttaattggtattattctgtatgtactgttcaatgcaaagacaaaagaaggaaattaggggccaggcacggtggctcatgcctgtaatcctggcactttgggaggctgagatgggtgaaacacctgaggtcaggggttcaagaccagcctggccaacatggtgaaaccccgtctctactaaaaatacaaaaaattagctgggcatggtggtgcctgtaatcccagctattcaggaggctgaggcaggagaatcgcttgaacctaggaggcggaggttgctgtgggccgagattgtgccattgcactccagcctgggcagcaagagcgaaactttgattaatcagcctatgtgcctgacactggtcttgcagtacaactggaaaccaaagcaaggtggaggatgtcctgaattaagatgttttcatctcattgtgtaacagagacagccaataaatctaccatttgattttataaaaaaggaaattggaagtataaaaatttaagacatataaggagataaaaaattgtaactgtaggtgactatatgactgtattgcattgtgcattgtatatacccaagaaaatcatctgaaaatccaccacaaataggagaattttgtaaggaagtgggatgtaaaattaacatacagacatcaatagcttttaagcatacaaacagaagacaaataaatgaccccaattacaatattagcagcgaggataaaatctataaaaatacaatacaatgaaatattgaggaacattttaaacactaagaacatagatggagacttgaacaaatgcaaaacatattatgttcttagaatgagttgacatcataaaaggtcaattctccttacatcaatttttaaatttaactcagtcctaatgaaagcatcatctgatttctttttgaaccagacaggctgattctgaagttcatatagaacagaaaacatgaatagctacaaaatatttcaaaaggagtgtaattataaagacagaaaaagccccattagagattaaaatatggtaaaaggacttttataaaaaagattctgtgatgaaacaaatgtggtaatgatgtgtgaatagacagaccaatggaacagaatagaatatccatatacacctaagaattaggaatttcagctggcttttcatctccaaaacggtacacgacatttatactgtaagaaatgcaagttgagtgagccgagattgcgccactgcactccagcctgggcgacagagcaaaactccatctcaaaaaaaaaaaaaaaaaagaaagaaatgcaagttgaaactatgatgaaatgctattttaaaaccaagaaatttgcaaaaatccaaaagtttcacaacacattcaaaatcctggagacaatatgaattagctcaatgctcttgaacttaatttggtaatacctggcctcaatgatcctcccaactcagctttttcaatattttctgaaattacaattacaaatgtatattccttttgactcagcaattcctcttttggattttacctaacaaatatgcctataagcaaaaagatatatgaatatgtaaggtttttcactgcacattgttttccattaaagccacagggactggtcgaacaaactaagataaagtcccatactggaatacagtgcagaagtaagaaatgaataaggaaggtcagtatgcattgatgtggaagatcttccagatatttgtcaagtgaaagagaacaaggcacataccaatgtatataatatgctatttttttgtgtgtaaaaaataagggaaatctatacttgagtttgccagtgtatgcataaagaaactttagaaggctatacaagaaacaagatgcattggttacctgtggaggagataaggcttagatgggaaataggtagacaggggactgtttatcttttgtctttttttcattatgaaccatgcaagtgtttttgcctattcagtgagtaaataaataagcaagcatacagccatatgtatacatcctatgtacttataaaaatgactaaggatgctgtctatgtattgatagggaaaaatctctcaggatgttatgtggacaaaggaaggtggggaatgtaatgtataatatactacttttttatgaaaaagagagacattgaaaatatttgcttggttttgcttataaatgcataaagaaactggaaaaatactccagttggtgaacattgtgatgtgctgccagttccattccaggcctccttcaggaatgacagagttcttgccccagctgttgagaatgctgccagcccttatggggatagattgcctcctttgaagggagccgcctcacctcagatcaccacccattcctgggtagccacatccagtgcatgatcaacatggaagtgtggatgggcagctcccagcacccagctcagcacatctctgaagggtcatcccaactttagaaatccccttctttataactgcaaggttatctgcagctgatcttctccctctgccatctgtgcccttccataggcatcaactcgaaagcattcctaatcagtctacttcttgctaggaatctgcttcctagggaacccaagaaactaaaaactaagaaactaaaattagtggttctctgtggttgagcagggtgggaatctggtgaaggtggacaaggttgagaaggctatatttcactttatgcctttttataattaaaaaaaattgtaccatgtgtctacatcatttattcaaattataaatgcaaatgtatttgttaacttgctatgtcagtgatattttatgcttttccatgtatgtctttggagaaccttttttttttttcactttaggaggagatatttttaccccaagcgctgtgccctaccacactctaaataagattctcttttctgtttgtttttgtttaggacctgcagagaaacgcctcctgattttgtcttacaatggaacttaaaaagtcgcctgacggtggatggggctgggtgattgtgtttgtctccttccttactcagtttttgtgttacggatccccactagctgttggagtcctgtacatagaatggctggatgcctttggtgaaggaaaaggaaaaacagcctgggttggatccctggcaagtggagttggcttgcttgcaagtaagtggataaattaatgcctctctttactctttaatcatttaattacatttactacatcatgaacattgtgcaaggcagagagggctttcttttcaaagtataacatatcttttcctgccttcattgcaatgattgtactttcactgtaataaatcagtgtgaaaatgcaggcactccctaagatgttaaatcaaccatcaattcattcatttctttattcatttattttctacgatgtgccgggcattgaactagatgctggaaatgaaaagataaacagcaaacacatggttcctgcccttaagaggctcatagtcttgtaagatacacacatatatgagtaagaatgagtcagggagatgaaggtagtgatccaggtatgctcaaggtacattggtaaggaccaaaggacaaaatggctctcagcagccttctaggcagcttctacatggcttgtgattactcttctctgtttcagatacactgtggtcaaatcacatgtcctgtggtcatgagaacttcccaagaaaaagctgacatagcaaagagtctcacaaaatccaatccaatccaatcacaaaattaaaatcctcattaaggattttaatatagtgttatgtataagacatatgtgatatattttgtgtgtctccaaaagtgatattcttgatgaacagttacatatgatgtaatagtgattcctgtcatctttagagagaatagtagagactttttattttccttttcaccattaaaatcatatgccacttgaacttctagagtcatagtttgaactctgcagtaatatttagtgaccattattccaacatatttggaactatttaagcacaacagatggtgatctagatagggtcagtagccctgggctctcttcctgtgtgctatgaactcaccattattcattgagcaaatcacaatctctattcttatggggaaaataaggacattaaatatgatttgtaaggtatttttcagctctaaaatggtttcatgaaaaatgcattagtcattccttcttttaaatatgcttctctcctgaattgtaaaggggatgtctttcaaaaaaagcaatgcctccaattgttgtattaccttgttaaattataaacaagaaaaaaaggcttaaaaaacaatgcaggatcatcttgctatgtcagataagatgattaaatataagtaaacaaaaaaaaataatatagccattatgagctcaagggaaacagggaacgtttgccctagatttgtttcatagtttctcaaaataaggattgtttgtaaagccaccaaagtacaagtggatgataactgatatgttaataatgtgatttgaatgtattgatttctaaaataagacctgtagtggggaggaaataatttttttaatgttctctaattagtcaccatttctattagcaaatactaagttaaacagaaatgtaattactttggcttccagcaagggtcaaaggataattaaaatgctgactcaattagcacatacttgaagaatgaagcttcttttcacaagtctgtccaggttggagtagagggctgaggaaagcggagatctccttaaggatgggcattggtggtcagagctgaagctgactgtttttgacaattcaactgcagctctacacgttttccaagtttctaggtggatgataactcatctcaagagccaggagcagccctctttactcttaggcagaactggctacataatttgcaggccccagtgcaaatttagtgacagcagagcaaatttagtgacagaatttagtgacagcagagcactaaaccaagtgtgggatccttctaaacactgggccctgtgcaacttgcatagtcacaaatccaacaagccagccctgcttgtagggaccagagagttagggcatcttatcaaaattctgggagacaacaagtacttgaaggagcttgagggtggagtcagaagctaattcaagtcctggctctaccaccattgagctgagtgaccttatgcaagtcacttaacctctctaggtccactgcctttagctagatgaggaagcagttgcacctggtgagcaaagcttttaaagatgagcatagaaaaatgagggcaaataattcaagaatgaaaagtggtggggaaaaaaaaaggatggctaaatagctacaacttacgcctgcgtgtgtgtatatatacatatacatatacatatacatatacatatacatatacatcatatacatatacatatacatcatatatacatatacatatacatatacatatacatcatatacatatacatatacatcatatacatatacatatacatcatatacatatacatatacatcatatacatatacatatacatatatatatacatatacatatacatatacatatacatcatatacatatacatacacatacacatatacatatacatcatatacatatacatatacatatacatatacatatacatacacatacacatatacatatacatcatatacatatacatatacatacacatacacatacacatatacatatacatcatatacatatacatatacatatacatatacatatacatatacatacacatacacatacacatatacatatacatcatatacatatacatatacatatacatatatatatactttagatattgtgtacaagtttcagcatagctggctccattgaacatattgtatttgatgttatcctctttgggttcctcatagcataaattaagatgcaaaccctgaaacagtgtttatatagtattagcaagcagtgtctggcagtgtgcaagtcacactgaccatcagctttatgacaactttgctctacagagaaacaagtggatcattagtaccttggaagtggaataagtattttcatgttggtgactcaaatggttatcagtggttcttagccagggagataattaggatcatctatgggaccatttcagcatataattgcgtggatttgacacgcagacagtctaattcatttggtccatgatggggcctagattcatgaattattattgttattattattattatttgagattgggtcttgctctgtcacccatgctggagtgcagtggtgctatattggctcactgcaacctcgacctcccgggttcaagtgatcctcccaactcagcctcttgagtagctgggactacaggtgcatgccaccatgcccaactatttttttcttattttttgtagaaacaaggtctcaccatgtggcccaggctggtctcaaactcctgggctcaagggattctcctgcctcagcctcccaaagtgttgggattacaggcataagctactgtgcctggcctcatgaattttttaaagtccccaaagtgatttttagttaggaactaccactggcttaagccctctatatttaaattttaatctttcactttttgataactctctgatatatgatttgctttgacatttttaaaataaagagaactattgtagatttcttcttgtgtgtggcactactcatgccgtgtaaattatgaaaagtaaattgtctgtaaaacctgcaaaagaaagggaccattcaggatgaaagatgaagacagttcttggaaggatgggtggcagagggagctggaaccttgccaagattgtgcctaagcatgtgaaacataaagtcctactcctgggctttggcaaacctagatttggacagtagctcataatagcatattacaactgtgaaaagacatgaaattctggactttatactctttataatcttaattcctaattccttttccttgagacttaaataattgagaagaaaatacttcttccccttgcttgaattctttgtttgtccagataatccctgggatgaataaagctgggtaggaaggatcctaccctcctgggttatacattgtgaatgagctcatcctcattacatatattcctagggtctctgagctagggatgccaatatagaaaacaccatccatgtttctaaaaggtttgtagtctcagggaagagacagaaaaaaaaggtaactaataatttgagaattcacaaatatcaaggagaatagcaatggcaaaacaatctctgaggttttagagggatagcctttgaggaagctattgagatgggccagataggaagatggactttcataggcagatagacagggagagggaagtccatgcaaattacctttatgcagaggcctggatttggtactgcagaggctgtgttctcatggagtaaatttggctggaaaggagggattgtgttgggaggtgtgacggtcagttttatgtttcaacttggctaggttacattctccagttgttcaaacaccaatctaggtgttgctgggaagttattttgtagatgtgaataaagtgcatagtcacttaactttaaataaggtagcttatcctagaaaatctagatggatttggctcaattgttgaaaggctttaagagcagaaatgagctttcccaaaagaagaaattctgcttgtaattgtagctgcagcctatccctgagagttccaacatgcccttcctaatggcctcctctgcaaatttttgacttggttagctaggcaggtattgtctggctgcctagtatggttgtttcaaacgtgtaagccaattccttgcaacaaatgtcttaatatatgcttcctactggttttgtttttctggttgaaacttgactgatatgggaagaatggaaggtaactgaactagagagctatcatggccttgcattgttttaagatgagctaacacaccctttggctagatattgttctccaaattcaaggaaacggtggttctgtttctcacactacccaagtgctgaaacagcaggaaatagcacggagatctagtctgcagttttgtactcaaagcagatttgagagtccttgccctctcccttttgtcttcacttcctccaaaggtgttcaaactcataatacgagtcagtaaacgcatcaccatgttaatataatgagtcagtatggccaggcccacttgctgaatgagttatgagtgctggcagagctgggtttgggcattacccctaagcactgttaactccttcaaggagtactgaattcctgcttctctcaaggattctgttgcattggcaggttcccagtgtgctaggcagttttaagattggtggccgggcgcggtggctcacgcctgtaatcccagcactttgggaggccgaggcgggtggatcatgaggtcaggagatcgagaccatcctggctaacaaggtgaaaacccgtctctactaaaaatacaaaaaattagccgggcgcggtggcgggcgcctgtagtcccagctactcgggaggctgaggcaggagaatggcgtgaacccgggaagcggagcttgcagtgagccgagattgcgccactgcagtccgcagtccggcctgggcgacagagcgagactccgtctcaaaaaaaagaaaaagaaaaagaaaaaaaaaagattggtaggaataaagaccaggttttggttaagctttctgccatctctaaataccaccaaacccactaaaatgaaaggcagtcagggtatatgagatcaacaatttgagtgggtgtggctccttagtgcctttttctttctcaaggagatgaacttgagatttacagtctttgctggagcaaggattgaggaacctgcaatttggaggagctcacaccttgggctccctgaattttagatggaaaggtaggaccttcacaggcccaactgatccactctgttaggaaatccttgctgcatggcaggtccataacctggttactactatattctgtttctcactgtagcatcagccaacttatgtattcactgcagcagacctggccatccttctactcctgggactctctgaaactttttaggaaaaagaagtgtgacacaggaaggggaacatcacactctggggactgttgtggggtggggggaggggggagggatagcattgggagatatacctaatgctagagggcgagttagtgggtgcagcgcaccagcatggcacatgtatacatatgtaactaacctgcacattgtgcacatgtaccctaaaacttaaagtataataataataaattaaaaaaataataataaaagtagctaaacttaaaaaaaaaagtgcgtggaggttgagtttatttcctaaagggaataatttcattcccaaaactatcctataataaattaaaaactgaaaaatcacgttatgtttctgttccctccatttagaatagatgttcatcccttttgttgacataaccatacttcgcagcctagttcaaggcttagttctgtggccttggtttttcttcctcttatgaaatccccaaacaagccgtctgaacctttcttttggtgcttttggccttgggttttattttaaaccttgatgcgagtttgttttgcctcttgtctgagtcctggattgtgtttgatttctctgtgtccttttctaacatgatatgagattctagtactgtgctgtccagtagggtgggcacatgtggctactgggcacctgaaatgtggcttattccagtttagatgagctataggtataataaatacacactgcgctgggtgtagtggctcatgcctataatacttagagctttgggaggctgaggcaggaggatcacttgagaccaggagtttaagaccagtctgggcaacataatgagaccctgtctctataatttttttttttttaattagccaggagtggtggtaacttgggaggctgaggcaatagtggcttctaaacaccaatactgacaacaataatattggctcttgaacactaatatgcaggcagtggtaagttcgggaaaaactttcaccaaaggcaaaatgaatataaaggcaatgatagaggaaatgtatgagtgtgtgtgtgtgtgtgaagttcctattatcttcttactgtcttgcattttattccaaaattacatccttctcactattagcttatttaaacatttcttcttctctaattaagcagtagtaataatagatggttattactttttttttttttttttttgagacaagagttttgctcattgcccaggctggagcacagtggcgtgatcccagctcactgcaacctccaccttcccggttcatgcaattctcctgcctcagcctaccgagtagctgggattacaggcatgtgtcatcacacctggctaatttttgtatttttagtagaggcagggtttcgccatgttggccaacctggtcttgaactcctgacctcaggtgttccacctgccttggcctcacaaagtgctgggattacaggcttgagccaccatgcctggccagttattatatttttaaagtatcttgtgaaaataaaacattaggaacccttgcccctttttcccccccttttttccctaaaattgttcaggttcaaaggtgtggaatcactggttcatgtcacaggtaaactaacttttgttccaaagttcccttctgcagagttttcactttgcattgtaagaaatctcctgaaagtagccctttgatttaatctgtctcttgaaactcatccagtgctgaggaataatagatggtttatcatcttgaggccttgcacagttactacaaagagctaaatacataaatatatcacattttgcagatgtgacttgatggtcactttgatacattttgtcttgttattgctgaaatatgaggctattgtgttttaaatctatgtgaatagaatctataaataaacccaggttctaaggataagggtaaaataattttgctctaaactattgaacaccaagtgattataaattttatgttttcatctaacataagttcataaagctatgttatctataagacattaacaaaagtaccattaccagtggtgaatccatacaggtctgcatcagacttgatccttgcttccttggaggaaagaattccgccagggggcagaagtgggtttaaagcagagaaagagaccaaggcaagttttagagccggagtgagagtttattaaaaaattttagagcaggagtgaaaggaagtatttacacttggaagagggccatgtgggcaacttgagagattcaggtgccccattcagtccttgacttggggttttacaagttggcatggttctggggtttttccttctctcttgattctttccttatggttggctgttgctcaactgctgcataggcagtgttggtcatttgggagggtgaccacgtgcatagtgtgtttactgaggctgtgctcatgctccgtaggggcagttttcctttaccagtcaaatgcccccagaggaaggtcgtacatccaccattttgcctcttagtgagcatgccagagtccacttgtccaactcctgagatcttattgggaagctgctgatcaccagctccaggtgttttctgtctactgggagactctcttcccctggtgttggctgtggccaattatcatttcagaaaaacagtttaataaacatctgaccatcacctgatggttactggaaattcctgggtgaggcgagggctctcctgccctgctcatgtctgcctaactacctactctaacagtaccttgatgttctttactagtaatttgatttctaggaaaaaattaagatcccaattgaactatttctcaatcagggagaatgctggtctgactttggccttagacctgtcattggctagctatggactcttggtcaaatcacatgatctttctgagttccagtttcaccatttttaaattgaggtgtttagaccgttttcaacttccaaaatttcagctctaaaattttttgtctttaatctctgacctaatgatatatttctctaaatcagcagcagatggcaatgtgaaagtagagaattttaaaccctgtttccatttgctgtttccactgtaagagaatttctgttcattttttcctaatgcttaaattgttcttcaaaaaaaatcatttgttaggcaaaaaaagtgacttaagaatttatcacatagttgataacaatgctgtatatttcatacagcagtggctttggttgtacatgttatgaaaattattactcctccatcttgcccccacactcccaggctctgaggcttcctcatggaattagcatgcattaaagagcataaagtcctattttgaggatgaaacttgaaacttttcaagtatgccaggaataatctctgtgtgtttcaattccaatgtgttgtaaaatttgtgaacactgaaactcaatgtcaatgtagtttggtaacaacagagaagggtcatgccttatgctgtcagacattcatttgtaaaattagactcttaaaactgtttctatttttgaagtatctaagtatttctcattgggtgtacagacagcccaactattggatgataaatttggtctttcaaatggattttccttttaaaatactggcacagaatatttccctctatttgtcatgcaaatgtatcagtctcctcttctgcgctgactcacacaagagggcctgaaaatgggagggtccaatttatggccaggaaggaatgtgggagagccttaagcaccaggagctatgatctcagtgtatctcaggggccataaactggtcttaaatatgtgtataagaagttctctggtattgggaagaatgtaagagcatagtgcatgggttattggaacctacctctgtcatttacaaacagtgagaccatgatggattccattgtttctctgaggttgcttcaaaaagtggtaaaagacacatacatacagaaaagtgtatgtatcatgacagtatagcttgatgaatgctcatgaactgaatacactcatataatcattacattcatgccaagaacaagaacatgagcaataccccgcaagtttggctttgcgctcttctgattataactccccagcccctactaaagatagccagtatcctgacttctaacacagattagttttgcttgtttctgtagtttttataattgaaagtatatgggttgtactttttatgttgggtgtctttcatttacattgtgtctttcatttacattgtgtttgtgtgatacacccttaatgtgtgtagttgtagatcattttcactgccatataattatgtatataactctaggtgtttatgtggaattgaattccacatagaattgaaacttctgggttttacagcgtgctgtgttcggctttagtaaacactgccagcagtgtgtgagaattctgttcctaccgctttcttgctaacagtattgtctgtctttagccattctggtaggtgtggtttttgaaaattggagatcaacttgaaaggttgtcaactcaattcagatatacttctctttgctttcaaatccttggtctttcttctaccattgacttgaacagcttatttgagcttcagtttccttccatgttaaatgagactgttgggctaaataacccttaacgtccttttatttctagtacattaagttctgtacttctgagtacagtcctagtaggaaagaatttcactatcacttaaattctgttacatgagctgttgcccacttacatgtagaacaattccaggtgatggtcacttttgcctctcagtcaacagggcacagtaacacggtcaggtgggtactattataattcccattttcagatgaggaaactaaggcacagaatgatcaaataagttgcccaagaccgaatagctaccaagtagtagggctagaatttgaataaaatctgactccagaacctccattttacctatgtgataatatcatcctttaatttcattatcaaaaagaatgggactaacaatagtatacacctcccagggctgcagtaagattaaaatgagatgagattgttcatgtgaactgcctcatatagtgtctgcatatcataaatactcagtgcattttatttttgttgttttatggtggaaagaatcattttgaacttatgatggatggatcatatgataataagtgaaggtttcatttctttttttaggtcctgtctgcagtctctgtgtctcatcttttggagcaagacctgtcacaatcttcagtggcttcatggtggctggaggcctgatgttgagcagttttgctcccaatatctactttctgtttttttcctatggcattgttgtaggtaaggaacctcgtcactatgactttcctaaccttcaagagatacacatcatttcaccagtgccaggtttatgatccagttaatgtaaaggagtgaaaatgctcactaataatttactttcaataaccacttctccaaaaactgttgctttagtgaaaaaaacctgcccagtgaatcaaaatgtttgaaagaacaaacaatccatactctgtctccttgcaaggcacagggaagtttttcatctcagcccttgtctctctatagcacatatgggaaaagtgagaggggaacataaaacttggatgttattgacatctgtcacttctcactaaattatgaagtggcccttttcctattgggcagtcaagcatgattctttgaagctgtttgtgttcacaaacagctgtttgcattccatagcatctgttgctgtgaacccaagtgaaaagccacagcacaagtaaaaagtagatttgaaagcatgtattactattttttttagagataagacatgagtgaagaaagctgagtggtgggatgatgctggttacaggggaggaaagcataggaggcgcagggccttagagtactgaaaatttgggaagatatccttgtcatgtcattacactaattgggttcagtgttaaaaatcaccaaacttggtatttctagggactgttggtagggacttagaaaaagatggcctccagctttcaagtttcttcttaatgcctgaaaggagctaattttattgactaccaatattccttttttctgcctggaaatatttctccaataataaataatagaaaatgtagcaactaatattcactgtgtacttatcatatgctagggactgtgctaaatgctttatatgatctcatttcctcttcacaagaacccattttacagagagggaaagtgaagctcagagaagtaaaaatattactaactaaattagcaaagctaggagacttcgtttgatacttagagatgctcagtctgacactcagtagtccatttatatgggatttgatattggcttaggcttacacttatggctattgtcgctgatggtggagttacagggctttcacttggttttcctcactatgatggcgttgtagggaatgatacctcttattgctttgtccaagggaccaaagaacaatgtagggagttctatcagctgttgtgtatatgtgctataattaaatatcagggactggggaaaggaccattggctgggcagttggggcataatcccatatattacgtgcccatgtaagcccactctaaggggaagccatgcaaactcttcgtgtctctaacaacaatgttcaaaatgtatttcactttcctcagtgtacagttacttaaatagatggcatagttctctctggggaaagactcacgttatcattccatatataccaacttgtcatcatgtttgttgcagtgtccttcctcctagagtcctggcctttccttcatttagtggattctgggtcagaaaacaggctcaggtctgaggatgtacatagctctgatttggcaataggttctgattctcagtgactgagaggaaactgtcagctcatggagagagcactggacttcaggtcagcagacacaggttctgtgagtttgagcaagctccttcatctccacaaatgactgtaccctccctcatctgtgaaggcaggctaagaaacctacctcgtatgggtcttgtgaggactaaatgatgtcaagcaagataacaataaaataaagagttgagttagatttcaattaataaaaatatctctcaccaccgtaattattggggacctgtgagttactgcttgctggcaaattattaatatttaccaccatggttgatttcttcacagttttatttcatcagtaggctcatagtatagggctcatggaatgtttgtgggataaataaatgggataataatgaacactggcactttcattctgttaccatttgaagtagagtatcaaattgaaaaaaaaagtgacaggaaattattacacagtctaaaatctcattcctgtatcatgagctctttagaaaaataagaacggttcagtctaatggtaacatttgtaagatgcaattctgtgcagaatcatatcctaaggactttcatttgtctggaatgagctagatggcctctttagctagacagtgtgaccaagggaaagatcagacactgactagcaggcaggctctggggttagaccatgtgggttaaccttcttttatccacttgccagctgtgtgactgtaaacatgttttgtaacttctgtgttctcatttgtaaactgagcatcataatagcacccgtcttataggagtttgtgaagatgggtgacatagtgcaatgaatgctagctagcataaaccattatcatttgttttatgacctgaaaaattattcagcctctctgagcttccttttttattttttataaaatggcactgatatgagttcatggaggtattgtgactattcatgagataatgtttataaagaggcatacagagatgtttaatacatatttgttcctttctccttaaattcctttctgacccatacagcagtagtttttggctactgaagaagctctattgaatcagaaatatttgtgtaagaggtttaaaaatacaagaaaagaaattaaagttatatgggatattacaagctaaaatgtcaaaagaatactaaagtgtgttaaatgatataattctgttttaccatttaattgatttttttccaaaactaacaatttgaaaacatgatgttgttttgttaggtttttgtagctcaaatgaaaacctgtaccaacttgtcagattgcaggattaattgcaatgaggaacttgataccatatcagtatagatttgtactctgttacggtaaatccatttgtttattctgtacttttttttttttctttcgagacggagtctcactgcaacctccgcctcatgggttcaagcgattctcctgcctcagcctcccgagtaagctgggactacaggagcaagccaccacgcttgactcatttttgtatttttagtggagatagggttttgccatgttggccaggctggtcttgagctcctgacctcaggtgatccgtggtcttgggctcccaaagtgctgggattataggcgtgagccactgtacctggcctctgtttattctgtactttaaatagatcttcattcaaacctgattttgtagcatcatgcattctctatttgaaaaatattggtttgctgagttatgcaagaacttaaaaatgttaacacatttcattgtaaaacatcactttggttaatactgccaacaagctcattagaaatctttatgtattggcaagtgattgtaagccacacagccaaatctgggaattgagtctcctgttttctcaataaattttctaaatcaggcaaaaggcaatacagtgagagatgaaaattaggtgggtaggaggtggtggtgcagggaatgtgcctgtaatgatttgctcaagcctctttctaataatttctctttgcttttctgaaaagcacaactcaaaaccaattccttgtattctcttttctttagaatatattgttatttagctagctgattatggttttcttattattcccttcctgatttttggaagaattccattttcttcccctcacctcccaccactgccctttctttggtaatacctgcgtagtccactgagagtggggagggaaaagaacatgtttgtagacagtctgattctcttactgtaattctgccaaatgagataaagagcatttcctgtatatttgctttagtagaaatagagatttataagccccccctttcaaaattgttatataattgaagataatttttaactgtcatggatatgcaggtgtaataaggtactatgattttttaatgtagtctgaggcagtatctacataatgccataatactcaggtgaaaaatgaaaaaagtataccaatataatggattttttttgtactcatgatagcatagggacagaaactacatatttacattttttatgtctcttaatttttacaactatcttacaagattgttttacagataaataaactaggaattagagagtttaaatgactttgccaaagtcgcacaaccaattgtctagttggaggaatagacttgaaaatatataacttgtagcacagcacaataagtgcaatgatgaaaggaagccaatgtatgtgtgtgtgctggggagagagggtggaggcttcatgcttaatttatgcttgcgctaagtcttgaaaaacaggcaggaagtggttcaagtggatacggttggaaggggagtggggatggtgtgaggaggacatttcagtagcctaagtactcagaggcgcaagatagaatggataaacagcagtctttttatacgtgtttgttaaggaatgcacagatggtgtgaggagttgcaaatatgtcaaagcatggtatgtaacagaggccagatgctaacagtttaatgaggtctttattgcagtagtatgacatgatgagaactatatgacaacagtttagaagacagattggtgggaaaagtactgaaggctgagacagctattaggaggctttagatgagattaaaaaaaaaagatgaggaggtgaactgaggcagtgttagtgcagagagagagtgaggttgataatttaggccgtgggtgtgataaagagcttgatgtctggtttgatgagaggaggtgaggggaaagaggcctctgaagttgtgtctccagtgtgtgaaatggaaggtaaagtgtggaaaagaaatgttacaacatgtaaatatatttagtttttaccatttaaagaaagggaaacaactatgccttactaatactgatgctgtgaatggtcagtagtacaagtatttaattttaaaattgttattcttttactggaggttggtacacagaattttttcactggtaggggtctgatccaaactggttggaggccaaggaatgctttaaggcagtggtttccaaactgtttaatcttggaaccctttacattcttctatttagaacacctggaaacttttgattatgaggattatacttagatttagtctattaaaatgtgctgtattaagagataagacacttaaaaatatttgtttagctattcatttcaagataacgaatccagtagatgttaacgtaaatatcatatctattatgaaaaataactctgttttccaaagcaaaacaaaatttggtgagaagagtgccattgtcttacatgtttgcaaatctctttaatgtctggtttcatagaaggcagctatattctcctatctacttccgtactcaatatgttacaatatgcttcttgattgaagtatatgaagaaaatctggtctcatacaaagatgtaattagaaaagggaagagtgtttaagagtcttttcaggtaattatagatattcctctaccgaaatttgttaagtgatagtttcctaaggattaattgcaatgaggaacctgataccatatcagtatacttttcatactctgttatagtaaatccatgtgtttattttgtgctttgagtagatctttattcaaacttaattttgtagcttcatgcattggctatcaaaaaatatcaaaaaatatcaatttgctgagttatgcaagaacttaaaaatattaacacatttcattgtaaaacatcactttggttaatattaccaaaaagctcattagaaatctttatgaattgggaagctgtcaaatgcatggtgacagatacaagttttccaaaattctgtgtgttttttttttttttttttgctggaaaatatgaattttatcattggtaacaattactgtcagttgtttcccagcgttggttcatttacaagaaaatatcagccagacacccaaggttaaataactgtagtttgtctgtcagacactgtttcaaataaaacgatgttatattttaaaagtggttatttcagctagctataaaacaatcacttaagtgcttatacttgcagcaattattgtaattcaggtgaagcattgaaaacaaatgtgtttgtttttactgtgagggtgtggttgtgaagcctatgaagtgtctagttccttaggaataccttagtttgtggtaggctttttgcagttttactcagcatctcttttgcaccatcagcataaatgtgaacatagtgaaaaaagcagagaacatcttagtattattataaaaataggtttgacttgactaacttcatgaaagatcttagggaccataggtacacagacttctctttaacaactgctgatttaaggttgtcctgatgcagatgaagagaggaatcatgccaccttttgctttcttttcttttttttttttttttgagacagagtctcgctctgttgcctaggctggagtgcaatggcgcgatctcagcttgctgcaacctccacctccagggttcaagtgattctcttgcctcagcctcctgagtagctgagaccacaggtgcacaccattgtgtgcctggctaattttttgtattcttagtagagatgaggtttcgccatgttggccaggctcatctcaaactcctgacctcaagtgatcctcccacctcggcctcccaaactgctgggattacaggcatgagccaccgtgcctggcctcaccttttgctttctgacaaatttaaagtaaatgtgtttcagatttctgctacattaaaaaaaagtgaggtaatcttatctgaaccctaaggcctttaaatcattttaaaaaattcattttagtataagatttaaagtttaaaagttgctgtttcaacttttttggcattgacatttagtaacctgaaatgtctttttttcatgtcttgaatgcttaacctttgacacagctctgacaacgaaatcacggaaagcatgtaactttgcattatttacaataaaaccgcctccaaaggctttcagaaatagtcttagttaagggtgacactttttggcttcacaaaattgattggttagaaacagttcttatttcatgttttgaagtgtcctctgtgtagtaatgacaactatataaattaatccaactcatgtcttagattttgagagtatttttttccccataaatgacataaaagggcactctatttttaaagggttaaagtctagttgttttaatctctctcatttcattaataagactctgtgtgcaattatggataatcatctgagtcatgggttaagtgctgatttcctaaaatgtttatgcagtgtatttgttaaactcatgtattcttttaaatcatagtccaggtagctattttaagtaaggaaaatggccttaataattcacataataggccatagttaaaattcagttattagactatggcttatttgttgttttagagtgatcctcaagaacagataatgttgtggaagaaaagcataaagtaaatgactgagggccaacggagaattatatgaaaaacaaactggggttgtcagattcttaaaagggaagaaaatattaagctaacaaacgagagccttggagatgatctggagataaatattacccttaggattcaggaagagaaatttagttgtaacttttttttgttgttaattataaaataatttcaaatttacagaaaagtggagaatagtatagcaaacaaccatatgctcaccaatagttgtcagtattttgttgtatgtgcttcctttttttggtgaaagtattttaaagtaaagacattactacattttacttctaaataaggtaatatgcacctctaaaagatgaagacttacagatacaaatttcactgtgtgagatgatatgagaaccccacagggccttcatattgcagactggcttgtgcaggctaaactctgacaaaatagctttgagtgatcaagtgtattttaaaaagttgtttagaggacttagaagaggaagaacactgagctgggggcaaggacttggaagaggcatagatctctaaggggcaaacttgatcaaatttgctatttggtatgtgaatttagccattttccttctttctccataatctcttaatttacattggcgttattcattcatgctttagaaattggatacttttttacttgaccctgatcttaaggtgggtgtggggtgaaaaatgaggctgcccaatggtgtctattggggctacacacatggaaggaatctaggagtctgtacttgtaacagttttagccagtgagtaatggaatgtcttatcggacatacttgtttttccttttttctcttgcattgaagtaatgcagcgtcttaatttatgcaatgtcttctcatgcttaggtcttggatgtggtttattatacactgcaacagtgaccattacgtgccagtattttgacgatcgccgaggcctagcgcttggcctgatttcaacaggtatattttcaaaatgagtacagtattgtcaccattcagtcttctaaacaaagtaaaaagttaccaagcacagacatgtttaaccaaccattacccagctaccaatcaggtagcaaaataatttctttacttctggaaggaaagtttattttacaccataaatatggcagtagctttctttttttttttttttttacattttacattataaatttttatgtcttgtatgggatgttttctaaaatatatagctcttctaaaattgtaaactgatatttagtataacattaatacatttttacatggacacctatcattgtcaaagcacttttagaaacttaaatttaaatgatcataaaacttgaaaagttgtctttatgatatttctaaaaaagctattttttcctgccattgtgtttgcttcctgaaagtccaaagtaaaccatctcgttatttattatttattattattatattttaagttctgggttacatgtgcagaacatgcagttttgttacataggtatacatgtgccacggtggtttgctgcacccatcaacccatgatctacattaggtatttctcctaatgctatccctcccgtagccccccaccccccaacaggccctggtgtgtgatgttcccctccctgtgcctatatgttctcattgttcaactcccacttatcagtgagaacatgtggtgtttggttttccgttcctgtgttagtttgctgagaatgatggtttccagcttcactcatatcccggcaaaggacacaaactcattcttttttatggctgcatagtattccgtggagtgtacgtgccacattttctttctttctttcttttttctttttttgagacagagttgcgctcttgttgcccaggctggagtgtaacagcacaatcttggctcaccacaacctctgcctcccgggttcaagtgattctcctgtctcagcctcccgagtagctggaattataggcatgtgccaccaagcccagctaattttttgtatttttagtagagacggggtttcttcatgttggtcaggctaatctcaaactcccaacctcagatgatctgcccctctcggcctcccaaagtgctgggattacaggcgtgagccaccatgcctggcctatacatgccacattttctttatccagtctaacattgatggacgtttgggttggttccaagtctttgctattgtgaatagtgcttcaataaacatacatgtgcatgtgtctttatagtagaatgatttataatccttggggtatatacccagtaatgggattgctgggtcaaatggtatttctagttctagatccttgagaattgccacactgtcttccacaatgattgaagtgtaaaagcattcctatttctctacatcctctccagcatctgttgtttcctgactttttaatgattgccattctaactggcatgagattgtatctcattgtggttttgatttgcatttctctaatgaccagtgatgatgagttttttttcatatgtttgttggctgcataaatgtcttctttttttcttttcttttttttttttttttttttgagatggagttttgctcttttgcctaggctagagtgcagtggcgcaatctcagctcactgcaacctccaccttccagtttcaagtgatctcctgcctcagcttcctgagtagctgggattacaggtgcctgccaccacgcccagctaatttttgtatttttagtagagacagtgtttccctacattggccatggaggtcttgaactcctgaccttgtgatctgcctgcctcagcctcctaaaatgttgggattaaaggtgtgagccactgtgcctggccagatgtcttcttttgaaaagtgtctgttcatatccttcaccactttttgatgggtttttttttttcttgtaaatttgtttatgttccttgtagattctggatactagccctttatcagatggatagattgcaaatattttctcccattctgtaggttgcctgttcactctgatgatagtttcttttgctttgcagaagctctttagtttaattagatcccatttgtctattttggcttttgttgccattgctttcggtgttttagtcatgaagtctttgcccgtgcctatgtcctgcatggtattgccttggttttcttctagggtttttatggttttaggtcttatatttaaatctttaatccatcttgcgttaatttttatataaggtgtaaggaaggggtccagtttcagttttctgcatatggctagcctgttttcccaacaccatttattaaatagggaatcctttccccattgcttgtttttgtcaggtttgtcaaagatcagatggttgtatatgtgtggtgttatttctgaggcctctgttctgttctattggtctatatctctgttttggtaccagtactactgtagccttgtagtatagtttgaagtcaggtagtgtgaagccttcagctttgttccttttgcttagaattgtcttggctatatgggctcttttttgcttccatatgaaatttaaagtagtttttttccaattctgtgaagaaagtcaatggtagcttgatgggaatagcattgaatctataaattacctttggcagtatggccattttcacgatattgattcttcctatgcatcagcatggaaggttttttcatttgtttgtgtactctcttatttccttgagcagtggtttgtagttctccttgaagaggtccttcacatgccttgtaagttgtatttctaggtattttattctctatgtagcatgtgaatgggagttcactcatgatttgactatctgtctattattggtgtataggaatgcttgtgatttttgccattgattttgtgtcctgagactttgctgaagtttcttatcagcttcaggagatttcgggctgagatgatggggttttctaaatatacaatcatgtcatctgcaaacagagataatttgatttcctctcttcctatttgaatacactttatttctgtctcttgcctgattgccctggcaagaacttccaatactatgatgaataggagtggtgagagagggcatccttgtcttgtgttggttttcaaagggaatgcttccagcttttgcccattcaatataatattggctgtcggtttgtcagaaatagatcttattattttgagatatgttccatcaatacctaggttattgagagtttttagcatgaaggggtgttgaattttatcgaaggccttttctgcatctactgagataatcatttggtttttgtcattggttttgtttatgtgatggattacatttattgatttgcatatgttgaaccagccttgcatcccagggatgaagccaacttgatcgtggtggataagctttttaacgtgctgctggatttggtttgccagtattttattgaggaaattcgtatcaatgtttatcagggatattagcctgaaattttctctttttgttttgtttctgccaggttttggtatcaggatgatgctggcctcatacaatgagttagggaggagtccctgtttttctattgtttggaatagttttagaaggaatgctgccagctcctctttgtacctctgttagaatttggctgtgaatccgcctggtcatgggcatttttttgggttggtaggctattaatcactgcctcaatttcagagcttgttattgatctattcagaaattcgacttcttcctggtttagtcttgggagggtgtgtgtgtccaggaatttatccatttattctagattttccagtttacttgtgtagaggtgtttatagtattctctgatgggatttgtatttctgtgtgatcagtggtgatctcccctttatcattttttattgtgtctatttgattcttctctcttttcttacttattagtctggctagcggtctatgtattttgttaattttttcaaaaaaccagctcctggattcattcatttttttgaaggatttttcatgtctctatctccttcagttctgctctgatcttagttatttcttgtctcatgctagcgtttgaatttgtttgctcttgcttctccagttctttaaattgagatgttaggatgttgattttagatatttcccactttctcctgtgggcatttagtgctataaattttcctgtaaacactgctttagctgtgtcccagagattctggtacattgtgtctttgttctctttggtttcaaagaacttatttatttctgccttaattttgttatttactcagtagtcattcagaagcaggttgttcagtttctatgtagttgtgtggttttcagtgactttcttaattctgagctctaatttgattgcactgtggtctgagagactgtttgttatgatttccgttcttttccatttgctgaggagtgttttacttccaattatgtggtctatttcagaataagtgctgtgtgatgctgagaagaatgtatattctgttgatttggggtgtagagttctgttgatgtctattaggtgtgcttggtccagagctgagttcaagtcctgaatatccttgttaattttctgtctcattgatctgtccagtattgacagagggatgttaaaacctcccactattattgtgtgggagtctaagtctccttataggtctctaagaacttgctttatgaatatgggtgctcctgtattgggtgcatatatatttaggattgttagcattgatccctttaccattatataatgcccttctttgtcttttttgatctttgtttctttaaagataggagaaaaggaacgaaaattaacatccctaaggccactgtcagaaagactgatgctgatcatgtctccacctccttgtagtgtggaacttacaatttttctaaagtactggtttctcaatacctctcactgacctacgtgcatatccaaatgacaagctgtttactcttgttattcctttagtaatcaagagatgatcactgagggggaaaatataaaatataatttttaaatataaaagcattctggacatataaaagtggtttttcagttttcagatgaattttttaaagttatgtacagttcttatcaaaatttatgtggccaacatttcctgagttttttaggacatacagttgccaagttatcaaaagttgtaaatttacatatgcttcttgctggtaggtgggtaaccctggaaggtcaggcttttagatagcctgaagaacgtcagtagttattctggcaacaggatccaaactaatattttattcctgaggccaacccagtggcaacaaagtgattcatggttgaattgaatccagctgtatatttccccaacatattttaaaaagcactgcccggtgagaagtgtgaattgtggtctaggtggagacaaggccagagtcagaggacatggctaaggcagtgatgggagaagggatgcaaaaacagaagatggggaatccagagtagttggaatgcagtttgcagaacctgtgaggatcttccacaagtgtgggaaggactgtaagagtaggcatggcagcttcaaggacagtgggtctcacctgtactatatttgctgtagaggcagtatgacatcgagttagaagcacaagcctggatccacactgtctagttttgaatcctcttctgtcactcactagctatctggtgttagacaagttacttaactgtcctgtgcctccgttttggaactgtaaactggggataatagtacgttgatgaaaagagtcaaattctttaaaatatttgaatttttatgagtaacaaatggcctgtgacagagtcccatgagagtctgtctcaggtggtcaggctaaacttgattttatacattttagggagacataagacatcaatcaatatatgtaagttgtacattggcttggtctggaaaggcaggacaactggaaacaggggcttccaggttgtaggtggattcaagaattttttaagtggcagtaaattgaaagggttaagttattgtctgaagatctagaatcaatacaagggaatgtctgggttaagacaaggggttgtggagaccaaggttcccattatgcagatagaatcaatagaagggaatatttcttatcagacttaaagagtctgttctatcagtcttaaggtgcctgttttaatgttaatactggtcagctgtgtttgaattccaaagaggggagagtataatgaggcatatccagcccccatccccctgaccttatcacggcctgaactagtttttcaggtttacttcagaatacccttggccaaggggagggtccatcagctggctgggtggcttagaattttatttttgatttacaaatagtacccatcacattgggttattggacatatgaaagggatgtatgtgtaaggcacatgacaggggctctcaagtgttagcagttataattctgacctaggtttccctaatgtccaaatgtatttgtgttgaaggtgttgggagttgcatgctgtgacagatgatcttgcttttcactcagtcttgagaggagggcataggggcctggtccatagcacactaaataaaaaatgaagcaactatgggcagtcaagatttaaaggagttttcagtttcaactcacagggagctaggtgaagggaaattagggagaagtatgaacccaccttcagtcaaagatatgataagctaaacaaaagtcacagcagagttttttaaaaattaaaaagaaaccccgcatcaaaacacttgaaatattgtgacctagttgaaagaaaggaatgtgggcatgaaatgaaggtttgggggaagcgatcttcctctgtagtgaacaggggttggtccacaaatgcctatgggccaaatctggcctactgctggtttgtgtatgattaacaagctacaattggtttttacatttttaaatgaatgaaaaaaatcaaaagaagaatattcataatacgtgaaaattatgtgcaatttacatttcagcgtgcataaataaaattttattataacacagccatgctcatttttttatggattatctctagctggtttcatgcttcaagggcagagttgagtatttgggacagagattgtacaccctctatgccttaaatatttactctctgatcctttcgggaagttattgacccctagtattaatgagttaaagcatggctgtatttctcactgcttcgtgttccctgaacgccatttaatattttctctctttgtaataatgtataacatgcatggaagcataattagtgctttatttcacttaaccctttacaatgattattttaaaattaggatgctctttttgaagattaaaaattacagttttagctattgcacgcagggcttaattcctaggtaatgggttgataggtgcagcaaaccaccatggctatatttacctatgtaacaaaactgcacgtcctgcacatgtatcctggaacttaaaatttttaacaatcacagttttgcagtttacaaaattccaccaggaaactctaaattacttttcaataccctgggggaaaaaaatcctgtatctttctaaaccacagacatgttcttgtgggatgaaggctgaggaaactagcctccaatgtgtaatttgatattccccattctctgctatcttatgtgttcaataaatatctgttgaattgattttcatcatgttgacagataaacttggttggcaagaataggaaagttgtttatttatttgttctgtgtgaaaatatagaactttcaaaacaccaagagcatttttaagtatctaatgatgtgacactttgttagaatctgtacaaagaaataggcaaaaatcacaaatttatagttaatgggtactaatgcagtacatgaggtcaccctgctgtttttaattctgtcagtgtgttttctgtagcgtttttaacttttacagtatatgccacgtttaatgagagaaggaaagggttacatttgtctactgttattacttctcagtagttagcaaagagatactctcttagcagtcccaaaagatactattttagttgccattacattaacatgaaacattaatatttgcatgcaaagttttttttccttttgggaatgaaggggttaactttaaaaaatgttaagaagggacaactgaggtcccaaagaaaatattttcttacaactctaaggcagagccatttggctatttggaagaattgttttattagatgggtttttatagcaatcatatccatgcaatcagtgatgcctctgagcttggtcctattggcatcctgatgagattataatgtaatttaatactgaccattttaaacatatgatcaaccttttcagactatttttttcctgatttttcacatgacatttcccaatgacatttacatttaaaaatgctcagtttattaaagattgaaatcagaaccagatgagaacagtaccaattgattaggctaccataacttggcaaccctctgtgtttagtgtgatcagtgctaaaaaggtgaattattcacagtgttacatagatgtataaaccagcatactttgtaatttaaataccctaaaaaaattctacttttctcataattgtattaatgcatgaaaaggatgactcactcattccggtgattcagcaatggatttgaactatcaagccattataaatatccttaaactgcaatatactatttttaaaaagtaaaatatgaaaatttacttttctggaataaatatgtagcatggagcctggcacataataagtgcaaagaaaatagtttcatgatgatacttggtttttgggtttttttgtttgtttgtttgcttgtttgagacggagtctcactctgtcaccaggctggagtgcagtggtgcaatcttggctcactgcaacctctacctcctgggttcaagcgactcttctgcctcagcctcccaagtagctgggactacaggcgtgtgtcaccatgcccagctaatttttgtatttttagtagagacggggtttcaccatgttggccaggatggtctcgaactcctgacctcgtgatccacccacctcagcctcccaaagtgctgggattacaggcctgagccaccacacccagccgatgatacttgttaagaatatgggctattgggttcaaactgactgagtgtgaatcctatttatgttctttacagatttttgatctatggcaaatttctcaaccattccagccctaggtcacttcatctctagattgggaataataataggacctactcaatgggatcagtaaaagcattaaacatgatcgtgcaatgtaaagtgcttaacagtgtctgagctgcaaattctaattcttaaatgttctatcagtattactatattattgttattattgttatcttctatcttcttaatatgattttaatatgaagttacatataaatgccagtataaaaaataaattgaattgtgatattacaaattctaatcctgagagcctcagattacgaggttgaacagttcccattccctttttaggttcaagcgttggccttttcatatatgctgctctgcagaggatgctggttgagttctatggactggatggatgcttgctgattgtgggtgctttagctttaaatatattagcctgtggcagtctgatgagacccctccaatcttctgattgtcctttgcctaaaaaaatagctccagaagatctaccagataaatactccatttacaatgaaaaaggaaagaatctggaagaaaacataaacattcttgacaagagctacagtagtgaggaaaaatgcaggatcacgttagccaatggtgactggaaacaagacagcctacttcataaaaaccccacagtgacacacacaaaagagcctgaaacgtacaaaaagaaagttgcagaacagacatatttttgcaaacagcttgccaagaggaagtggcagttatataaaaactactgtggtgaaactgtggctctttttaaaaacaaagtattttcagcccttttcattgctatcttactctttgacatcggagggtttccaccttcattacttatggaagatgtagcaagaagttcaaacgtgaaagaagaagagtttattatgccacttatttccattataggcattatgacagcagttggtaaactgcttttagggatactggctgacttcaagtggattaataccttgtatctttatgttgctaccttaatcatcatgggcctagccttgtgtgcaattccatttgccaaaagctatgtcacattggcgttgctttctgggatcctagggtttcttactggtaattggtccatctttccatatgtgaccacgaagactgtgggaattgaaaaattagcccatgcctatgggatattaatgttctttgctggacttggaaatagcctaggaccacccatcgttggtaagatatttatcttaaaatcatcccattttactgttcttccttgtcatatctccagatatagaggtccagattgtaatagtagcacagatttgtacaaaagaaatctgcatggaacatctcatggtaatgatttattcaagactgctttgatataattgagaaagcgaatatgcatgctctgggatttgtgttcgctctttatttgggagaaactcaaaatgcctgcttttttttttttttttttttgagacggagttttgcactgtcgcccaggctggagtgcaattgcgtgatctcggctcaccgcaagctccgccttctgggttcatgccattctcctgcctcagcctcctgagtagctgggactaaaggcacctgccaccacgcccggctaatgttttttgttgttgttgtttagtagagacggggtttcaccgtgttagccaggatggtctccatctcctgacctcgtgatccgcccgcctcggcctcccaaagtgctgggtttacaggcgtgagccaccgcacccagcctgcctgcttattcttatccaaatatttgagagattctcttcttctaactcccagtaaaccacgctggaagtagtggagtaatatatatactaattataactatatataaaactgatataattagggtatgggatggatgttcatactatttccatgaaacttactttttttcttactgccttttcaggttggttttatgactggacccagacctatgatattgcattttattttagtggcttctgcgtcctgctgggaggttttattctgctgctggcagccttgccctcttgggatacatgcaacaagcaactccccaagccagctccaacaactttcttgtacaaagttgcctctaatgtttagaagaatattggaagacactatttttgctattttataccatatagcaacgatattttaacagattctcaagcaaattttctagagtcaagactattttctcatagcaaaatttcacaatgactgactctgaatgaattatttttttttatatatcctattttttatgtagtgtatgcgtagcctctatctcgtatttttttctatttctcctccccacaccatcaatgggactattctgttttgctgttattcactagttcttaacattgtaaaaagtttgaccagcctcagaaggctttctctgtgtaaagaagtataatttctctgccgactccatttaatccactgcaaggcacctagagagactgctcctattttaaaagtgatgcaagcatcatgataagatatgtgtgaagcccactaggaaataaatcattctcttctctatgtttgacttgctagtaaacagaagacttcaagccagccaggaaattaaagtggcgactaaaacagccttaagaattgcagtggagcaaattggtcattttttaaaaaaatatattttaacctacagtcaccagttttcattattctatttacctcactgaagtactcgcatgttgtttggtacccactgagcaactgtttcagttcctaaggtatttgctgagatgtgggtgaactccaaatggagaagtagtcactgtagactttcttcatggttgaccactccaaccttgctcacttttgcttcttggccatccactcagctgatgtttcctgggaagtgctaattttacctgtttccaaattggaaacacatttctcaatcattccgttctggcaaatgggaaacatccatttgctttgggcacagtggggatgggctgcaagttcttgcatatcctcccagtgaagcatttatttgctactatcagattttaccactatcaaatataattcaagggcagaattaaacgtgagtgtgtgtgtgtgtgtgtgtgtgtgctatgcatgctctaagtctgcatgggatatgggaatggaaaagggcaataagaaattaatacccttatgcagttgcatttaaccttaagaaaaatgtccttgggataaactccaatgtttaatacattgattttttttctaaagaaatgggttttaaactttggtatgcatcagaattccctatagatctttttgaaaatataggtacctgggtatcacacatagaacttttaattctgctggtgtaggctgttgcccaaacatctataattttactgagctcttcaagtgattctgataacacagcctggattgagaatttttataagattggcaatggaaaaacatttattcttttaaataataatttttttaaaacccaagaggtcaggggattttataaaccaatagccaagtgttctttaaataggaggcacccttcccattgtgccaaaatcatcttttcatttattttgaaatttgtatgattattttatacttgtatgttgcctttcttcgaaggcgcctgaagcactttataaacacaaatcctcacaatacctctgtgaggtaggtaaatagtacttttctatgtagtaaacctggaatatggagaatttcataacagttcattctacttaataatgcaataatggagctccaagttgtcttggacttctacaccacactcagacttctggaaagttttctgtacctcattctttagtccctgtcaaggttagtaaataaaataagtgacataaaaaaaaaaaaaactaaactacttgttgtgttgaaagttcctttttgccagttatgttcaggaaacccaataacctgaaaaagtttgactttgatgtgacatcttcatattcatcaatgctgataattgtccaaaggcatcttcactatgtctgctaaataacatccaatgtgggcgttatctgttgtctaggggatgaattttaagttacaataaaatatttttctttgttttgc

SEQ ID NO: 612 - DNA, 13680 bp, Homo sapiens
gcagtggaagtgatttctcagcctaagggagtccagctggaaggaaggtaaaatggagggtgagagagttgcccgaggcctttttctttgtgttgcttttctcactgatgtttatattttgggtggcaagctgcttccgaggagttgtttttgtttttcaatttgattaaaatgttcatttgtttatatcataaagttggtagtaaattttatatttacatagcaaattaatatttataatatacaatgtccctgaacaggcataacaaatgttcttggagttgttttttaaatttaaaaactttttttgagatggggtctcactatgttgttcaggctgatctcaaactccagggtttgagtgatcgtcccacttcagcctcccaaagtgctgggattacaggcatgagttaccatgactggctggaattattttgtttttaaaataagatacatttaataaataatccatatccccaaaagatacattctgaagaggtgtgaaagttagaggggaaaggctttcatcctttttttttttttttttttgagactgggtctccgtatgttgcccaggctgctcttaaactccggggcttcctgagaagctgggactacaggtgcgggccactgcctcaggcttcagcttgttttttatatatcccgactcatcattcttttccaatcataaaattatgattcttattgtagttgtaaattttaattcacttttaatggcaacatattaacagattcctattgagcaaattttcaagattataaattgtatgtggaaggaagcagcatttcaagctgacaaatggatccacaggtaattcgatgtctcctaaattaagcttgtgacgattaaaccaataaactagcgatgagaaaactattgacaaagtacaaccagagaactcatctcagtgctggaatctgtaccttaagaaaaaggatgattacgggccgggcgcggtggctcacgcctgtaatcccagcactttgggaggccaaggcgggaggatcacgaggtcaggagatcaagaccttcctggctaacacggtgaaaccctgtctccactaaaaatacaaaaaattaggtgggcgtggtggcgggcgcctgtagtcccagctactcgggaggctgaggcaggagaatggcgtgaacccgggaggcggagattgcaccactgcactccagcctgggcgacagagcgagactccgtctcaaataaaaaacaaaacaaaacaaaacaaaacaaagaaaaaggatgattacttgaagtggtacaaatgacaaccaggtaccaagaaaacagtgagtttgggcaagtgtaattttttagaactcacagtatatctagaatgggatgaaagggaagaagatataggatagtctcattcatatagaaagttatcctaaaatcatgtaacaaagaggttataaaaaccataaaatcatcacgaaaaatgacagccactagccctgaatgctgatgtagaaaggacattgatgagaataaaccttctgtgccttcaggctttggcagatagctgggtctcccaaaatgtaagcaaggactgaaacgtaaattgaaattactgcaaagaaataaaaataattttgacgcttaagggaagcttgctttttgagaaattcaggcaatcatctatacaaactatcaggaaaactggataatgcaaaaaggctttaagtaaaggacatcatttgagtaaataggcagatgtggtatttagtaaacctagtgcctgaaagtacagaatttctgaaataggagatgatggaaatgtttaccaaaagtacgagattgatggatgctggtgaaatgtaaaaatattccatacaatttcacaggtgtattttcttctcattcttagggtgaggctatttaataatattttcccaagtgcaatcagacagttaacatctagggactgcttgtttgctgtgactggtgctgagaagagcagttctctaaataaagggtcatcattttttaaatttcagaaagtctggtgaaacacataccaaaaaatctgcttcactttatttcccatcatctgctttctcccataggtcttttttggctgattatctccctattttatttctgttttactgcctttaattatctcattttgagtccctggcattttgttttgttatatcaaaatgtcacgtgaataggctctgagtcatttgcgcaagctggggagaaagcggagagggatctgctcccagctggacatccctctgaagtctcctgccccccgctgacccccaccatctccctggccacccagaatcatcacggtccgggtcctgggttggctgatgctcagctcccctgcactggaaaactcttcctaaaactttattgagagagaaaaaagatgacttggaaaaaatagaaagtcatactatgatctgctgggcgcggtggccacgcctgtaatcccagcacttcgggagggcgaggtgggcagatcacttgaggccaggagtttaagaccagcctggccaacatggtgaaaaccagtctctactaaaaatacaaaaattagccaggtgtggtggcgggcgcctgtaatcccagctgctctggaggctgaggcaggagaatcagttgaacctgggaggcagaagttgcagtgagccaagatcacaccactcacaccactgcactccagcctgggcaacacagccagacctgtctcaaaaaaaaaaaaaaaaagttatactatgatcatggctgaaagagtggctataaagaagtgaattttttccatattagtttttagttataacaaaattaaaagtgaaaattagaatctgatatactattggtcaaaataatttatatttagcatttagtagatatttaatatttagtatataaatattataccttatatatacttttagcatataaagtattatagtaaataaaatattacccaatgtacaatttaaaagtaaaggaatatcaaaggaaaatatcaagaaaactgcaggattagataatgtggtgttaatagaacacaagatatttgggtcaattagacagaatggataggtcagaatttgatcctattacatataattgaatatacaataaaagaaccatttcagatcaatggagaggaggggaaagtatacaatcaatacctttacactaagggaatagcattttgaaaagaatacatcccacctcatacctccctaaaatcaattccagaggattgaagtgtcacattaaaaaaagtctaactgtaaaaattagcaaaaaaaatattttctagggaaaaagaggcaatcacaactttctaaactgagaaaatatgtcataaatatacatatttgattatagaaaatgaaaactttctatgcataagaaccttatggaaatttaaaggtcaatcaagaagtgacaaaatatttgtagcaaatatatcaaaacattaatgtatttattagtaaagaagtcttacaaattgaaaaacatagtagagtccagtagatattggacaagggacataaaaagacaatttcaaaataaatgtaaatgtaaacaaatacctgggaaaatattaaacttaatttgtagtcattgaaatggaaataaaagtaggtgttagtttcactcattacatttgcaaaataaagagtgtgacaatattcaatgctggtgagagtgcagggaactctcatacaatgttggcaatgttgtaaatgggtacaatcctttggggaagtatttgatattgttcattgggagccataaaattgtaacttaagaatcttttttgttcgggcgtggtggctcacacctgtaatcccagcactttgggaggctgaggcgggcggatcacctgaggtcgggagttctagaccagcctgaccaacatggagaaaccccgtttctactaaaaatacaaaattagccaggtatggtggcacacgcctgtaatcccagctactcatgaggccaaggcaggagaatagcttgaatactggaggcggaggctacggtgagccaagatcatgccattgcactccagcctgggcaacaagagggaatctccctctcaaaaataataataataataattttttggataatttttaaattgaggtataatttacatctagcaaaatgcttaagtcttaagtgtccagtttgaagagttttgatagatgcacactcatgcaattcacaagctaattaagatatagaacactttcactatctaaaaaaaatacccctgtgccagcccaataaccctcacatcctcctcccacctcctaccatttttctgatttcttttgccatagatgaattttgctgctcaagaacttcatacaaatggaatcatacagaatgtagtctttcgtgtctggcttctttttccttttttttttttttttttaaagatttattcattttattgcttgtattagtagttcattcctttttattgccaagtagttatgtataatattgtatggctctaccttaatttcttcatccattgacctgttgatggacatttgggttatgtctaatttttggctgttatgaaaaagcttctgcaaacaatcttttatttatttatttatttattcattcattcttccttttttcattttctttgaacaaccttttaaaacaatttttttctattgtggtaaaatacatataacataaaacgtttaccacaaaaaatgataacggaggtgatagatatgttaattaccttgatttaatcattccaagtggtatacatatatcaaaacatcacattgtactccataaatatataaaattatgatttgtcaattaaaaataatattaataaaaataaatgacaaaattagccattttaaccattttaaatgtacaatccagtggcattaattatactcacaagattgtggaatcatctatttggaactatcgatttccaaaaccattctcatcatcccaaatggaaagtctaaccagtgggcactaaatccttcatttcccactccttccagccctgggtaacctctaatctactttctgtccctatgaatttgtttattctataaattttatgtaagtggaatcatacaatgtttatccttttgtgtttggcttacttcgcttggcataattatttcaaggttcattcatgttgtagtatgtatcagaactgtgttccctttttaggctgaatcatattccattgtatatgtagagcacattttgtttatgcactttttaaaattttaattttaatttttcttagagacaggctctcactctgtcatccaggctggagtgcagtggcatgaccttggctcactgcagcctcgacttcctgggctcaagcaatcctctcacctcagcctcctgagtagctgggagtacaggcacatgccaccatgctcagctaattcttaactttttctgtagagctggggtctactatgttgctcagggtggcctcaaactcctggcctcaagccatcttcccaccttggcctcccaaagtgctgggattacaggtgtgagccactatgcccggcttgtttatccatttatttgtcaatggacacctgggctctttccatcttttggctactgtgaataatgcttctatgaacattgatgtacaagtatctgtttcaatctacttttatttcttttgggtgtctacctaggagtggaattgctgggttacatgtctgtgaacattcttgtataaatctgtgtatgtagaggtgttttcatttagtttgggtaaatacatagaagtgaaattgttgagtcacagggcaggtgtacgctcaactttctgaaaaaccgtcaatccaattttcagttattagtgttttatattcccaccaacaatgcttaagagtaccagttgctccacagacacatcagcatttgggttttctgtctttttaattttagtcatgttgatgcatcatctcagtatagttttaatatagaatttcttggccagacgcagtggctcatgcgtgtaatcccaacactttgggaggctgaggtgggtgaatcacttgagatcagcagttcaagaccagcctggaccaagatggtgaaaccccatctctaccaaaaatacaaaaattagccaggtttggtggtgtgtgcctgtaatcccagctactcaggaggctgaggcaggagaattgcttgaagccgggagacagaggtggcagtgagccgagatcacgccactgcactccagcctgggcgacagagtgaggatccatctcaaaaaaaaaaaaaaggaatttctttgtgatttacgatgttgagcaggttttcaaatgttttggtcattcttatcttcctttgcgaattacctgttcaaatattttgcccatttaaaaaattggattgctttattattattattgcagtagcagttgatataataaggagtccgtaaacagacccacagtcaattgatattcaaccaacgtgccaaagcaattcaatgggaaaagaaaaatcttttcaagaaattgatatgaagaaacaaaacctcaacccagctcacactatacattaatttgagatgagtcatagacctaaatgtcaaagttaaaattataaaagttctagaaaaaaacatagaggtgatttttatgatagcgtaagtgaagatttcctgaagaagatacagcaggcaatatttcttttcttttcttttttttgagacggagtctcgctctgtcgccaggctggagtgcagtggcgcgatctcggctcactgcaagctccgcagaaggcaatatttcacagaggaattctttgtgggcctgggcctgacttgcaatgggccagttcctggggtaccatgggtgggaattgggtaaaacttaccccaggttcttatcacacgggaccccagaggcctgggtggaggcttgtgactaactacatgagctttgccacgtactcctcaatacctctgacaaggacttactgcagtgtttggtctcaccaagtttcccacaataaagagacatgagtcacctttcaagaccctttacccccaagaatgtggtcttcacacatgagaccaaggtctacaagtggtcaggagagagggggtctgctcagatgggggagtagtgcctgagctggcctcaagagggttaagtggccctgcactgaaaacctggacactgagttagggtagggctgggggaaaacttgggctttggagtcgtagggtctgggttcaaatccacagaccattcccttcctagctgtgtgttggtgggtaattcactggatctttctgagtcctggtttcctcatctgaggtaaaacgagtttgccggttggtctgagagctgttctaggcatggtggggagaccctgacaggcagaggcagccctgctctcaagcagttgatttacagctggggaaacaagacagccacaaatgcaatacctcaaactcaacttctcaccagaaagctccttttcctaattttcacagccagtccctcagcctcctgggccccaaatactagtaaaacctttgcctcctctctcttctttctttcttgtaatcatataggtacaaagtcctaccaattcttcctgaaatatgtttccttatcaaaaagtcctgcaaagccgtgcgtggttgctcatgcctataatcccagcactttggaggctgggaggatcgcttgagtccaggagttcgagaccagcctggacaacatatggagacccatctctaccaaaaattttaaaatcagcaggggtggtagtggcaagcacctgtggtctcatctacttgggaggctgaggtggggggattgttggagcctgggcggttgaggctgcagtgatctgtgattgcaccactgcactctagcctgaggtacagagcaagaacttgtatcagaaaaaaaaaaaaaaagtcctgcggtagctgacactgccattgcctatacgattcccattccctcatcctccctagcaggatatcaattttgttcgaagtgtcaatgaaggccaggtgcggtggctgatgcctgtaatcctaacactttgggaggccgaggcaggcggatcacctgaggtcaggagttcaagaccagcctggccaacatggtgaaaccctgtctctactaaaaacacacaaattagcagggcatggtggcgtgcacctgtaatcccagctactcaggaggctgagacaggagaatcacttgaacccggaggtggaggttgcaatcagccaagatcacaccactgcacttcagcttgggtgacaagagtgaaactctgtctcaaaaaagaaaaacaaaacaaaaacaaacaacaacaacaaaaagcaaagtgtcagtgaaggtccagcaaaagactcccttcctattgccctttgcagccagggtcatcatgtgacacagttcagatcaatgagatggaggctgagggtccctgggaaagatgtttttcctatacaggtaccacctctttcagcttcactctttccattttccacgtgaacaggccttgtagcctggaggagctacagctgcctttttgagatgctgaggcaccctgtctgaagaaggccctcacatcactcaacttgactactgggtgagcccttggagaggcttcccagcctctgctcttcaagccgaagtaccacaggggacacgagtcccagagttacaggaccccagctatggttcatgtgtaaagggaaccattaggcaaccaggggaaatgatgaagaagatctacatttacaaatgtggaaagatgttcgtggtatattgttaaattaaaaagctgtttaaaaatagtttttgggtcaagtgagatgactcacttatacttttagtataagtatgtcccatgcaatatctggaacgtacttgtactaaggggtttctccctccatcggcacatcccaggcatcctggcagctgctggcctccagcaaccccacattctagttgtgtgggagtggggtgtggcatggaccctgtgggctaccactgccctgagctgcttcttcacacactggtatttgtatctgtggtaaacccagtgacacgggggagatgacatacaaaaagggcaggacctgagaaagattaagctgcaggctccctgcccataaaacagggtgtgaaaggcatctcagcggctgccccaccatggctacctgggccctcctgctccttgcagccatgctcctgggcaacccaggtaaggccttcccctcgggatcgatcctgatggcccacccagcctcgcactctcaggctggctgaacctggagcttggactctgtgggcacccaggtgcccctgcctccccccggccttctcccccgtcatggaggcctggcctcccctcagagccaggcttagtccagtgtgctgcccagcctgtcactggcctggccaaggaggagagacaggccagggattctggtcctaactctactggccacactgtgtggcctgagacccccctttccctcccaagcccctgcctccgcatctgcgtggtgaaggccattggccctcatcggtggatctgcgtttcctcgggcctacactgtctaggattgtgcggggctggtgagagaacaagatctcttctgtgttcaaggcagacttcctgccccctgcaccctgctctctcccaggccttgaggtcagtgtgagccccaagggcaagaacacttctggaagggagagtggatttggctgggccatctggatggaaggtaaaaaaagaaaatcccttgaaaggagattgagggaagtttctagacaaaccgacccccaaatctgtgttgctgggggaacagaggagaagagagagtctcgccctcctggctttctagaaggaacgtgagaacacgtgtttgtgctgagagtgggtcagagcggctccagggcaaagcatgtggacaggtatcctggccccctgcaaggcccagctcctgtcctaggccctggtcacctcctggactcccaccagccaggagaacgggctttccctctccttccgcctgcggaggggaagctgaagtctggtcttcctcaggtctggtcttctctcgtctgagccctgagtactacgacctggcaagagcccacctgcgtgatgaggagaaatcctgcccgtgcctggcccaggagggcccccaggtacgtgttggctctctgctcacctgccacagtccctctcctttccctcctccctggtggctcctggggtgaggtctggagctctctaatggtcaggaggtgggagtggaggctgggctgtttctgacgatgctggttttgttgaattcatgtctggccaggagggctacaggtatctggcagactcctccaggaggatcctctggggtctcaccctccaaggagcctggggctgcagaacccaaataggcagactcccctgggagttcctcaataggagaggggcaagtgcagggctgggaaagtactgggggtgtgggaggctgtttctggggtgtctcagagcctctaagacaagcaaaagggtgggcaggggccaggcagccagttcaggccttcagtgtatccacgctctgggaagagatcacggacattcctgccggcctcagaaacacaaagggcccctttcctgggcactttcacgcgctcccagagtgtctgagagaccatcataagggctttctttcctgacagggtgacctgttgaccaaaacacaggagctgggccgtgactacaggacctgtctgacgatagtccaaaaactgaagaagatggtggataagcccacccaggtgaggccaaggggctacagagcctcctgtctgctgctcaatggaggggccagcctgtgaccaggtcggggatcggggagcccgggggcaccttgcacagtgatcctgggggagggcttcctagaagggaatctgtgagtccccgtgtgtctgtggatgaatttcagagaacttgtgaaattgtgactctctggaactgtgtaagtcagacggcagagtatacatggttttcatcatgtatcctcaaagagggcttgtcccagagaagttaggaatcttcccctaaagccctaacatttgtgtccaaggcagagtttgagaagctagttccccaagaggcctgggtcaggactgataaatcccagatctgctacttccaagctgcatggccttgggcaagtcacttccactttctgagcctctgttatcttatctttgaaatgtgatggataatagtccctatcttgcaagttgtcaaaccctttttttttttttttccttgagataggatcttactctgagacccaggctggagtgcactggtgtgatcttggctcactgcaacctctgcctccctggcccaagcaattctcctgtctaagcctcctgagtacctggggctccaggtgtgcgccaccatgcccagctaatttttgtacttttgtagaaacagggtctcactgtgttgcccaggctggtctccaacttctgagctgaagcaatccacctgccttggcctcccaaagtgtgggattacaggcatgagccactgcacctggctgctgaagctttttaaaagagctgagggctgggatgtacttagctccacgtccagcactgagtaaatgcttaacgaatgactgtgttactaccaagaattattgtttcactctccctccttccctctcctctgctgccccaaactactcagcatcctggcactgcaggctcgcacttagccctggatacccagattcatcctcctcccctgggatggcatagaagagactttaaaaccaaatgagccaagactccaagctctgaccacacctcccaccccaccagtcttctctatgcaccccctctatctggagcccccagccaggtcctggacccaggtagctacatggcagagcatttaatgtgtgcctggcagccatgggcaccattctccacacagaaggcaggggacaggtgcacaaggcgctgagaccccagcagggctaactgtccttgtctcaggagccctacctggccagtcttgggccaggccttggggactgggagtaggggctgagccccgtctgtacagtctctggccccatgggcaccaggtgccagctcctcgcacccagtactcccattgctagggctgctggaacctgcagggtggcagagctgggcaggactcaccctataaccatgtccactgtggtgctgctgctgcagagaagtgtttccaatgctgcgacccgggtgtgtaggacggggaggtcacgatggcgcgacgtctgcagaaatttcatgaggaggtatcagtctagagttacccagggcctcgtggccggagaaactgcccagcagatctgtgaggacctcaggttgtgtataccttctacaggtgagtgcagaggtgacagcagggatacctcctgagggttggagacagcttcccccaggatatatcaaagctgcctccttactcccccatctcccagcttgggaaagtgtggagaattgagcagatggactttagctagaaatgtttgagaaatactgattagagcttgggcttcagacacaggtggtcgtggagtaaaatctggtctccatctctccctggctgtgtgaccttaagcaaataacttgacctctctgagcttcagtttcttcatctgtgaaggggagatagcaatcctgatttttgagattggaatgagaattgaaggaggtcaccgtgtgtgtggacctgaccctggggaaatgtcctcagactgaggctattcaaggtcatcagaccctcagtcaaactccaatcccagcccagcacaggcccctggggtcgggagctggggccatatcctcccccacaatcctgggccctgagatctgggctagggaacccttcaggcaggggagcatgaggcctttccctccatggctgcccaggctgtgcctggagagaacagatctcggctgtaggaaatggggccagaaaggggcctcggtgattggctctggcagctcagctggcacttgccaatgctctgggattttatgctggcagatcgggggtccccaccatttcctgtcattggagcttgtggcttttctattcaaggccccacaacctgctcaggctgccgactggcttccaggatgtgcctctgggtgtgttcagtagggtcaggtggctctgggaccttaagcaagtaacattctgagtgcctgcttctccttgaggacccaccacatctgcccacagctggctgttctctcctctccaggtcccctctgagccctctcaccttgtcctgtggaagaagcacaggctcctgtcctcagatcccgggaacctcagcaacctctgccggctcctcgcttcctcgatccagaatccactctccagtctccctcccctgactccctctgctgtcctcccctctcacgagaataaagtgtcaagcaagattttagccgcagctgcttcttctttggtggatttgaggggtgggtgtcagtggcatgctggggtgagctgtgtagtccttcaataaatgtctgtcgtgtgtcccata

SEQ ID NO: 613 - DNA, 8589 bp, Homo sapiens
gtccgggtttggggatccagatgtccagccccgtgtccccctccaaacatccagtccctctcatattgcctttgaaattagcagcctctgggtgaccagaccttggccctcagaggaatcccggagaaaggtagaaccagcttcggcgttgggaacgcaggcgcgcttacgcatttagtgagggtttggcggtctccatagttaccgccgccgcgcgtgacgtcatagtggagcgctgagggcttggtggcgtggggtgggggctgtcctactgatcctgaatttggggtcactggtaagaggagttgcccattccagccaggtggaacggggaggggtgccacatgtctcagatctgccattgtctgcgaaaagaaactgctgcgaggaccatccccaatcccctgcttcccttgggaagagtaaccgccgttttgtaggacacttggggacaaccccgcttgtcctgaaatttattgacacggtaaatagtatttcctgtgtgccgaggatgcagttaaaccaacactgaccccctgcccttgagaaacacaaggtactatgggagcctttaccagcatgccccttgaagtctctgttctgctttgtggtctctaccggatttcccctgactgtctccctctccaccaacaaaactctcacccgtcttcccctcccgcaacatgcccaccaagacatgttcatccatcaggagccctgctctttaacctccaactttctcatcataattaattactcgttcctctctgttctcctagcgtttcttcacacatctgcttacccatttttgtaagtcctcctaacacaatattataaggcactagatgctcaatcaatatttattagtttaaagctaccagctttagggggactcggttttaaatagatgagaagtgataaaacacctggagatagtactgtcagctgagataacatgtcatagaaccagctgctcagcataattgaaatttcattcggattatatgggcctactttacacccatcttactatggtaaatgagatcatgctcattaagcattaggacactacttggttagcgcatctaggaaacataaccagaaatatcaaagaaatggcccagtaaaatataagggattgagactctctggttaatataccatggaactaaccccccttttttttctttatcattgataaattttgttcttacttatactcaaattgtttgttttccaaggttcagtctgaacctagtgatatttatttcatactcttggagaattaatactgttacatatcttcaactacccttttcatgaatcttgtctgccaagacaagctcggtcatggagaccctaacccagtggcgctagaggaattaaagacacacacagaaatatagagtgtggagtgggaaatgaggggtctcacagccttcagagctgagagccttgaacagagatttacccacttatttattgacagcaagccagtgataagatttactgaaagtattccttacgggaaataaagggatgggccgaaataaagggatgggctctggctagttatctgcagcatgaacatgtccttaaggcacagatcgctcatgctattgttttctgccctgggtgggccaggtgttccttgccctcattccagtaaactgacaaccttccagcgtgggcgtcaaggccatcatgagcatgtcacagtgctgcagagattttgttcatggccagttttggggccagtttatggccagatttgggggcctgttcccaacacttgtcaaaatctgtcttcccattccaaattcttttccattattgaaatatcattgtttctgttggaaatatttttccaagtagatgtcttattatcatcttaaatacagatcatccaaaacagaagtcatctgaaactttcctaatttttcctttcaatcataaatatgaagccttaagaacaattaataatgcatgatccttaacctcatggaacatcaatcagttgataaaaaaacagccaaacaactaaaaataatacaaggacttatatattcatatgtgtatgtgttaggaattgtaagaactcagactagagttgagcaatttcttaacagaggcagtagaattcttagtcactccagccatcacaccctgcaagttgatctcaccatcagtctgctgctcattcctacttcctctactctgttcctttcctttctgaatctttctcatcctttattgtccaatttaagccccatgttaaatacagtgagttctaaatttctcttcaaagaatcagtatgtcagtatgttcagttctttgttctccactttaaagtttaacctcatctccttgcccctagtttcagtaaacaaccttttccaccagttccaatcagtagttcacatctattcccctggtcacctgctctgtcctgagtcacccctggtcatctgctctgacctgcatcacctttaatcgcctgttctgtaaccgtccttcccactgaaactgctcaccccgccactgtggttcatacccctgctttctttaaaacagccagttggaattagcttagactatgcagtccaaccctagccaataggggaacgacatagcagtagggactacctgcgtcagagataagaaccccttcctctcccttgatcaggtatgctctcaccattgctccatctgcgagacacacctttctatagaagcaaaattgccttgatgagaaaattcatgttcgagtgctatttcttttgctgcaccgaaaatttatttctaatacccaccacctctaggaaataccttctaccattcacagtctcttcccacctcaggaccgttagaacattcagtatctccaccataaactcattttatacttcaacattcaacatttaacaaacatgtacaatgtatatgtcatgtgaaacgttttctcatttaaatcttttgtatccatgttttataatttcttcccaactagttcttcccactgaatttatttctttctctcccgcatccttgtcaaatcttttctattcttcaaactcaaagactttttgtttaatccattaagctgtatattagaatacagattttccaggcatatactatactgaccaagttaccatctctaggagcaggcccctagtctgcatctccagaggtagggcccaagaacctgtttctaccaaagatcccatatgatgattaggcagcaagcccagtgtcatattcagactttcttgtaaaccattgctgtacaacttctagcccaatgctttgcttgtgataagattcttaataaaatgtgtgttattgcatcagtcagtagtcaacttagtgaaatgtttagtaaaagaacctcaggccgggcacggtggctcacacctgtaatcccagcaatttgggaggctgagatgggcagtgggcagatcacaaggtcaggagtttgagaccagcttggccaacatggtgaaaccacatctctactaaaaatacaaaaaattagccaggtgtggcggtgtgcatctgaaatcctagctactcaggaggctgaggaaggagaatcacttgaacctgggaggcggaggttgcagtgagccgagatcgcgccattgcactccagcctgggtgatagagtaagactccctctcaaaaaacaaaaaaaagaacctcatacttgcatgaatacagtggcctctatcttttcatattgccacccaccctagaaatgaagaacatattcatctccacagtgtttagcaggtcattctgctcagaagaattgactcctcttcagtgactccccagtgcctaaaagataaactccaaattcatgaacttcacagttgatgttttctacaataacatctccaagctttgcctctataattttcttatacaaacctactaaacgttttgctttccctcttctgtattcctactcttacccaattgttcagactgtttctctgttcgtaatttcctatttctttccctcccacatcctagtcaaatcttttctattcttcagaatttcatgtttgcattaagcttcccttgaccattgcaaccatctgtatttttctcatctcctattttatgaagcacttctatcatttttcttttttatccttattttctctgtgacttttaaaatttaataacatgtacattgttaatatttagcattacatttaagtttattgtttctaatttatcttatttttaaatttaaaaattaagctatcttgaagtagaaatcattaacagttgtattctagaaaccaagtatgtcagtgcttttgcatatagtaaatgcccagtaaatttttgtgtaatggagaatgacgatttttattatgtggtctttcatcttcttagacagtaatagtaacttttgatccctcaggaggactcttgaaactaaagaagaccctttccaaagcagttctgataatatattctatccacagatggctacagaaccaaagaaagctgcagcccagaactctccagaggatgaaggacttctgatagtgaagatagaagaggaagaatttatccatgggcaggacacttgcttacagagaagtgaactccttaagcaggagctctgcaggcagctttttaggcagttctgctaccaggattctcctggacctcgcgaggcactgagccgcctccgggagctctgctgtcagtggctgaagccagagatccataccaaggaacagattctggaactgctggtgctagagcagttcctgaccatcctgccaggagatttgcaggcctgggtacatgaacattacccagagagtggagaggaggcagtgaccatactagaagatttggagagaggcactgatgaagcagtactccaggtgcacaggggatgggagatctaagacctccataatggataaagttccacggtgggaggagaggcccgagattgcatatctagcttgcaggagctgttggttcagtgtgcatttatgtctcctttcctgtctgtttgattccacactacattttacaattaaatcagactcgattcttccttccccagttttgcatttctatgggagtttctctttgttgttagaagacgtttaacacagggattcttttataagcccaaatgtactttatttttctcaggttcaagcccatgaacatggacaagaaatattccagaaaaaagtgtcacctcctggaccagcacttaatgtcaagttacagccagtggagaccaaggcccattttgattcatcagaaccccagctcctatgggactgtggtgaggggcagaatgccatatagtgcacatcactaaagaaacaggggaatgaatctccctccacaaactagtcttggtaactgtagatggtcctttcctttattacccaatgaaaagagagaacttgtggccaggtgcggtggctcactcctgtaatcccagcactttgggaggccaaggcaggtggatcacgaggtcaggagatcaagaccatcctggctaacatggtgaaaccccatctctactaaaaatacaaaaaattagccgtagcacctgtagtcccagctactcggaaggctgaggcaggagaatggcgtgaacctgggaggcggagcttgcagtgagctgagactgcgccactgcactccagcctgggcgacagagcaagactccatctcataaaggaaaaaaaaaagagagagagaacttgttttcctgtgagtctttggccaatggtaggggaaaagataattttgttccttatccagaatatttccaaaacacagaacatttttatgatatgaccaaattaaaggaaataaaagtgaatgagttgagaaaatatcatgaaaagagaaaagaaggaaaagaaaaagaaatacatggacagaagcaaaatatgttcatagagaagtacatataatgatcaagagaaacagatacatgatgatatactgagaaatagtatataattcacaagtaacatagaccgtgatccatatttttcctgttatgctcttggtcttataaagctcttttacacttttatagaaagttagctatagttctagagactacttccacagaatactcatctctgttctaaaactcatctatttaaaagattcatagatgcagtatcacttaaggtgtgaattgtccctatagtaaacccaagaataacttaccgttaattttttggtttgtttgttttgttttgttttgtttttcctgacacagagtcttgctctgtcacctaggctggagtgcagtggcgtgatctcagctcactgcaacctccacctcctgggttcaagcaattatcctgcctcagcctcccgagtagctgagattacatgtgcctgccaccatgcccggctaatttttgtatttttagtagagacggggtttcaccatgttggccaggctggtctcaaactcctgacttcgtgatccgcccgccttggcctcccagagtgctgggattacagacatgagccacggagcctggccacaattaatttttaataaatttctacatattctgccttcagttttgttctggaaacatctccatctgtcgtatataaaattgtaaatttccctcaccccatgaacagcactccctaaccctctttcctgccctagcgtattgtagacaaaggacagcttataataaagaagggcggttcaattccagcacagtatagagtgggatttgtgaagactggatcataaatggatcttggaaaccaggcttgggaatttagacttgaacaaaaaaagagagagagagattcaaggtttttgagtagggtatgaaaggatggcagtgtttaatgaccattagtctagtaaggatctttaggataactaggaagaagaaaagtgcagagtcaaaacagcaaggaggcagttaaagtctagataggaaatggtaaggttcgagactatggcgatggtagcagaaatataaaggaagggatttatacaagggacacttagtggacagtgatgacagaatttagaagactgattaaccatggaatatgaggaagaaatagacaataggtggatggaagttttctcacacatacttcacagtcacttatagctttacttttctctcttgtgttctcatctgctttctttgaggtagtgcctccattttccctctagaaatgtatcatagacccaaggttcccaagatctgctgcagtcaacattgtagagttccttctccgtactctatctccccctatctcttgagttcttgctgatgacaatcctcccaatcttttctaatatatatgcttcacgtctgattcctctctctgccaaccactgcaggcattacttgctcttaccaatgtttctttcattcctatcatcctctttcattctatcattcctctcatgtgaaaggtcatatattaaagtgggcatatcaatatgtaactatcttgagcatgctataaaattttcttttcgtgcagcaaacaggtaatatttccctttcttttttattttagataatgagagtgaaaacagtagatccatgccaaagctggaaatttttgaaaaaattgaatcacagagaattatatctggaagaatctcaggatacatatcagaagcatctggtgagtctcaagacatctgtaagtctgcaggcagggtaaagagacaatgggaaaaagaatcaggggagtctcagagactctcgtctgcccaggatgaaggttttggtaaaatcctcacccacaaaaatacagtcagaggtgaaataataagccacgatggatgtgagaggagattaaatctgaactcaaatgaattcacacaccagaaatcttgtaaacatggtacctgtgaccagagcttcaaatggaactcagattttattaaccatcaaataatttatgctggagaaaaaaatcaccaatatggaaaatctttcaagagcccaaaacttgctaaacatgcagcagttttcagtggagataaaactcatcagtgtaatgaatgtgggaaagctttcaggcacagctcaaaacttgctaggcatcagagaatccacactggagagagatgctatgaatgtaatgaatgtgggaaaagctttgcagagagctcagatcttactagacatcggcgaattcacactggggaaagaccctttggttgcaaagaatgtgggagagcattcaacctgaactcacatcttatcaggcatcagagaattcacaccagagagaaaccctacgagtgtagtgaatgtgggaaaaccttccgagtgagctcacatcttattcgacactttagaattcacactggagaaaaaccctatgaatgcagtgagtgtggaagagccttcagtcagagctcaaaccttagtcaacaccagagaattcacatgagggaaaacctattaatgtaaggaacttaaatttgtaagtaaatgctgaggaaatggcacaatatgaaaaatattaaataaaaaataaatattgggcaagatggaagactgaaa

SEQ ID NO: 614 - DNA, 31344 bp, Homo sapiens
gaaagaaacaacaactggaaaagaagcactgcataagaccaggatgtctctgaaatggatgtcagtctttctgctgatgcagctcagttgttactttagctctgggagttgtggaaaggtgctggtgtggcccacagaatacagccattggataaatatgaagacaatcctggaagagcttgttcagaggggtcatgaggtgattgtgttgacatcttcggcttctattcttgtcaatgccagtaaatcatctgctattaaattagaagtttatcctacatctttaactaaaaatgatttggaagatttttttatgaaaatgttcgatagatggacatatagtatttcaaaaaatacattttggtcatatttttcacaactacaagaattgtgttgggaatattctgactataatataaagctctgtgaagatgcagttttgaacaagaaacttatgagaaaactacaagagtcaaaatttgatgtccttctggcagatgccgttaatccctgtggtgagctgctggctgagctacttaacataccctttctgtacagtctccgcttctctgttggctacacagttgagaagaatggtggaggatttctgttccctccttcctatgtacctgttgttatgtcagaattaagtgatcaaatgattttcatggagaggataaaaaatatgatatatatgctttattttgacttttggtttcaagcatatgatctgaagaagtgggaccagttttatagtgaagttctaggtaagtcgtgtgtccaattggtgtttattaagttctaattttcctgtgcctttgaaggtgggcttatataaatataatgtcagaagatagtgtttttatgggaaattatgaattgcaaatgtaagatgatctatgagtctcaaaaatatagaatgttgaccttatagaatcagttagaaccctggtgccatcactgctataggacaccaagagagtcataaaccttcaatgtaaaacacttatgatttctttaagccatcacatatcattttgctatacattttttcatctttaaaaaagtcaatagatacttcaagaaacatcttcatgaaggcagacatacaaattttatatttacacatatttctaaaaatattatcaatgcaggattgaggaacttgtacctgagtacctcagtttcctcatttagaaattaaattttgtttttcatataagaaggattccttcacagttgagaaatatagtggctctactccagaaacagaagcctaaaacttgagatttctaatatttatacattccttcaataacaacttcacaattatttccttcaaaaactgaaatcttgttgaaagtgaacatctaagttttaatctatattttattaaactgcatctctccatcaaagaaaataggggccaaaataaggaagagcacatatctctatgtcaataaattctgaaaaatttttaattctcatttgtaaatatatttattttaaaaatctaattatattaagatcttaagatgaaccaagacagtagtaggtgtaaagatttcagtgttgagctcaaaaaactcatggtttactttgagaaccaaggatcaagggactagcttaataaactgtagacactagagtacttcctggaaagctgttttcatgggtaaggtaagatgaattaattgtggaactgaaagagttgtttaaaggtatatttgttactattgcagcttcagagggaagacaaatgtgtatttaagttcatagtggctacattagtccattctcacactgctgtaaagaaatacctgagactgggcaatttataaagaaaagaagtttaatagactcagttctacatgactgggatgcctcaagaaacttagaatcatggtgaaaggctaaggggaagcaagcttggatcttctcacttagtggcaggagagagaagtgcaagcaggggaaataccagacacttataaaactatcagatctcatgagagctcactcaatatcatgagaacagcatggaggaatccacaccatgatccaatcacctgccactgggtccctccctcgacacatggggattatggggattataattcaagatgagaggagatttgggtggggacagtcaaaccatattagtgacttattttaataattatttatgattgtgaatatactgatgttacattaaagatgtgatttcttcttacagctctctgaacactttgccttccttatatatacatatgagcaacatatgcaatacataaaaattaaatgatgactatataaatgtatttaatataatgtatttacattatattaaattattttattaaataatttaaatattaaattaaaactattaaatattaaatattaaattaaatattaaatattgtttaattttattaactttattaatgttttattaataaaataaaattaataaaattttattaatattaaatattaaactttattaaatattaaaaattaaaaattaaatactattaaattaaaatatattaacatatattaaatacattaatttaatataatgtatttaatattatttaatatacattaatttaatataatgtatttaatataatgtattatattatataaatgtatttatatatattatcaatgtgcagacattttatatatttttaggtatgttattccaagtcctttcaggaaaatacctgcatattcaatattaaaataacaattctcgtgttagctaccttttgttttgttttgtttttttccatcaggaagacccactacattatttgagacaatggggaaagctgaaatgtggctcattcgaacctattgggattttgaatttcctcgcccattcttaccaaatgttgattttgttggaggacttcactgtaaaccagccaaacccttgcctaaggtgaacatattcttgtttcatttgtttgcttgacattttcagaaggaatggctggatatgtttctttcagagtgtttaactcagagtgaggggaatatgggaggtcaaaaaaaaggacttgccattagaaaatcatatatttctatactatcacaagtatgtgaatgttattatcattaaagaccaaagaggtttactagggagattttgaaaacagggttggttaaagtaaggccttcattgtgcaacccacaagatagtatggttcatttcttcaaaaaatatttgtagagtgattaatgcaaaccacaggtaagtgctggattttcagagaataaaggtagcacagtttctgcgccctcatgcctaacattgtactttgaaagatagaataaaaacaagtgaaaaagaaaagtctaaaaagtgttataaggaaagaccacaatgataaagaaatatgcagaagagatcccaaactcattgacaattaaagtgagtactcaataatgtgcagagataggtgaaacgatgaggggatgagaaagacccaaaaagaaaaccagaggccaggcaaggtggctcacacctataatccctgaattttgggaggcagagaagggacgattgcttgggctcaggagtttgagaccagcctgggcaacatggtaaaacctcatctctaacaaaaataaaaataatagccaggcatgctggtgtgtgcctgtagtctcatagtcccagctacttaagaggctgaggcaggaggcttgcttgagtctgggggcagaggctgcagtgagctgagaccacaccactgaactctagcctgtgcgacggagtgagactctgtctcaaaaacaaacaaataaacaaacaaaaaagtaaagtcttgcattaaggcagaaaagtagaaaagcagtaagggcagttcccaggactccaaatttagtttacaggaaaaggttgagtaaaagtcaatgatgggccgggcgtggtggcttacacctgtaatcccagcactttgggaggccgaggcaggcggatcgcctgaggtcaggagtttgagaccagactggccagcatggtgaaaccccgtctctactaaaaatacaaaaattagtcaggcatgttggcaggcacctctaatagcagctactcgggaagctgaggcaggagaatcgcttgaacgcgggaggcagaggttgcagagagccgagatcatgctattgcacaacagcctgggcaacagagtgagactctgtctcaaaaaaaaaaaatatatatatatatatatatatgaaatttgatatacccattaaggacaatggagagctactgaaaagagttaagaaatgaagagatatgatcagatttcctttcaaaaaaaatcccaatgttctcaatgtgtaatattacagaaaggcaactttgtacaatgtaaagaatatttaggaacttttacatgagtttaggcaatcatgactacttttacaataataatcacaacttcatattgtgttgtgtggaaaaaagtagttaccacagataaaacacttaagttgtctctgacacatagccagtgatccaaaaatattgttgatattatgattattattttagtcattatttctaatattttaaattagctaacatgtgccagccatttaagatatcagtcttcatttaataatgattgattttcctagcaaaatcctagagaacagatactctgtgtgcttgtttaaatataaatgtttaagtttgggcagtcagttgaacacgctggaaagctaaagttgtattgcaaaggtggaggcacttcattaatattttagcttaaaaggtaattctgtgtactcttatcttattctcaaaaaaaaatcctcactcacatcaaaagaaagtgatagtgccattagcagggggaagagaataggagaataaggaggacaaggaataaatgactagtagtacaatagtgattattactaatactaccatgatctcagctcactgcaacctccaccctctaggttcaagtgattctgattctcctgcctcagactcccaagtagctgggattacaggcacccaccaacacatccggataatttttgtatttttagtagagacagagtttcgccatgttggccaggctggtctcgaactcctgacctcaggtgatccacttgcctcaaccttccaaagtgctgggattacaagtgtgagcctccgtgcccggcactggctgttgttgttaacctgcaaaaggtagacttgaatctaagtaaataattgtgaaaccgattctctaattcttttgtacacaaaataattgttgccacaaatttgcttgcttttccattatgtattagattctcagataatgtttgtatatttcaaaagaataagactcttgccaaaaagtatcaagtgtttgaaaactgcatatagttattgcctttgtaatatattcacatgaaactgtacagagaataaatcatgatggtaagattcaatattagtagcaaatattcgttaaaaaactctggaaataattcaaatatcttacattaagaaatggttaaaaacttatacaatgcgcataccaagccattacaatccattttttcaaaacaatgtttaattacactgtcagctgtagtacaggtatagttggaaactaaggaacagaatgatgagtagaacaagatcacaatttttttgtaggataaaaaggcatatacaatgagaaaaaattttctaaataaacatcacatatgtacattgagttatataaatagaattaaaaccataatgaaatggtacacattttaaattgagatagagatatgggaaaaatgatttttttcctaaattttcatacttttacaagactacttacattgatcttctattaccattgctttcataaagacgtcacagaatgagatcagtgctgatctgtctataaacagacgattttttacttcaatacttggtggatgaagaagacttttgtcagtgaatgagacaaaacattaaaccgaagttacattaaatgtggctacaggcaactgcaattacactgagttcctggatgcctcatgaattaactctaatagccatacactgaatctccaattaaaactgatatcagaccgggcacagtggctcaagcctgtaatcccaccactttgggaggccgaggcaggtggatcatgaggtcaggaggtcaagaccagtctggccaagatggtgaaacctgtctctactaaaaacagaaaaattagccaggcgtggtggcaggtgcctgtaatcccagctactcaggaggctgaggcaggagaattgcttgaacctgggaggcagaggtcgcaatgagccaagattgcatcattgcactccagcctaggtgacagagcaagactccatctcaaaaataaataaataaataaaataaaataaaaataaaagatgtcataaagttcaattatatttttgaaaaataccaatatatggtctgaattgacatattttagaatttccttttttattcgtaaacagttttataaagaaatttcccccaatgattaggaccagaaagtatatttgttatgatagaaggggttggtcattattttactgagaaaaaaagaatttagaacaaaagggacaatagcaacaaaaagatgagtatacaattttgatatgatatccgggaaacttatgagtctacatttcttttcctctttctctctttctttttctttttttttttttttggtgtgagaatacattgactgatgtggcattagagaatggatttaagtttaaaaacaggaacacatcaggaaacacaagtcagaataattctcattcatttcgaagcaaacacatatttaccaggagcttcatatagtgtgagggagctactctagggggtgagcagatctccactggagaaaggcttggtgacctctcccactgtggttcaagtgccccctgtgagacacagcaaagtgaggatgagggtccctcatggtaagttataaatagcacatcaatttcacagtgtgatttcaggacaaaaggtatcatagtcatacctaaacaatgatctgagaaataagatcacttaattatgtaactaaatagtatataatactgtattataaatggaattctcagaactatttcccggaaattccaagccccaacaccagactgatgaacgtcaatgattcttatacttcagcttttaaggtgttttttgggggtgggggtgtcgggggaagtgaggggtagtggggtaagactaggaaactctaagtgaaatataaagggttagagagctaaagaagctaaataaatgtagatataaaatcattctaattgtaactaacttttcctcattgctcatagtcatgtaatggctccaatgactcctaactaaaagaactgaacagaaaaaaataaaataaaatgaccccaaataaacacaagagatttagtagaactacaaaaaaaaatagaattaaagccaagtaaagctaccttccaataacctatgttagtaattataatattataaataaagtgtctgggtgtaatattttctagcattatctcctcctactgcagtgtcatagctttgtttcatttcttccttacacacacatacatacatgcatatgcacacatatttacacaaatttgcatgaaagatcccacatatattatattacacatctcctttcaaagaaactgaatgattaggtcagtttaaaaaaattactccaatagctcctgactttctcatcttagatgtttgtaacaatcctgtcaacagtgttttctgtgctgttgctcttttctgatagaacaaattctttcttcacaggaaatggaagagtttgtgcagagctctggagaaaatggtattgtggtgttttctctggggtcgatgatcagtaacatgtcagaagaaagtgccaacatgattgcatcagcccttgcccagatcccacaaaaggttagataaagtgccttaactgtggatggctactaaatgaatctgttaaactcttcaagagtccattacagaaatgttctgcctgaaaatttaactgctatgatagttctaattatctcagacatctgttcaaagcaaaaacatatatggaagatcttaaaatcataaagagaggagttttggttgataataacgttggcattaatattgtgatcagaaggaaatatatttaagaggtgctagtgaagtttggtattatcatggtatcgtagcatgtacatagaaatcactaaattctgccctgtcatttgctccttttggtttacaggattttagaaggtactgtatacactgtagatattatcaaaaagcggtaaaattttaataagttactgtactatcacaataacaataagcaggtattgaaaaaactttgaaatgcatcatgcagcttcgtcttaccaagcaatctggctgtttttacttcccatgcattggaataggtctatttagcgttctgttcagggtgccattcagagaaagaatgtcctagtctgactagccactgctctggaggtacccacctagccaagtagatttagagaaaaagaaaaacttgtctgctctgctggcttgggtgccgctaatgtcttaagcagaaaaatgtaatggaaaggatggagatagaatcctgcttttagggtagactatgtgcattattaaatgtggcccaacaaagactatgctctaagaatcagattagtgccttctccacattgaggaaggagcaggaactataaataaacatggtaggaacttattttctaatctatagaatatacctacaatctttgtgtattttcaatttacgttttactttcttatctgcatagccctctctgaatgatctatgcaagtttttgctgaaaacacagagttactttaacactcccatatcaaatacaaggacaacacttgtaaattctactccagtttataaagattgcttgggaaatctaaaatcagtaccttagtttggtactagacatggtaatgactggctatagctgaccatatatcaaggctgtcaatgctaggtagtgcatcatctaagtgtgaaagatcagttaagcaaaaagtagcaaaatacaattttctacattctcagcatctgtattgttaatcatgaattgtcaatgggctcctttttcctacattgttagcatttacaaaagtagcaatactgataatagtctgaatttactacatatgtagcattatttctcaccatatgtgcagtttaagtatttagtcttttgtaatcaatgatgtcaaattcataaaataacttatgactagtagacaagtggatataagtaaactcttcccatatcactcaaaaattaataaatttatattaaatttggaaggttacagctagtataaagtatataaaataaatatataggttattactaatttgctacttttttattactagaattaagactgcctaacaattcttatatatttgaatatttcattgataatcttgtgaaccccaaatatctgatacaggtctcagtacatttagaaagtttattttgccaacttgaagcagggaagaggcattcctttgagcttctgattaggctctccaaaggaggcaatcagatatgcatttatctcagtgagcagaggggtgtctttgaatagaatgggaggcagtgatttgcttagtgactttggggcccccaggtttattttcattttacattttaaaaaaatcttttggagaaagcattttagaagaaaatgagtctctggtctcaggttttcatctgatctctaatggcaaggaaggtttattcctaagcaggtcctgagttattaggaaagttcatttttagcaggttctgaagtctcatgtactgtgaagacaaaataaagggaggaagtgagaaaaacaaaaacaaaagaacaatcctttaaaattaatataggccacattactctgaagtccataaatcagtaggcaggtatgaaagtggattatgtatgtaaattggttgctgttattttcttctggagtttaagttgtctagcttaatttgtagggctttatgaaagcatagcttagtttacagtgactccaaattaggaaaaattgtggaaggggaggaaaaaaaacctgaagacactattttgaagacgtgtagccatgaaaaattagaattcagtccaaactgtagacagtaataaaaattgaaaaacattaggcaagactagaatctaacaacaggtatactgttatttttgaaacataatttttctgtcttcagtttcccaattttactaaagacaaaccatggtacaactgatttgctttattatacttggcctgattattgtatacagaggaggaagaataattttttatttacataggcttttaaagtggctttgatggaactttgtcttatagaaagaatctcagataggacttttttaaagctgaggcaagccatagatttgtaccatcaaatacctatgagttgggtgaattcctctcctcttggggttccaaaataaacttggggctcctgggcctgtcagaaagttacattctttgcttaacacagttcaggaaccctgtacagggaccttatagatgaaggtatgaggccagttttcccaaggggttttattggctccataagttaagtttgattccctaaaggaaagcccaccattccagtggaagccttgataaaataaccagtttctccaattgtgttttgttaaaaatgaaaatagattcttattgcacttatgcaaataactgtattgacaaaagtaaaaaatactcacaaatagtttccaaattctgaaaaatcaggtagagggaaacaaatatgttctaaatttttttcataggagtatactaaattgttaaaagctgttaatagctcaaaaaaagaaagattccttcactctaaaaaaaaaaacaaaacaaaacaaaggatcagcaatgttttaagcaaagtcaaaaagattactttagttttctattatttcagtccatgtagttaattcctgttctgcttgatattcatgaacattttagttctccatgagtcctgaaagtttttcttccattctaatgtcacaatctccaaaattatcaaaaactttttttcaagagcacctgttagaatttcatggctgagtataaaatcgccttctaaagaggaccaaagtcagacaacaattgtctgtggatgacaaaaagttttagggcagcctcagtcaaagacacaatggacaaggaaatttgttacctctgtggcacacaataacttaacataacaaatataattattactgataatgtacacactaagtcatatcagaattataggagtttcccataattttggaacacatgccaataacatatttatataaatacagctcaaaaagaccaaacaccatttcatgtttgacaatgttccctgtataatttttataccaaataagccaaattatgtcatttttggactttagggaaactaataaattaaaggattacttaggtcagaaaaaaacataattttggaaaatttgtcaaatatcaaaggattaaaaagcttgatatcacaggtaaaataaagcattcatttgactaaagtagtaactcaaggatttcaaaaaaaggcaaaaatcttcattctttgagagaggagactcaatttgccaaacaataagccctaataaaacagcatgaagccaaataagtttgtttttcaaaattgtatgaacaatctataaaattctaatcttgaccataagatataactttcctcagcctttcataacgtttataatctttattaagaagtcagtttatgcttcaagaaaaccttgttaatctgacacaggggcccatatgttggtcttgcattagtgtgtctttgacattaatgattaatttatgcataaacggaacttattttatctcttagtatcagttctttcaatctcacacacccacctcttctgtgatagtccctggaccttgaggagttgaatagcttttagaaaacactgttagcattatgccacaacaaacagaacttgaggaaaaaacttacatgagttgaaaatgagttgaaggagagtgttactatttcacaccctttaaaaggggagagaaaaccaaaaacagtgagatgcaagaaaagttaaactttgggttaaaaaaaaaaaactcataatattttaagagtaaatcaatcccttaagaaaatgttattgttctaaccaattatttagtgcataagtgctttttttacatcaagcccaatctgtagaaacaccattataatttccctttaattatagacaacttgatcatataaaagtttttttaatcttcttattgtgacttacacagatcattcatgatatgtttggactttctggtttgtcctgaacatccttctttcttacacaactgatcattttattctaggactaaatttaccacacaagattctttctcatataaaattatttctcttcaagctttttacaaaaaaaaaaaaaaaaaactttttatttttataactttctttacatctcccttacttcctggttccttttaccttgttttatacataacctttaaataagctttgaattagacaacacttcttcacctttttaaaaaagatgcacttttttttggaaagaatgttttcctacaaatttttttttaaaaatacccaaacaatgaaatatctattatttaatttaatataaccttagattctaaattatgagtttgtctataagtatttatcccattacatttacctaattatttagtcatttacctagaatatttgtgaaaagtgtggtagtcatcatttaaagttatggaattgccattgcaaaattataactgagacagtgaaaaagatctgacctaactccatcttgcttttaacctccaagctctccgtgtttatttctgggtgtaggccaaactaacttaaggaggaacttagtttatagtttagctttgaaataaaaatgataacagtcttttcccaaaacaaagcttaatgcctgtggactagattgcttaaggccacaagatgagaagttatgataatcttacttaattcaaggtgtagctatttgcattaaaccaatattaatgtcttatttattaaaaattacacaagtgaagatcattctgttttgggcttggtttacagttttgtaacccctatgtcaaattttgacaccttaaagtatttggcaagaataagtatgaaatttcttgattaataaatgcaaacaaaaatgtatgctggcaagtcttaatgcatttctaatattatcatactttatcaataattgttgttatcttatttataaaagattttatttaagttacataaacttgaaaaagcatttaattagtctttttttctggcaaagtatttaattcaagcacttttattttcttaagccaattaattagagctcttttatatattttcagtaataaaacattgtgtacaaaacacataaatacatagatgtagtaagcatgccaacagaagtacatcttacaggtttataaaaactcctctttgccatattagactttcaaattcttgataacctgtttcaataggtaatctgtatgaatacttgatcaccataggcagttgtgagctaaataatcttacatttgcatattaaaagaaaccattcaggtgaaaatcaaatagcaaaatttacatcataatgtacacagagaaaaaaattggtgtgctagaaggaaaataaaatggatttaattgccaattaaacataaaattatagaaattataatggccttttaaatatatgcaaacacttacacacacacaaaagattatgtggtttttacttcagaaatttagctatgagataaaaaaaaatcaccagcttgcagacaaaaacctgttgaatcaaaacagtggtttttaacttaatagaaaaataaaagcaaatttaaagcaagaataaaagaaaatttttaaaaaagagagaacttaggaactctacagtttgtaggacaaccttagggctcttaatgtatatgtgcacaaagaccgtattaccttcattttacataaactctgccaagtagaggtgtcataaatccaaacaggcgatatcaggggatcattcttcttcttttctcatcattcttagattatttgtttcccactttttttcctaaaaggaggaactgagctgtggcctagggtttatgtgtggtgaatcaatgtgtgctgcttgtgggcagtactccacagtgtgtcaccactgagttgtttccaccctcttacgtgtctcagtttctccctccagaggtgtatgacctctgagagggctcaaaatgctgggtgatctgccctcatatgtgtttcctggactagcctttttttaaaagttaatttttcttggggatttccctgcaggaccactgcatgtcatagggggtcaaacccaagacactcccacaaggcccccagttgcttaggggtgccttttgcctgggaggagcagatgccctttcactttggagctgagaaaactcagtctttcattttcctatgtaaaccacagttcagtttctcacacaaatccacacagacaagccaaatgagattaatttggggaataaaaacaatagaggagaccctttacaacacatctccaaactagaattaggattcttaaacaacaacttcctaggaggaaaaaaataacaacagtcaatactacttccagtaaactgtactcagccaccctctactttgtaactcgtctgccattacacacgccaaggtaaaatcctctcacagtacaaggtaatctgtggtaatctcgaagccaaagagatcaggtcattcaacataggaaaacagagctttggacctaagaaaaaatctgcccacaactcttgaaactccacaaagaaaacagagcacccccaaaggggtgagtggtgcctttgttctgaattctttaaaagagttcaaatcattagaagccttctctagatttttggtactacaaatggcaaaagacaaaaggaggtatagggtggaggaaaagtaaacaaaagaacatttgtttttttaaagacaggaagcaaacacagaaaccaagagcatggtttttaggttttgttttgttttctcttttgcatctgtgaagaattttcaccaaattagacaggctttgttacccacaatttggaattctcactcagatatgatcaagtcaggtaaagtttgtcaaatctgatgggagaaatactggaatgtacaaaaaaaatactcccaaaaatgtgatcattaagcactgtaatggtaaggagaaattaagtccagctagttgttaaacattaaccaagacaaaaccccaattcagctatttacctacggatgggtttcaggctaaaactgccctctgtcgtcctagaagtaggaaagaaacctcaaatttatcctccctcctgggagtgagctcaaactccatagagttacctgccttccattgtcatggaaacaggaaatattgcctttcttgtaggaagcaagtaaaactccaaaaaaaaataaaaaacaaaaaaaaaggagttgtacagcaaaataaacttttggtcttgactgaattttggggtatcagggattctctggaggggttgctcccagacctcagccaattgtcttatttgtttgagccataaagttagctcatgctggtaccaagcactgacaggacatttatcaaaggtcagggaacctccactcagagtctcttcatggttaccaaaatgtgaaccctgaatatctgaggcaggtctcagttaatttagaaagtttattttgccaaggttgaaaatgtgcacccatgacacagcctcagggggtcctggtgacatgtgtcccaaggtggtggggggacagtttggttttatacattttagggatacatgagacatcaatcaacttatataagatggacatttgttcagtccagaaatgggggacaactagaaacaaaggcagagcaacttgaagcatggaaggggcttccaggtcataggtagataggagacaaatggctgaattcctttgagtttctgattagcctctccaaatgaggcaattagatatgcatttatctcagtgagccaagggctgactttgaatagaatgggaagtaggtttgccctgagcagcttaacttttccctttagcatagattttggggcaccaagatttattttcctctcacactctcatgtgtctagctattaagttagaaatgtcatttttttatataccaaattgattataaaagtaaagatattaaatgtgggtattcagcttacctcagacttttagtagttctcattacttgacatcacttcttcttatttcttcatcttttatatggattaactgattattaatctcttcagaattctaacaagttatatttttagagttctattcattgaacaagatattttccttgccctaacaggttctatggagatttgatggcaagaagccaaatactttaggttccaatactcgactgtataagtggttaccccagaatgaccttcttggtaagactctggagaacaaatactgaatatattagtaacagccaattagaagtgataatatttcaacataaaacaaacatatttaacatttattattggaaaactaaaaaaaaatcaaatttaactactttatatttattttctagtcttagtataagaagaatacactatggtagttggcattttgttacatacagtcacattctttatggtcagaataaaaatctctttattcaggtgtaattacctctcacaggttttaaataacatcctggattttctgtctcttatttctgcaactttacatctgttccttcccctactgcagggttatttcaacaggtactgaaaaataacagacattcttctattaccagtgactctattttctgtgggaataaatcaccaatctttatcataaagtgataacacatttcatgatgatgtgtaacctgtccttcctcagcaccacctccaccctactccttgctgcctttaaaaaaaaatttaagtattttaaatattttaactatttaaatattttttaaatatataaatgtgactgcataatttatactacttaagagactatgttcttgtataccaaatcttattcttttcttttttgcacattttaattttttaattaagaatatgttttttcattttgttcacctggcaaacttttaaatttatgtttccactgtgaagacacacagaccaccaccttttcatgtagccttcacttacctttccagcagaagtaggtgcttcttcctctgaaatttgaaaacaatttcaatgcagttttgtgggtataatgttacctagggaacagttttgctttaagttccttatattgtgcatttcttattcaattcctgtgccttataattaataactttgttaaaatgcatccacttttaggtcatcccaaaaccaaagcttttataactcatggtggaaccaatggcatctatgaggcaatctaccatgggatccctatggtgggcattcccttgtttgcggatcaacatgataacattgctcacatgaaagccaagggagcagccctcagtgtggacatcaggaccatgtcaagtagagatttgctcaatgcattgaagtcagtcattaatgaccctatgtgagtattacaattttgtgaccaggtggtacttacaaattattttgtcaacagtgaatatgagtttgaaccctttgttaagagactaattttgaagggattgaagtgatttaaccaatgtaaaatctgctcttattttccaccagacaattatttcaaagttacatttcaaccccacagatttaatgggtcaccaatgactgcaatgaattataaaatcaaaaaaattaaagatatgtacataattattttaaatatttttaatgatagaatacacaatagaaattatgtaactagagaaatatgataaaatatttcaattcaatacctaaaatttctgaaagtatgaatctattctttctcaaaaatttatttttattattatcattattttaatcaatttgaaaatgagttacaatttgcatagcataacattcactaaaatttaaaatctaaatatatttagtatgtttacatagttacgaagccacaaccctaaataacatttttgtgagctcaaattaaactcaaaatgcatgaagtcactcccaatacacctccagtcctagaaaaataccgacttactttgtttctcaatagattattctcttcacatattttatataaatgaaatcatacaatttatagtgttttgtaaacgacttctttcacttagcataattatttttagttttatttatgttgttggatgtatcagaactcattcatttttatttctatataatattctttgatatgtttataccaaaattacccatttatcagggcatggacattttaggtctttccaattttggcacttacgaatattgttatacatattttctgtgtaaaaatatgtttttacttcttttgaggagaggctaggagtggacttgctgaggcatatgggaaattgttgtttatgaagaatggctaaactgtttttcaaagtatttgcatcatttttcattaccaccagctggataggagggctctaatttcttcacactcttcccaacacttgttatcacctgtctttctattacagcctttctagtgtgtgtaaagtggtctctcattatggttttcatttgcatttccttatggctgaagatgttaaccctcttttcatgtgcttactgatcattcatgcatcttccttagataaaatttctattttaatcttgtgaacattttgtcatttttctatttaccttattatggattcataagaattattaatatgttatagatactatcccttatcaaatatacgattttcatatattttcttccactatgggcagatagatttttttttttttttactttttggaggatgccttttgaaacatgaaggttttaatattgataaaataaatatgtaatagttttccataatccaagggaaataatatggaaaatgctgtgactacaccagctaccatcaattcagagtctattaatcctaccaatattattatgatgtaaggtggtaccagctaagagaatacattaaaaacactttaccaaaaaattagtaagacaagaaatgatttaaaatacttcaaataaagtaaaaaagcaaagaaacagaaaacaggttagaaaacaaaaatatatagaataaaatggtggatttaaatgtgaactagggcaatcaggcaagaaaaagaaataaagggtattctataaatagaaagagaagaagttaaattgtctctatttgcagatgacataattctatatttagaaaaccccttcatctcagttctaaaattccttaagctgataagcaacttcagcaaagcctccggatagaaaaatcaatatgcaaaaattacaagtattcctatacaccaacaatacacaagcagagccaaatcacgaataaattcccatttgcaattgcaacaaagagaataaaatacctaggaatatgcctaacaaggtacgtgaaggacctcttcaaggagaaatagaaaaccctgctgaaggaattaagagaggacacaaacaaatggaaaaacattccatcctcatggataaaaaaatcagaattgtaaaaatggccatgctgcccaaagtaattttttttattatactttaagttttagggtatctgtgcacaaggtgcagctttgctacatatgtatacatgtgccatgttggtgtgctgcacccattaactcgtcatttaacattaagtgtatctcctaatgctatccctccccactcccgctacccccaagcaggccccggtgtgtgatattccccttcctgtgtcctcgtgttctcattgttcaattcccacctatgagtgagaacatgcggtgtttggttttttgtccttgcgatagtttgctgggaatgatggtttccagcttcatccatgtccctgcaaaggacatgaactcatcattttttatggctgcatagtattctatagtgtatgtgtgccacattttcttaatccagtctatcattgttggacatttgggttggttccaagtctttgctattgtgaatagtgcctccataaacatacttgtgcacatgtctttatagaagcatgatttataaccctttgggtatatacccagtaatgggaatgctagataaatgatatttctagttctagatccctgaggaatcgccacactgacttccacaatggttgaactagtttacagtcccaccaacagtgtaaaagtgttcctatttctccatatcctctccagcacctgtggtttcctgactttttaatgattgccattctaactggggtgagatggtatctcattgtggttttgatttgcatttctctgatggccagcgatgatgagcattttttcatatgtcttttggctgcctaaatgtcttcttttgagaagtgtctgttcatttccttcacccacaagctgatgaggttgtttgtttttttcttgtaaatttgtttgagttcattgtagattctggatattagccctttgtcagatgagtagattgcaaaaatgttctcccattctgtaggttgcctgttcaatctgatggtagtttcctttgctgtgcagaagctctttagtttaatgagatcccatttgtcaattttggcttttgttgccattgcttttggtgttttagtcatgaagtccttgcccatgcctatgtcctgaatggtattgcctaggttttcttctagagtttttatggttttaggtctaacatgtaagtctttaatccatcttcaattaatttttgtataaggtgtaaggaaggtatccagtttcagctttctacatatggctagccagttttcctagcaccatttattaaatagggaatcctttccccatttcttgtttttgtaaggtttgtcaaagatcagatagttgtagatgtgtggcattatttctgagggctctgttctgttccattggtctatatctctgttttggtaccagtaccatgctgttttggttactgtagccttgtagtatagtttgaagtcaggtagtgtgatgcctccagctttgttcttttggcttaggattgacttggtgatgcgggctcttttttggttccatatgaattcaagtagttttttccaattctgtgaagaaagtcattggtagcttgatggggatggcattggatctataaattaccttgggcagtatggccgttttcacgatattgattcttcctacccatgagcatggaacgttcttccattggtttgtttcctcttttatttccttgagcagtggtttgtagttctccttgaagaggtccttcacatcccttgtaagttggattcctaggtattttattctctttgaagcaattgtgaatgggagttcactcatgatttggctctctgtttgtctgttatgggtgtataagaatgcttgtgatttttgcacattgattttttatcctgagactttgctgaagttgcttatcagcttaaggagatttggggctcagacgatcaggttttctagatatacaatcatgtcttctgcaaacagggacaatttgacttcctcttttcctaattgaataccctgtatttccttatcctgccttattctcctggccagaacatccaacactgtgttgaataggagtggtgagagagggcatccctgtcttgtaccagtcttcaaagggaatgcttccaccttttgcccattcaacatgatatttgctgtgggtttgtcatagataactcttattatttggagatactccccatcaatacctaatttattgagagtttttagcatgaagtgttgttgaattttgtcaaaggtcttttctgcatctattgagataatcatgtggtttttgtcattggttctgtttatgtgctggattacattcattgatttgtgtacgttgaactagccttgcatcccagggatgaagcccacttggtcaaggtggataagctttttgatgtgctgctggattcagtttgccagtattttattgaggatttttgcatcgatgttcatcagggatattggtctacaattctcttttttttcttgtgtccctgccaggctttggtatcaggatgatgttggcctcataaaatgagttagggaggattccctctttttctgttgattggaatagtttcagaaggaagggtaccagctcctccttgtacctctggtagaattcagctgtgaatccatctggtcctggactttttttggttggtaagctattaattattgcctcaatttcagagcctgttattagtctattcagagattcaacttcttcctggtttagtcttgggagggtgtgtgtgtcgaggaatttatccatttcttcttgattttctagtttatttgcgtagaggtgtttatagtattctctgatggtagtttgtatttctctggaatcggtggtgatacccccttaatcatttttattccatctatttgattcgtctctcttttcttctttattagtcttgctagcagtctatcaattttgttggccttttcaaaaaaccagctcttggattcattgattttttgaagagttttttgtgtctctatttccttcagttctgctctgattttagttatttcttgccttctgctagcttttgaatgtgtttgctcttgcttctctagttcttttaattgtgacgttagggtgtcaattttagatgtttcctgctttctcttgtgggcatttagtgctataaatttccatctacacactgctttgaatgcgtcccagagattctggtatgttgtgtctttgttctcgttggtttcaaagaacatctttaattctgccttcatttcattatgtacccagtagtcattcagaagcaggttgttcagtttccatgtagttgaacagttttgagtgagtttcttaatcctgagttctagtttgattgcactgtggtctgagagatagtttgttataatttctgttcttttacatttgctgaggagtgctttacttccaactatgtggtcagttttggagttggtgtggtgtggtgctgaaaagaatgtacattctgttgatttggggtgcagagttctgtagatgtctattaggtcctcttcgtgcagagctgagttcaattcttggatatccttgttaactttttctcgttgatctgtctaatgttgacggtggtttgttaaagtgtcccattattattgtgtgggagtctaagtctctttgtaggtatctaaggacttgctttatgaatctgggtgcatgtatatttaggatagttagctcttcttgttgaattgatccctttaccattatgtaatggccttgtctcttttgatctttgctggtttaaagtctgttttatcagagactaggattgtaatccctgcctttttttgctttccatttgcttggtagatcttcctccatccctttattttgagcctatgtgtgtctctgcacatgagatgggtttcctgaatacagcacagtgatgggtcttgactcttgatccagtttgccagtctgtgtcttttaattctagcatttaacccatttacatttaaggttaatattgttatgtgtaaatttgatcctgtcattatgatgttagctgattgttttgctcgatagttgatgccgttttttcctagcctcagtggtctttatcatttggcatgtttttgcagtggctggtaccagttgttcctttccatgtttagtgcttccttcaggagctcttttagggcaggcctggtggtgacaaaatctctcagcatttgcttgtctgtaaatgcttagagattttattttatttctccttcacttatgaagcttagtttggctggatatgaaattctgggttgaagattcttttctttaagaatgttgaatattggcccccactctcttctggcttgtagagtttctgccaagagatcagctgttagtctgatgggcttccctttgtgggtaacctgacctttctctcttgctgcacttaacattttttccttcatttcaactttggtgaatctaacaattatgtgtcttggagttgctcttcttgaggagtatctttatggcattctctgtatgtcttgaatttgaatgtcagcctgccttgctagattggggaagctctcctggatgataacctgcagagtgttttccaacttgtttccattctccccgtcactttcaggtacaccaatcagatgtagatttggtcttttcacatagtcccatatttcttggaggctttgttcatttctttttattcttttttgtctaaacttctcttcttgcttcatttcattcatttcatcttccatcactgataccgtttcttccagttgatcaaatcagctactgaggcttgtgcattcatcacatagttctcgtgccatggttttcagctccatcaggtcctttaaggacttctctgcattggttatctagttagccattcatctaatcttttttcaaggtttttaccttctttgccttcggttcgaacttcctcctttagtccggagtagtttgatcgtctgaagccttcttctctgaactcgtcaaagtcattctccatccagctttgttccattgctggtgaggagctgcatttctttggaggaggagaggcattctgattttataatttccagtttttctgctcttttttcccccatctttgtggttttatctacctttggtttttgatgatggcgatgtagaaatgggttttggtgtggatgtcctttccgtttgttagttttccttctaacagtcaggaccctcagctgcaggtctgttcgagtttgctggaggtccactgcagatcctgtttgcctgggtatcagcagcggacactgcagaacagtggatattagtgaacagcaaatgttgctgtctgattgttcctctggaagttttctcagaggagtacccggctgtgtgaggtgtcagtctgcccctactggggggtgcctcccagtcaggctactcggggatcaggacccacttgagtagcagtctgtccattctcagatctcaagctgcgtgctgggagaaccactactcttttcaaagctgtcagacagggacatttaagactgcagaggtttctgctgccttttgtttggttatgccctgcccccagaggtggatctacagaggcaggcaggcgtccttgagctgcggtgggctccacccagttcaagcttctgggccgctttgtttacctattcaatccatgggaatggcaggcgcccctcccccagtctcactgctgccttgcagttcgatctcagactgctgtgctagcaatgagcgaggctccgtgggcgtaggaccctctgagccaggtgcgcgatataatctcctggtgtgccgtttgctaaaaccttttggaaaagcgcagtattagggtgggagtaacccaattttccaggtgccatctgttacccctatccttggctagggaagggaattcacagaccccttgtgcttccctgatgaggcaatgcctcgccatgctttggctcacacgtggtgcgctgcacccactgtcctgcacccactgtctgacagtcccctgggagatgaacccagtacctcagttggaaatgcagaaatcattcctcatctgtgtcattcacactgggagctgtagactggagctgttcttattcggccatcttggcttcttcccacagtaatttatatattcaaagctattcccatcaaactaccattgacattcctcacagagctagaaaaaaactactttaaatttaatatggaaccaaaaaagagcccatatagccaagacaaccctaagcaaaaagaacaaagctggaggcatcacgctacctgatgtcaaactatactattaggctacataaccaaaacagaatggtactggtaccaaaaagatgtattgaccaatggaacagaacatacgcctcagaaataacattacacatctacaaccatctgatctttgacaaacctgacaaaaacaagcaattaggggaaggattccctatttaataaatggtgttttggaaaaactggttagccatatggagaaaactgcaactggatcccttccttacaccttacagtaaccaaaccagcatagtactggaacaaaagcagacatatagaccaatggaacagaacagaggcctcagaaataacaccacacatctacagccatctgatcttcgacaaaactgacaaaaacaagcaatgggaaaggattccctatttaataaatggtgctggggaaactggctggccatatgcaaaaaacagaaactatacccctgccttacaccttatacaaaaattaactcaagatggattaaagacttaaatgtaaaacccaaaaccataaaaaccctggaagaaaacctaagcaacatcattcaggacataggcgtgggcaaaaatttcatgacacaaacaccaaaagcaattacaataaaagccaaagttgacaaatgggatcaaattaaactaaagagcttctgcacagcaaaataaaccatcatcagagggcacaggcaacctacagaatgagggaacatttttgcaatctatccctctgacaaaggtccaatatccagaatctacaagtaacttaaacaaatttacaagaaaaaaaacaccaccaccaaaaagtgggcaaaggatataaacagacacttctcaaaaaaatacatttatgcagccaacacacttatgagaaaagctcaatatcactgatcattagagaaatgcaaatcaaaaccacaatgagatacaatctcatgccagtcagaatggagatgattaaaaagtcaaaaaacaacagatgctggtgaaactggggagatataggaaaacttttacatttttggtgggaatgtaagttagttcaaccatcatggaaaacaatgtggtgattcctcaaagatctagaaccagaaacaccatttgacctagcaatctcattacttgatatatacccaaaggcatataaatcattctactgtaaagacacatgcacatgtatgtctattgcagcactatctacaatatcaaagatatggaaccaacacaaatactcatcaatgatagactggataaagaaaatatgatgcatgtacagtatggcggcatactatgtgccataaaaaggaatgagattatgtctgttgcagggacatggatgaaactcaaagccattatcctcagcaaactaacacaggaacagaaaaccaaacaccacatgttctcactcataagagggagtcgaaaaatgagaatacatggactcagggaggggagcaaaacacaccggggccattcggggcatggaatgggagtgagagtatcaggacaaatagctaatacatgagggacttaaaatctagatgacagattgataggtgctgcaaaccaccatggcacacatatacctatgtaacaaacccacacattctgcgtatgtatcctggaacttaaaataaaactgtttttaaaaaatgtgaaccgaccagatgtggtggctcaagcctgtaatcccagcactttgggtggctgaggagggcagatcacgaggtcaagagatcgagaccatactcctggccaacatagtgaaaccctgtctctactaaaaatacaaaaattagctaggcatggtggtgtgcacctgtagtcccagctcctcaggagtttgaggcaggagaatcacttgaacctgggagacggaggtttcagtgagctgagatagtgccactgcactccagcctggtgacagagcgagactccatctcaaagatcacaacaaaaaagtgaacctaccagtactcgcattaaatttaaacagaccaaagtagacaaaataatgatctttgaaaacttttatttaaggagataaaacatttgaagtacacaattaaatgtaacctatgtgttatatgtgtgtgtgtgtatatatattgcacatatatctgtatatatgtatccatacatatatctctggttgtgtgtgtgtagacagaaaataaacatttttaaaagagtttatggagactgggtgtggtggctcacacctgtaattccaacactttgggaggccaaggtgggaggatcacatttggtcaggagttcgagaccagcctggccaacatggtgaaatcctgtgtccactagtaatacaaaacttagccagatgtgggggatgagcacctgtagtcccagacacttgggaggttgaggcatgagaatcacttgaacccaggagacgtaagttgcagtcagccaagatcgctccgtcatactcaagcctgggtgacagagagagactctgtctcaaaaaaaaaaaaaaaaaaagattatatgtatgaaatagttactggaattgaccatatgctgggccataaaaaaatgctaagtaaattgtataagattcaaattcataaaaatagtatgttctagtcatactagaatcaaattataaatcatccagaaaatgataactaaaaacaatctctgattctttaaaataaaaaatattttttaaaaaattcagtcaaaaaattctaattataaatatgcctttctctcatcaactattcttccaagtatacatccaacaaaaatgaataagtatgtaaatctaataaaatatataaatatcttaataccataattattagtaagatcaaaaaatgttaacaacacaaatatccattaatcataaatgaagagatctgtggtctttgtcaatcaactgaatactctacaccagtgcaattaaacaactgctaaacaaaaacagaaatgaataagtattatttaattcaattatataaacataatctatgatattagaattcaggttaatacttactttgaggataaaagtagtgactaaaatggcccaggaggaaagagttcttctatgcagtttgtgataaattggtgttttcacttttggataatgtttaagataatcttaaaattttgagatagtcacatagcgtatatacatttatcctatgtatttcatacttaaacttttattgtggaagatatataacatattttaaagttccagaaatcaaatagcaaaataagaacgaagcagtagagaaatcctatgggtgcctatagtgtggccaggaaaacactctctaagaggtatcatttaaggggaagcctcaaaaagaaatagaagcaaacctcaagtagttgcaagaaagaatgctcaatgagagagacacggggaacaaaaggtgtaaacgggctaaggtgagaacaccttcaggagtttaaagaacaacagaaggccattgtctctagaagaaagtgtacagggggaaagggttaggacaagtaggtgtctgtgtagcgttctctagaccacagacagatttggattttattcttaatgtaacaagaaaccagatggaaatcttgacaggcaactgtcataatttgacattaatttagaaaatgttctggctactagtaggaaaatacggtagaagacagaagattagagtagaagctgagaaactagttaggagacatttcaccagttgtgacacaattcttctttaaatatgtcaaaatgggctgggcacagtggttcatgtctgtagggccaacactttgggagacagaggcagaatgattagaccacaggagttccagatgagtatgggcactacagcaagacctcatatctaaaaatgtaaaaaataaaaaatatagccaggcatggtggtgcgcagctgtagccccagcttctcatgaggctgaggtggaggattacctgagaccgaaacggaaaggctgcactgagccatgatcatgtgactgcactcagcctgtgtaatggagcaaaagcctgtctcaaaaaaaaaaaaaactaaaaatatcaaaatgatcattcccagattctatttccactatcttacttatagcacttagaatggctcacaatattttctgctctagaaaaacattaactttcccaccgaaaattccatttttcatttttaaaggtatttgtcagtgataaaactccaatttaaaaaccaaactttctgtaatgacatacattaaaacattaatattttatgtcaattcaatgacacttactttgaatcacttgtgtggcgcttttcaaagaccatccatagacttgatatgcttaagcaataaatttacttttaatgttgatatctttatatttatccttcagctataaagagaatatcatgaaattatcaagaattcatcatgatcaaccggtgaagcccctggatcgagcagtcttctggattgagtttgtcatgcgccataaaggagccaagcaccttcgggtcgcagcccacaacctcacctggatccagtaccactctttggatgtgatagcattcctgctggcctgcgtggcaactatgatatttatgatcacaaaatgttgcctgttttgtttccgaaagcttgccaaaacaggaaagaagaagaaaagggattagttatatcaaaagcctgaagtggaatgaccaaaagatgggactcctcctttattccagcatggagggttttaaatggaggatttcctttttcctgcgacaaaacgtcttttcacaacttaccctgttaagtcaaaatttattttccaggaatttaatatgtactttagttggaattattctatgtcaatgatttttaagctatgaaaaataataatataaaaccttatgggcttatattgaaatttattattctaatccaaaagttaccccacacaaaagttactgagcttccttatgtttcacacattgtatttgaacacaaaacattaacaactccactcatagtatcaacattgttttgcaaatactcagaatattttggcttcattttgagcagaatttttgtttttaattttgccaatgaaatcttcaataattaaa

SEQ ID NO: 615 - DNA, 34918 bp, Homo sapiens
aaccgcctccattacatggtccgttcctgacgtgtacaccagcctctcagagaaaactccatccctacactcggtagtctcagaattgcgctgtccacttgtcgtgtggctctgtgtcgacactgtgcgccaccatggccgtgactgcctgtcagggcttggggttcgtggtttcactgattgggattgcgggcatcattgctgccacctgcatggaccagtggagcacccaagacttgtacaacaaccccgtaacagctgttttcaactaccaggggctgtggcgctcctgtgtccgagagagctctggcttcaccgagtgccggggctacttcaccctgctggggctgccaggtaagggccaggtgtctggctggctggagggagagattggaggtggagaggaaactgcaggctctgtctgggcaccacgacagggactgctggggagggaggaactgcgattcgtgtttgacaggggcaacagccacctgcaccagggtggaataggaggacgggaaccttagggagaggaagtttctggagctgtctgagctcctgttcccctaactggatggtgcccaattctcccagaggaacttattttttcaataactcctatgtgagcaatggcatagtctcaatcacccataggaacaggactcaggaggcccagacttcggccactttgttccttcggccccgggattccccctcactgagttggggactgcctatctcctgaacagattccatcttcaggcctccttgtgcctgaactcagcttccagggacacctaagtaagcaacagcaatagaaatcgggcagaggaaaaaggcagagaaaaagaactaggtggctgtgtttccctgggacgtcagatgggcccctgcactggggctccaggttcccgatctccagaaaatattggtgacaaggaaccagactcagggcgctctctgcacaggggattctgctgtggcaaatgggcgctgccatgcagggaaaggtattgcaggctgccgtgcccccttctagggattggcatattcaatacacaaggattgtgtttatttgcttagtagattggtcattttaactagaagaaaaattcaagtcacaagagtagagaatgttaaaaatgtctttcactcagataagagagtaagacaatgaataaatttgtcgtttttatttttgcttgtttctttcataaatacatattgaagtcttgagaggggcattgatctaaggggggcaatgtaaacaggatcagaaatggaaaatatggggctttctcctccaggaatttgccatttgactgcagggtcaagacttagacacacaaaaaaggtaacaacagaagacttgaatcatacggtgatttattcttttatacattcaacacttatttacggagagcttcctataaccttgggaatctgtgggcctaccattcccaaaaatataaaagagtgcaccaggctggatatgacaatatgccaagtgagggagacagagggccagtgtggcaggagaagagggtgaaactgcaagactccatcaaggtagaaaaaccacaagtgtcttgtgaaaaggagttaagatttggagatggcagcaatacagaaaggaaaaacagcatgggcaaagccatgagggtgccaccgcccaagtcttactcaggggcaatgagagaatgaccttggcgggagaagaaggtttatgtggggatgattatggagagcaatgggtgccaggctaaggtgtttggaagccattgagaggttggttgtttggttggttggttggttggttggtttgggattgtggtatttcaaggatattaatctggcaagaagatgctaaagagattgaatcagtaggacagtcaaaggcaaaggcagtagaaccaaagtgagaaggagggactgggtataaacagcggaacgtgagccagatgggtgggtaactggcagctggtcagtgaggtctccctccactaaggaccagaaggaagatgaacctcttccacgttcccatgtcctgctgacccctccttagctcttggtctaaccatttgccactgagattctccctcactgcagatacgaagtgcccaaaacctgcccagtggctaggacctcggtccatgcagttacaggccatagtggggagaatcagcctatggctgacctcatgccacacacagcacctgcagtgatatctgagggcttcattctgcttcacaaagggaaaataacaatgacaaatcatgcactagcacttgagtaggcaactgccttacaatattttgtataatctctacagccaccttgttagtttggtactacaattatcatttttgagacaagaaaactgattctgagtaacttgcccaaggacacttgcagatgtagccagagctaaaaccctgtcctgtccgcacctaagccctggcttgcagccctaatagggagccctaaacacaaagcagaaatctctcctgacccaagtagaaattcccagtgcagaagcaccttcctgtcctcatctcttgcctaagtctgatgctgcaggcccatacagaattctccttgaatggggtcctggactaacaacagctgtcaatatccccccattctttttttttttttttcgcatttttagtagagacagggtttcactgtgttagccaggatggtctcgatctcctgacctcatgatccgcctgccttggcctcccaaagtgctgggattacaggtgtgagccaccgcgcccggcaacattcccccattcttatgctggagagatagggagatggaggctcagaggagcaaggtgattcgcccaggctcaaagatctaaaaacgaaccagattgaatctacctgttatgccttctcttaaaacgtgtgtgcgcatgtgtgtgtgtaaaataaaactctttgactatttaatagatagtttatagaagtatttttcaaagagaatatagattatagaagcccttttaaaagaaaaaattcttgcataccatcaaggttgatctaaagtatacttactttaatgttattttaatatatacaagtataacaatagacttcaattccttatgcatatgtcttatacaagtacaaaaaccacatttgcaaatgtaagatacataaaactaaaaaactaataagcccaaatttaaaatgtaactgagtgtgagagatagtgttcattttcatttggggtgaaacaggacaaagaaacaacctcaaacaagtggattttttttttatttcacctgttttagtgttcaaccttgatattaatgacatagattctctattcacatagaactgttttacaaaataatattaactttaaggtaatcatgcctcacacttagccaccaccctctcagcgaagcattctctgatgtctggggtagtgaggtgtctacgacttggtagttctctgcagtggtcttccttgtttaaggaaagattgtattgtggtgctcctgaaatccagtttgaatggctatcttaacccacttatttctagaattagacggaaaaaaaaagttgtttggtgtgtatttactgccaataattgttgcaatcaggtctgaccaaagacaggcctgtgaaatgcttgcaggtgatgctaatgtactgaccgccagcgtgcaggcatttgagtttggagttcccccaattctgttttctgtttaatctacatgactctgttcattagcagttgaggatgtcatttggctgtcctctggtgcaaatacgatcataaacaccaacataaacataatccataagtagccagccaaaggatctggaacattcttgttttaatttgtttctcatttccattgaaatgaaagtatggaatttttaaatttccattgagaagttaacataccctgaggatggaaacacagacacttaggctcagagggaagaagacagacaaaaccaaatcttccagagaaaccctaggcatagaactggtggtcaccttcctgggcaaagtcatttcactaggcccataaccagtagtcaaccttttctgggctgattgggtttagacaaagtcccttcttggagagatcaaggaacaaaaagcaaaggtctttggtcctttcacacacatggaaataataaggaaataaacaacaacatagaaattgtggcattagaagaaatatttattcattcaacaaacatttattgaacacctactatgtcccagactgtctgcacatagggaatataggtgtcaaagggctcataaatctaggaagacagacatacagtaaacagtctcaacgtcagccctattgacattgtgggccatataattcttttctgtgggagcctctcctgtatactgtagaacatttaaaggcatctctggcctctacccaccagacaagagtagcatcaatacccacccacaccagttatggcaaccaaaagtggctccttccattgccaaatgtcctctaaggggcaaatcatccctggttaagaaccacagcaataaattttagtaagtgtcatgtctggtacagggtgcagaccatgaagaaagggaaggcttccaaaaggaatgacagctgcactgagttaataacaacagatatgaattacccaagaagataaagaggcaaagggttttccagaaagagagaccatcatcttggaaaatcacagtggcacgagagaatgtactatgttaagaaaattaaaaggacttagttctgcttatatgtgatatgggctagggcaggtggagtgcacagtacaatgagatacgttaaacgcttaagaataatatgcttaaatatttggcaaaatcaaaatgaaagaagttttactaacaaattgtttaaagatttcgtggaaatatataatacaggcttctagatggggctattattaaaatgtaaatttgtccctaattaatgtgtaatgataataataatagaatttattaagaccttgctatgtgccaggcattgttttgagaaattaacatatgcctgctctgatttagttggagagacaggaataataaaaaaattttttaaagaaattaatatatgcctgtattaatatacataacttatataattataaaagtttaggcccggcacggtgactcacacctataatcccagcactttgggaggccaaggcaggggaatcatttgaagtcaggagttcgagaccagcctgaccaacatggtgaaaccctgtctctactaaaaatacaaaaaaattagccaggtgtggtggtgcacgcctgtagtcccagctactcaggaggctgaggcaagagaatcacttgaaccctggaggtggaggttgcagtgggccaagattgcaccactgcaacacagtgagactccatctcaaaaaaaaaattttagataaattacctatacatattttaatctttgcaactaccctatgaagtaagtagtagtattatctccattttataggtgaggaaacaggcacaaagaggttaaaatatttgcctaatggcactgtggtagtaaatggcaggatgaagattcagaccatacaggcgttcttcagagcctcagctcttctcctttacaagaattcttatcaaaataccggcaagagtttccccatgggaacttgacaaagtgtctaggtataagaagaagcagacaaaaaaaacgaaagtttttttttttaagtataataaagtgatgggctaacgctgccagatattcaaccaaattttaaagctttgaaagttaaaagtatgctttggcataaggatggacaaacagattaatggaataaaatctaaaatcagaaagacatatatgtgagttgaatacaagatagaggaggttttacaaagcaatgaagaaaaaggaagtttatttagttaatgttgcagaagtcattgactagctttttttgaaggaaaaagtaattacagtataactaacaaatataccaaaataaatcctagattaattaaatatttaaaaatataagataattttaaatattttaaaattataaaataattctagaataactatctcctaaatggaaattattctctaagcatagaaatagtggaagaaaacacaaagaaaaagtaaatttatttgactacatcattcaacaaatatttattgagcatactttatgtaccaggcaccaggaagcacataaaataaaatacattatatgtttttttctaaatcatgtatggaatttaaaagcaaataatcaatgggaaaagatgtttttagtaattacagcaatgtattaaaatccttaataaatacatagctcagataaactgatagaaaaagtgctaaaattctagtaaatcaatgaggaaggaatacaaactgacaattcaagaaaagaacaaaaatcaaatgcttcatacaaacttgttgggttttttgttttttttcttttctatttttgatgatgaatattttttattattattatactttaagttctgggatacatgtgcagaacgtgcaggtttgttacataggtatacatgtgccatagtggtttgctgcacccattaaccatctacattaggtatttctcctaatgctatccctccccgtgccacccacccccctaacaggcccaggtgtgtgatgttcccctccctgtgcccatatgttctcattgttcaactcccacttacgagtgagaacatgaggtgtttggttttctgctcctgtgttagtttgctgagaatggttgtttctagcttcatccatgtccctgcaaaggacatgaactcatattcgtttttttcaaaaaggctcaaactcagtaattaaagagatgcaagttaaaacaagtaatcatatacatatataacttaccaaattcacaatgtagactaggatgtaaagagataagaactttcaaacactgctgttaggataaaattcatagaaagcaatatggttgtgtataaaaaaagattttttaaaacttcacagtttttgacaacttaatttcactcctaggaatctatcctaaaagagtcatcagaaatgctgacaaagagttatatgtaagatgttcatcataacattgccttttattcaaaaaaatgggggaaggtacaatctaactatataaaaataagtgaataatagcacttctatataatgaaatactaacacactcatattaaatgatgtttacaagagctttggtgaaactaatacaattaagtgaaaagagcaaaacatcaaactatattatcctttaattatgtaaaaaaatacatacagataattgataagaaggaagtatgccaaatattttgtctagggcttaaaattgtgagcaatttgttcaaattctctccaaattttctattatgaacaccaaaaggtgaaattaaaaattagggatatatgtggtaatatttttgaagaaaaaattaatagatgtgtcaattatttttctcactagtatattcattttatttcttcctaattcctagctataatattttctattgttatttatgccaccatttttgcctaattaccatagacagtgttataaaaagtggtggaaatgttttctccaatggcagtaaaataatataagctcttggaaacttacaacctgaaatgacactgccagggccgtatttaaacctgaatgcagggatgatttcccctaggaagtcagcaaaaattcagctccattttaaaggtgattaaacaaagtttaccaaccccattattgttaaacagaatcagacctggacttatctggtagagatacattgatatgtttcaataaagcctattgccataaatgagaaagtcatattttcctctgcagacccccattcattttttggcagatacggctaaaatagtagtctgctcagagcccagaaaacttaccaggaagtgaaaaatcctatcttccaggtgttttaaaacacatcagtatttatttcacacagaagaagtgtgtagatttacaatttcactcctctcattcagtattctgcctaggtagagatagtcttagtttatcctttaaaattaactttttctattttcaaaaaagtgtcactgtcaccatttcagccaagaaagaaaatttaattccttattatctgaataacatttttccctattttgaaactctgcatgaaaacatttgcatagggaaactggggggggaattgccatagatgaaaaatagataactttaatcaacaatttttttatttttccatcttcaatctatgtttttggtggtattctaacacatgtatatgtattgtcgggggaaggttagacaaatgtcataaattgaacatctgaaaatcaaaccaatagagctttttaagaataaaaggatacaatttgacctagcaatcccattactgggtatatacccaaaggaatataaaccattctactataaaagcacatgcacacatatgtttattgcagcacgatttataatagcagagatgtggaaccaacccaaatgcccatcaatgatagactggataaaatgtggtacatatacaccatagaatactatgcagccataaaaaggaatgagatcatatcctttgcaggaacatggatgaagctagaagccatcatcctcagcaaactaacacagaaacagaaaactatacaccacatgttctcactcataagtgggagctgaacaatgagaacacatggacacagggaggggaacaacatatactggggcctgtcgggggtcgggggggtgaggggagggaacctagatgatgggtcaataggtgcagcaaaccaccatggcacatgtatacctatgtaacaaacctgcacgttctgcacatgtatcctagaacttaaagtaaaataaattttttaaatgaaataaatttttaaaatgaggattaaaaagcctgcctgttggttgaaataaaagtaagatagactctgtctatggaaacagtggtagaatcattcctgaattattccaacaacagttttcaacctaattggtcaatctatgcccaccagcagaaaccagtgtcacttctaactgttcccttccctccttttagaattggccttgtaacaactcaagggacacactgccatcaacattccttcactgtagatcatgtaactgttgcttaccctcttattttaggctttctggctcatgcttcactagaaacactgatcacagaacctaaagtaaggtgtgcagtgaaggggagtgttgcctccattcaaattagaggtagttcttccctatttgctttctgtgtttgctgggaataatgcagtgggagcagaggctgggtgcacccaagataacaaaatgtccagacacagaggctcgtttcctggagaacctgtaaagacctataaaggttaaagattggagtatgtatgtggggggggagtgtgggggtgtgtgggggtgtgtgtgggtgtgtgtgtatgtttcagggccttgaggtccagattttggagagtgtcattaaaatgtctccggagggctgggcacagtggctcacgcctgcaatcctggcactttgggaggccgaggcaggcagatcatttgaggtcaggagttcgaggccagcctgaccaacatggtgaaaccccatctctactaaaatacaaaaattagctgggtgtggtggcaggcgcctgtaatctcagctagtcaggaggctgaggcaggagaatcgcttgaacccaggaggtggaggttgcagtgagccaagattgcgccactgcactccagcctgggcgacagagtgagactccctctcaaaataaataaataaataaataaaaacaaaatatatctggaagccaggcacagtgagtcacgcctgtaatcccagcactttgggaagccaagataagcagatcacttgagctcaggaattcgagcccagcgtaagcaacatggtgaaaccctgtctctactaaaaacataaaaattagccgggtgtggtggtatgcatgtatagttccaaatactctggaggctgaggcatgagaattgcttgaacccaggaggcagaatttgcagtgaccccgatgacaacactgcactccagtctgggcaacagagcaagactccatctcaaaaaatttttaaaaagtctctggattcagaggccagacatacctggcccccatatccgtcaaccaattctctagcaaaatttagttgtatagacaaaacataacacctgatgtcttcagccaagtctctctactgtgattatacaattcctaatattttgaccaattctagtgaaaacttttctgcaaaatgtagaagatagtgtatgagatctgaaaaggctctggagtgttctagtttagatctcacatgttgtggatgaagaacctgtgacctacaagggcttaggagtttgcccccaacctgcccagcacacgacaagttaggggcagcatcaggagcagatcctaagcctctccgtgaccaggccaaggacttcagcccagctaaccctggtccctcctctggcctttgtgggacctcctgtgtcagccacagagtcctcatgtggttcttgtggcacgagtgaaagcatgacatggaaatcaacggggtccctggcttcctctcatcccagttccaatgcttatggaccaagagcatagatctaggatttggcttcgtgttctcaaaagtggggacaattttgcctgcccctgctgctccatatggaaacagagaaagagcgctggactggaagctgaggtgggagccccacccctgccgtttttagagtatctgtggttccaggcactgggacaagtcccttaacttatctgtacttttcttgactcacccccaaaaaatggggataatagtgcctgccctacccatttctgtaagatcaaaatggaaagatgtaagtgaaaaaagtcgttcatgagttgtgaggagaaaatgtgaaaagtctggtttaagacagagcacggtgggtgcttcccaggggccatcttaagcgaggtcagccaaagtggtctgcagtcacgttccccgtggtggggacacgtcagccttttctccagatggcggcgctctccggaggagccggagctggagggaggccggtctggcccggagcagggagtccttctgctccctggcacggctctgcgctgaacccacccggcctgcggagagcagacaagtgcctcttgggcccgcttctctaacaaatgtaaaaataatgcccttgaaccaggagcgaaactgagctatctaaggaaaacactgtgagcaaatactgagagcctagggaaaccatctgattagaagagctcccctcaggagcgcgttagcttcacaccttcggcagcaggagggcggcagcttctcgcaggcggcagggcgggcggccaggatcatgtccaccaccacatgccaagtggtggcgttcctcctgtccatcctggggctggccggctgcatcgcggccaccgggatggacatgtggagcacccaggacctgtacgacaaccccgtcacctccgtgttccagtacgaagggctctggaggagctgcgtgaggcagagttcaggcttcaccgaatgcaggccctatttcaccatcctgggacttccaggtaggcaccgtgcaccccggggtagagccaggtgaaccaggtgagcagggaagggggcgtttgcgttaagccccactcccacctctgggtgaggaccctggcagctctggctcagaatgaaaggtgtgaataaaaggagaagctggctcgtgtctaatagggcaacagtcatgcaggagaaaatgggagggttaatactcaaggcgaaggaatcgctagtgaggaggcaggcctcaagaagaatgggtctattgtaagggtatgttcatgatacctggaataaactcgtgtttctcaaggagaaaataaattgtgtgcattacttgcatgtggcttgctcctgcctgcacatacatgggagcagggaagcaggatgctgagtattttgttatatctggaaaagtttattgagagctaatttaattttctttccatttcaattaaatttttcaaagttggagtctctgtgggtgccaaaaagaatattgccattaaattataaatatccttttgctgcatttgtattaagaatatcttgtatactgtcctaaaaatcaatgtatatcaaaatataattacagaattataattatattatgtcagaatataaatataattataaatgtgacatcctttcacccctaaagatgaaataaattaaacccctgcttttaatatagataattacttcaaatatgcatcatagcaactttgcattctgaataatatgggagctctatttgtatttttaaaatgcaaacaagaaaataatagctctagctaattagtggctctaaggggtggccaagatgtgagtgtgatggagaaaggagaacaatgtctctgaaacaaataccttttataaacaagtagatggaaataaatttgcaagaaattgtgaagaggctgtagagcccttgaaactgaattgaattgtgaaaagcaattcaactaatccaagttcattttcagaaagaaatagaagatgggtgtcagagtagaagaatttgattatttattccattttttggaagccacttattgcaggaccaacaggatgactgactccggggaaagacctgcttagggaagcaagggaggtagaacctggccaaaagaaagagaaccagactgaggagggattatgctgtagtgggaggggagaggtgagatgcaggaaatgccacacagagtgttgagttgctagttatgtctaattttaactatcatataaagaaaaaatattgtcctcatattcaaaattaaggcatgatgtcttatgacttcatgttcaataacctctccccagggccccactacatattatcaatctcttgctcactgtgtatcacagtctccatacatggggctcctgaatattcccactctcctaaatgggcaaaccccattgcgtccactgtgacttgtcactcctattctgtcaacggatcttatctccatgacaccctctcagaatagctccacctctcccccttgatggaacaagattatcttccctgctttcctgctaaggtcaacctctcctgctaaggtcaacctccccagcagggctctgaaggcctcatgccacctgtctgggatcatgccctgttggtcagcccctctcctccttgcctctttcatctcttctcctcacttatgcatatggcctccttcctggggaaatctgttgatcctgatcattgtcaagttctgtctctctcctgggtcactgacaaaccaaattaaaagactaagtttttccactacctctcacccttaacctttctcagtctggtttctatccttcatctctatagaatgtttgcttttttgaccatagcagaggatgaaggggagtatttcagtcaccaactcctagttctcagttctcatctccttagacatttcaaaacccaaacaacttccacggttccccattcccagcttaactaggtgcacacataacagcctgacaccaagccttcctaacccctcacctaccttccttggcagtctcttactcccccatcctgtttcttctgtcctttcagtataccttggacttggtcctggacatccattgctcctgctcccctgaattcccccctccaccaccccaactgtcctctcacaaatcttcctccaaacctcctcaagcccccaaattgaataaagattccacaagtctctgtaccaaacccagagcattctcatagcattgagcatattcaccccgcgtgacactgctctcaaatctgagaagcatttattgcatacctacaaagagtacacaacacaaaactggccttgtcggcaccgtaaattccagcagaggggacaggcatgtgtgtgaatatcaaagcaaaggcaacacatgtcatggggctttgacacaagtgtttggagcccaggaagaaagtggttattcagtaggaagagtcaggaggggaggaaatcaggacagttttgctaagggagttctgtttgagtctgaactttagcttactaacttggttatttgtacatttgtgtcattcagcttctatgtggtgtttcccttcagctggataagaattatttccccatttcccagaaaagcgcctggtagagtgagtatttagcaaaggattgataaactaagttgaattaaatagtacgaatagttcattttaagtgtttatgcaagccattgaactaaaaacaggttaaggtcttccccaaaaaggacagtaaatcatttttgtactataaattttttgttattatggctccatatatagaaaaggacctggtcctcctcctgcctggaacagattcatttgttcatccaatcatgtatttaacaaatatctcttgcatgcctactgtgttgcagagactagagttcaggaactctattagtcagagtagttaatgtctgctgctgcaacaaacaaacctaaacatctcaatggcttgacacaacaaaagtttacttcctgcccacataaagtccactgtgggaagagcagcctccttgtagctacactcttcaaagttgctggggcaagagaagaaaggcttgaaggaggcacaacagttcttaactgcttcaatctgaaaggaacacatgtcactcacagtgcgttggccacaactagccatatggccccaggagctgggagatgtaggagcacatagctattgggtgagcacctactgtctctaccacagggagcatttgagtagtaacttcctgggctgcaacacatcaaccacactaatttcagttctgccagacagataattccctgaacatcaaatagtcaaaaccaatgagattgcaaaagaagatataccattaatttatatttaaacaaatatgatagaattatatgtgtaaactatcatctgacacaagataatatatagcgtgtaatttcagagctagacattttggtggggatggcctggaatcaggaaagaggaggggtttaaggtaaatttctgcaatgtaaaaattccctaacatttaataacagaggaatgtaaatatggccatgggggtgggggcggaaagcacatttttttcaaaaagtaaggaggaagaaaggaacagtgggtgagggagagagggagggaaggtgagaaggaagaaagtagagaggaagagagggaggaagagaggtgggagaattggtgatgctaggtacttttattccgtgtcaggccagacaaagagctcttagagagagaagccagttgccactcatggaaccctgagatgtttcagacccacgaaaggagaggtccttggctctctgagaaggattttagggaagctggaagaaatgactttcctcaaatcccagctggaggacagcaaatgtgaatgtcagggccagtagccatgcactgagggctcttggaaactgttggtcacaacaccatctattggtaagctctgtcggtggtaagattgtggccagaggactctgatgtgcccgtcttgcatctcctacaaaacccagcatggcacacaacaagcatagggggctgggggagggggaagtcggtgctgctctgtgtcctgtctcccaattgtgctgtgaaaaaccaagctggactgaaccaccatgggaactgggggatagttcccagcagccaccacagaagtataccccagttctgcctatctgagttgagggaagaggatttcaccaaaagccagaaaaaaacacttcttgggattgagtttgcagaaaaggaggtacttgaaatcactgaaaatctgtggccttcaagaagactgtggacttaaaagcagacagtcctcatgcagcaggagtggctacactacaaattggcaccccaaaatacaaatatctatttgatgacttagataaggaatgggcaggagctgggagtggtgacttacccctgtaatcccatcactttgggaggctgaggtgggaggattgcttgaggccaggagttcaagaccagcctgggcaacaaaatgagatcccatctctacagtaacaaaattttttaaaactagctgggcacagtggtgtatgccagtaatcccagctactcaggaggctgtggcaggaaaatcactggagctggagttagaagctgcagtgaactgtgatcatgccactgcactccatcctgggcaacaaagtgaaactccatccatctctaaaaataaaatatttttaaaaaaatatttaaagagtgtaagaatgggcaggaagattaccaggaggaaaaggcttgaaagaaactcaaaagctaaaggcaacaatgcaaggagataaaacagcccgagatgacacctgtggggctcctaaaggagctggaaggagtaacaacgagccaggacctaatgcctaacttctcatcagaaacagctgtgtaaagtattttcttgtgcttaacgaggaaactggggaagagagacctgaagcagaggagctggatgaaatgcctggagggagaaatgtaagtttgcaatgattctcccagagagtttaattttgacctagaacccagaaaagtatcactctttagcagagaagtaagccttaaagtgtttacagaaaggcaaaaagcagatacctataatactttagttaataatcataattatcactgggtacagtggcttgcacctgtaatcctagaaatgcaggaggctgagacagaaggatcatcacttgaacccagaaattcaaagccacggtgatcatgccactgcactccagcgtgggcaacagagcaagatctcacctcaaaatatatacataaataaataattataataatcattgccagttattaaattcttcctaagtgcaatctctgttcttgcaaaatctcacttaacttttcattcgtctgacaaaaatgtatcatcatgtctctttggaacttacagctatagaagaatgtaattcaatgcaacaagttgtattgtataaactacagatagattaatgaggtaaatggtggtggtagcaggactgtatacttgtatattaccagctctgtataactgatacctcaagattcaatctcattgtattctacacagtcaatacagcatgcagtactctgaggacagtgccagaaataaaaataactactatttattgagctgcatattggctcttcagcttaatctttacaaaaatcaggaaaatatgtattagctttaggtttaaaaagttgaaaactgaggctgggggtgagggaaggacatgcccaaggcctcgtggatagaagatggcagaaacaggaagtgaacacaaggcaaagcttctaagtctgcatccttttcccctgcccagaccctgtttctaaaggcaggaatgggctgcctttagaattgaagagcttggtctaggcttgagcacaataagcgcagagggtatatgggggttgacccatttgtaacaatataatcaatgatgtgaaattaggagtatgaattaagtttaaagcatggatgacctgcatcccattcacacatgccttccctggaaacagtagaagggatgagcaaagggccaaaaatgagcagagtggagagggggcaaagatatggcaaactcatgtccctggctccatcatgtccctggcttgacatcacagtcaagtaatgctttttctaaagtgtttgcaaacatttgggctaaatttggtaaagtggtaagccttacagttagagggaagtgagctggaatcaagggcacaatttggccacctacatatctggacctcactttccccatttgtgaaatgcctcacagtaagacatttatatgaaagtgctgggccgggcttggtggctcactcctgtaatcccagcactttgggaggccaaggcgggtgaatcacctaaggtcaggatttcgagaccagcctgaccaatatggtgaaaccctgtctctactaaaaatatgaacaaattagtcaggcatggtggcatgcgcctctagtcccagctactagggaagctgagacaggagaattgcttgaacccaggaggcagaggttgcagtgagctgagatcgcgccactgcactccagcctgggtgatagagtgagactctgtctcaaaaaaaaaaaacaaagaaagaaagtgccctgtgacccatttacaagatctagctcttggtatcactaaatcatcactgctgtgtctacatcactcggggctctcagttaggacatttgttcttctagcctttttttcctccaaactcaaaaacattttatgaattcaaatatccaaagtaaagatcacttaaggttctgtgttctcccttcccatccccatcctacccgtgttctgagcacctcactatatcccagcccctttgcaggcactgagggtcttgatttttttttatatgactatctacattttcccctttctgcttcagtgtgtaaaaacaacagccactggagagttacagagtttcctatcaacctataaatcatatttacagacacaggaatgaagttttaaaccaaaccacatttaaccagagaacagtttcacaaaaccttcacaaaatctaaatcaaaaatccataagggaaaaaaatgagacttctcataagtatcatttttaaaggagcttgtctgtttatttctcgctattggctgaatggtttcactggttgcgaaaccagtttgtctttccccattttctggtagaggaaaccagccctagaaggtgaagtgattataagttagttataaagttggggagtctattggttttcagtcaagctgctttccctctcttcaaaagagaaaaatatttcagcatcagcatgcctcttcaaatatgtagacaaacatctaaatgtttacacgttattgtacatatgaagaagacaccacagggagctgagaatgggcctacacagctcaagagaacctgcaacttaggtaaatgaggctgcttgccctgatttctcaatgagaaaagctaggaaccagaatgcctgctcagcttgtggctgtagtggtccccatttagatggcagaggcagctaccacaaagcatcatgccctaggatggcctagtcagtggtgcagcatcatttcatggtggggagacacatcatcagagttgtagttgcatctcaccttagaggatgtcttagatggttcctgctgctataagaagattatcttaggttgggtaatgtataaacaacagaaatttattctcacagttctggaggctgggaagtccaagatcaaggtgtcagcagattccatctggtaagggttcacgctcttcaaagatagtgccttttgttgtgtccttatatggcagaagggacagaagggcaaaagagacaaacaggctccctcaaggcctttttttttttttttttttgagacggagtctcgctctgtcgcccaggctggagtgcagtggcgggatctcggctcactgcaagctccgcctcccgggttcacgccattctcctgcctcagcctcccaagtagctgggactacaggcgcccgccactacgcccggctaattttttgtatttttagtagagacggggtttcaccgttttagccgggatggtctcgatctcctgacctcgtgatccgcccgcctcggcctcccaaagtgctgggattacaggcgtgagccaccgcacccggccctcaaggccttttataaggcctcaacgtcattcctgagggtacctcctacagacttcacctcgtagtagtattgcattggggattacgtttcaacatataaattttggagggaaacacacattcaaatcatagcagaggtgaagaggaaggtcaatgaggatagaaacccacctatgctgcctctcccatcagctagctccctgctcattgagggtcttctgtccatttttcctgatcttctccactacttagatgctgctagattcaggcctttcttttcttcttttcaaattttcttcccctcttgcccatagcaattcacacacctggctgtttcaaatcctcaaccatattttatcattatgtgagaggattcacatttgtatacagttagtacaagtcaaagctttgtggagttgccaagggatacgttgtttttagggaaggagaggaaactgatatttattgagcctggcttaggtttatgccaagtagcatctgatcctcacagatctatgcaagagatatctttgactacctccagaattgaggacttgttttcactgagcttaaatgacttacctaataacactcacctggtatcacattgttctgtagaattttacaaggtacaaacgacctctgtgtcgattccctggaatctccagagaatctagcctctcccatattattctcaagagcatttcctctggggtctggcctcagactaccatcttctgagctccccgactttgggctcctccattagccctcttatctccagtctaggaccaagctatgcctgaaggtatggctcctcccatccgcctactccaccagggccccagtccaggcctttggctgctggtgaactgctgtcccatcatcctcactcccacttccacttagtgatgccagctcctgagaaccctctttcagtccaactctccactctgagtacctctgctgagcccttcttgaaagctgttgtctcacattattccttgaaattttgctttgaataattaaatgaaaatctctggggatgagaacaaacattagtatttctttaaaagctcccccagaagatgctcaggtgcagcctgtgttgaaaaaaaaccacacctaagggcacctcacctgtcagttcacagctacttggggaattaaggtattttgcaacaggaagggaacactgagttcctatttttctgtttgcttctttcagccctgaatcctgcccacccttcaggtctgataacacttcattgttcattgggaagaatgctgtagtcacacctttggtgcagggaatcaggctttagagcctgttgactcacctgttatcagctgataagcctcttgatcagaatatcaagtaagagacagaatggctaaaagagaaacctacctgctacttgctttgtggcagttttctctgtttacttatcgatagagaagattaggatcccagagggtaggaccatgcaggtgcaggggaaggtgagtttaccaccatgaatctccgtggtcattactagacatagggggtttctggcaatgagcagtggagccaatttcctcccacttactggcacctgctcccatgacagttgccagtgggaccaagactgttgatcgttgtttgtagaattctcttcccagcaaagaagcaaagttaaaatcagaagtttctttaggagaagagaatcagaatcaagtatatggagatcaatgggatagaactagaataggtggacactgtcattcatacttcagacagatatctggtgagaaggctgctagggcctctgctcctcagatattgcaggaggcactttaacaagttctacattatctaactctcctttttcaaaatttctcattgattgccgattcttctggcatgaaaaattgctttatgatacatacacaccttagagtgaatatgctggcagctccactgatgttagctgttgtaggagagggaaatcttcccaaggtgactggagagagttctctcccaggactgctggaggagatgggaatgctgtcatcttgagagttacatttataaataatctaccaggccagcttattccctaagaagatttggagaatgttttcttccacattcttagcatccatttcggaggatgatagtttatggttgagtctccaaatttggaggatacattctgtaagagtatacagatccttgtaccttgatggaagccaggactttacctgtttttccagaataaggtgcctcaaaacaatgtgctgtgatggaaaagtaatgattttgaggcaattttggatttgactcccagctctgcctcctttcccttggtgtgtgtccttaggcaagttacctcacgtgagtctccatttcttcaaccataaaatgggtgataattttattacttacattgtaggggttttttccccatggattacatttttgaatgtctgaaaattccttactagctttcactaaaaagtagcaactgcctatgaaaactagggctggacagaactctgttttgtttacagtttcctctgagccctttgcctacagccctataggcagattccctcagtatctccttcaaagagaaaaaaaaaaagtgttaagcatttctcctgttttttttccattcccaaattttaattttgcctggatgttattaactggtctcactgagggtaggaatgacacctcctttgaatgtaccccacaagccccttctagttaaaacttggcaaggtctccatctgcatttctagctggcttctgacttgctcccttgggtctaggtaacaggaggagcctcattagggttttgtttctcctttttaaaaaattccttcctggaaaactacccaccaggatgctaaaggtggctatctccaagagttggaataacaggttattgtttttcatttcctgtttatggttttctatacatcctgaaatttttatattgaacagttattgcttatataactagggaaaaaaaatcagcaatttcccaaaaaagaaaaattatgccctttacctcttctctgacaccacactgtggaatgcgatgtctttgcagccataagacttggcatgagaggtcccctcacatctgcaaggggcttcagcagcactctggtaatggcttcgaacctggaggggtggaaactctccaaaaacaataagactttaaaggttagcatgtctagacactgatgaaaccatcttccataagttagaaccacttgatttcaagtaacagaaccccaacctgaattagttcaaacaggtagggatttaaaaataataataataacaatggtgctgggatagcacctgaaacctaaggaaggaatgtatgtggaccataggaaaagctggagtcaggagctcaaacactgtcagggctctctacctcactgttgggtttcatctgcttgccattatacagcagctcaccacctgaaggaaaccacggactcccaaggacagcatcttacactttcagcccctggagagagactggcctgatgctctctgtgtccagcacaaacattctgtataagggtctcatctgcccagtttgactcagatgcccatgctggattaatttgccatggtcaagggcaccaggtgtaaagtctgggcctgagagatcaaggtcaatattactactcaaagtagggcctgtgtaccaagctggcccacaaactatgtgttacccacctgaagagttctggtaccgaaatcaagaataaatatttctaaacatttataacaatttgacatgcctgtgacactcaagcaggtgattttgtattttgtcaggatgtcaatttgtgacagattagaaatttaaatttttaagtagtttgaaaagcactgatgtaagacacagcaactccttcagaaatcacggacttaagaggaaaaaaggggatatactggagggataaaacaattggtgtctagcacataagcatctccacacagttttgcagttcagctccaccagaccaaccacactaggggccttgccttctggaacacatgaaggactaatttgtcttccttgttaaattaattatacttgtaatagacatgcttagtgactgtcattcgccactttggcataagctccatgacaacagagaccatgtctgacctgttgttaactactgtcatcccatggccagtcaggagggctcagtaaacaattgttgctatgagtcactgcaatttaaggatgcactagaaacaactttggatatatctggaggtgaaggcactgcagaagagtccctgtagggcctatagctatgactgattcctagaaaggaaactgctgataaactgtagtctagatgaaaggcctaatattgttatattgttttatatacatctgaaacctacagctcaccataatcttagtagttccttctggaaagggacaaaattgagtatccttggtatatcacttagcaaccttgacttcatcatatgcaataaatgaattccgggtttcctaaagtggacacaactatgtgaaacttttagcgcatatggaaacacaagagaagaaaaatatttaggttagaagtcacagctataagctctatcagtaatttgaactcttaccttaggcaaactattttcccctttccaacccccagattatcaagctttaaaaatgaggaagctgaaatagatacaatccaagggcccccccaagttccaaccatccataattctctgattctgaagacatctgagtgcatgtccttcatcagtcagagaattgtaagcaatgtattttgtatttcccacaattccacatcctttgacaatggcaaggttcacagtttatggactttgctgtctctcagaggtttggtgcaggttagttgtggttgctttgttttattaaaccacagcctaatcaagtgtgctgagttggtcttatttgtctgcttgtgtcttgccccttgtcccacagccatgctgcaggcagtgcgagccctgatgatcgtaggcatcgtcctgggtgccattggcctcctggtatccatctttgccctgaaatgcatccgcattggcagcatggaggactctgccaaagccaacatgacactgacctccgggatcatgttcattgtctcaggtaaacacagagcctggagttcccacttctgcgaatgtcaaagcaaaattattctggtagagaaaacatgactcctccctactgctgaatgtggttcagaacttttcatactgagattcatgatctgagtgtggaggtccaattgtgtatcatgagtactaaggtccttcttagctgccactccaaccccaatataagaggttcttagctgggtgcagtggttcacatctataatgtcagcactttgagagtccaagacaggaggatcacttgagtccgggagttcaagaccagcctaggcagcattgtgacaccctatgtcgattaaaagaaaatttttttattaaaaaaaaaaaacttagttagcttttgaatcttaacttaagctgaaaaaaaagaggttctcaaccctaaaagagtcatgtgacttgatccctaaaaggcattttcttggcgaggctttagaaaacgattttaagggaagatactttgacattaccaaagaaccagactgaaaatatttggaatattgagccttggtcccaagatgcatgaaaaatttctttctgtacacacacatatccttccacaattagcgatataaaacattctaagcacctatcacaatatttagcacatagcaagaattcaataatcaatgcttggttatagggatacaatattctgcagcctactcatctaaactcatctaggcataaactgcctcagaaacattgtaatcccttgaaactaactctggagttttctttttctttgcccacaggtctttgtgcaattgctggagtgtctgtgtttgccaacatgctggtgactaacttctggatgtccacagctaacatgtacaccggcatgggtgggatggtgcagactgttcagaccaggtaacctcctaatctaggtctcggcattcaccatgatgaatattgttataagaatctgattaaacacatgcacctaatgtgactgtcagtgcctgaaatagcaaaaattatcagagacaaccatgccatatcataaatcaacaatcacctgtaaattcataaacttcatttcagtgaaatatccttggtgatatgacttgaggctgatctgacatttgcattgaaatacagtgacagttcatagtatttatctaacactcttacataagccccattgtggtggcaatgaaacaggcactattaacccaggcaagtaaatgaacatcaacttacatctacagtccataactggaacctggctaggaacagggaaacgtttgaatagaaattagcaaggtgaagtatgggtgagaaaagtgatgttccttcctggtatagctgcctctttctctcattcattaattcatttattctacaaatgtattgatcacctgctgtaagccaagacatgttcagagtgctggagatacaaagtccccactctcacagggggtacagtctggcagagggagatgaaaccccactacgatttggtgtctgaaggagagtagaacttttaaaagatggaaaagcaataccaacgcccatattcatttagtcactttaaagggatagatctcatagcaagaagctggagcaaattcctgaaaaagaaagatcttgttcttgagaagaaatataaatattagacctcagtgacctgtcatctctggatcatgcacttggcatttttccagccacaccaacatggggtacagacggagagggagggtgtgataaatccattaccctctggctccctggaactccaatccccattcatttttctgctttatttcaagaatgtaaaggaaatgatccccaaaaacttccctgatcctactcatggtctcttagttacaggtgcaacttagaagtaggttgaccaactcattccagtctgcctgggactttcccagttttagcattatgggttccacattctgggaaacccctctatcatgggcaaacaagaatgattgctcaccctacttagaaaagcccacctttcccagagtatttgggtgcctggggtcattgcccttgcccagaggagccatctaccagccactttgcagttagcactaatgcctgccatcactctctcacatcatctccctagcaccagctcctgtcccacaggcaggcagcttcagtcctggaattaagactatagaattctgaaaggcctcctgaacttctccctccatggatgggcagctgtctttccctttcttttgtcttctcattttctccacccagaagtcttacaagacagcccagctgccaagaaagaccttggcagtaaccttgatggagctttggttccagtgccccacttggtcctgggacccccctccttctcctgttccccgactctgttattgccgtgttgtatgtaacagtggcagagcctaagcccctgactagagctgcaaactgcctgccctcacactgtacacagtctgcaaggtgttttgtataaaacatttcattttataatctgaaccaattaccaacttctaaaaattagaagggttaggctgggcgcggtggctcacgcctgtaatcccagcactttgggaggccaaggtgggtggatcacaaggtcaggagttcgagaccagcctggtcaatatggtgaaaccccatctctactgaaaatacaaaattagctgggcgtggtggcaggcgcctgtagtcccagctacttgggagactgaggcaggagaatcacttgaacctggaaggcagaggttgcagtgagccgagatcgcaccactgcactccagcctgggtgacagagcaagactccatctcaaaaaaacaaacaaaaaaaaattagaagggttaagggctggttttctcagaaacagatcctgagaagaggatcccagtgccagagttctttaagaaaagggagatggttagtgggtgaaggaaacagggacgggaaggaagggaagccaagcacgggcgtgatttcaggtgaagccctgaactcagcctgatcctgaggagagctgtgcagtgtgaattatacgccagagttgtctcaactccaaactaaagagctgagctttcatacctcggtgccagtcagtccctgggggcagagtggcttcagtggctaaaccaaagccagaattccagaggcagccacaggggccagcaggtaaaggaaaaggaatacacaagctggagaagagacccacagaaacggttaaagggtagagcaccactagtgcctactacaaggagacttcaccccacacacacatacacatactctgcttttccagctttgtgtaaaaaatcagaagatctggcagcattacactgggccctcattctcatatgacctccatctctgcagctgagaggcagctgcccttttggctaggactcactctgtccagtttaccacaatccccactatgcccaaatagcccaactcatgcttatagggatttttcccatatattacagttgaaaaaatgaaatatgttcttctatctagctcacttcacatttaagtttcttgcctgtcccaggtaagtatttaggtttgctaaccttgacccagagtgtctaagttgaggaaaaggactttgtccctcatgctcagaagatgcattaacaatgagagttttgaaggcaaagtgacctgaatttgaatcctgatgatatcgtgtccttcctgggtcattggagaagttacttaaccttgctgagcctcaatctcttcatctgtaaaatgcaagtgacaaatactatcacagtggctattgggagaattaaacaagatagtggtaaaaaagtgcttatcacaatatcagtaagggcttaataaatggtagcaattgttgttatcatcattagcattaagcaatcactcaaccatccataggggtatcaaggacaggggctctgtctgtgtcagggcccatggaccagagctgtcagcaggaaatcacctagggaccccctaggagaagccccaggaaaagatccgctgttcagctcccagccacactgggtaggatgagggggcagggctcttcatgccaaggcagaagcccttaaaccaaatttctgtctttttcccagtccaaggaaataaaaatagcctacaggtaaatgttctcccagaactttttcaaggactgagctcagtcaactatacttgatcatgaagcttacattgtttactttaatcctgctaaagtgtgtgtgctttcttttttttttttttcttgagacgaagtctcactctgttgcccaggctggagtgcaatggcgcaatctcggctcactgcaacctccgcctcctgggttcaagcaattctcctgcctcaacttcccaagttgctgggattacaggcacctgccaccacacctggctaatttttgtatttttagtagagacggggcttcaccatgctggccaggctggtctcaaactccctacctcaggcaatctgcctgcctcggcctcccaaagtgctgggattataggcgtgagccaccacacccagccaatgtgtgtgcttttaaagcacatctaaagtattgtattttcttaggttgcagaggtttgcacacatattacttgtcttcctattgttggtataacgttcttagcttgtgtcgtagactttaaacatattagtaattcacagagttctacaaacagtccccatgctctttgaggaacacaaagggaaacttccaagagaaggcactccttttccatgctgagctctccttttctgcagaactcatggagccggaaatcaagttatcagctggcattaaaatacgcactgacatcctaatagtttttggtcacttgaagaaggatactgctctccaccatccaaaaatatccatttgggatcacaattatttttttctcaggagattttgttcccaatcctgatctgatgtaattgagtcccattggaggcagcccccctaggcaaagggcaccagctttggagtcagaccaccccaagttagaattctcttgtgagctggaacagaagcaccacgagcacagggtctctgtctaccttgttcgccctgtgtcccagtaccagggcagggctctgcacatagtaggagctcaataaagacttgttgaacaaataagtaaagacatcaataaaagaatgaatagtcacttcaacttagttccttctgaaggtaatagctctacctgcatggagggttgtaaggattatttgagataagttaagatgactactcgttggcccatactgagaactcaaagaactaaaattccttcagaaataataacttgagattgattttttttttcagagtctcgctctgttgcccaggctagagtgcaatggcacaatctcagctcattgcaacctccacctctcaggttcaaggaattctcgtgccttagcctcctgagtagctgggattacaggcgtgcaccaccacacccagctaatttttgtattttcagtagagacagggtttcaccatgttggccaggctgctcttgaactccagacctcagttgaaacttggcctcccaaagtgctaggattacaggcatgaaccactgtacccagtcgagattgattttatatctttcaaatttctcttgccaaaccttcaagacactttcttttgccagtagagaggggagggagatttcttgagatgtgtcacagagataagatttataattttatggttgagtgatgctagaatccccctgctgttttgccccctaactttagtcccaattctactctccagggtacctgatcagttggctgtgacccacaggaatgtgtgttcaggggcatggtcagggatggatgtggaatccaaaagtggggacagaaagaacaggcacagccaggtgcagtgggtggagcctggagagttgagtcaaccatattgacagccaccatctccctacccaggtacacatttggtgcggctctgttcgtgggctgggtcgctggaggcctcacactaattgggggtgtgatgatgtgcatcgcctgccggggcctggcaccagaagaaaccaagtgagtctccctgttccgctgcaaccagacgttttatttgttcagggtctattttaatgtataacttgcagccaaaaaaaaaatcagtctaggtatatggatgaactttatttgacttaaggattatcgaagcttctcttttagggggaacctaaagaacagaatgggaatatttcagcctagactgatttaaatgtgatcctatttgaaagaaaaatccatccttctttgttccttctgagattgttttgtaactccatggttctcaactaggagcaatttcccccccaggggatatctggcaacacgtgaagacatttttaactgttacaattttgggagggtgggggaaagtgatactggcctctggcgggtagaggccagggatgctgctgaacaccctacagtgcacagaactgtgccacagcaaagaagcatctgttccaaaacgtcaacagtgctgctgctgagaaactctgctgtaacttcctaaattgaactggtgtggggacagctggattccagtgtggttctgctactgaccagccctgtgacctccagcaggttgtttgccctctctgtgcctctatcacctcatccatgaaatgagcagcttgaggcaatgggctgaacgtaggtaccctccagctcacaaattctatgatcctttgacgtaacaatgttcccctggacattgtttctggttcagctgtatttttattgattgaaagagggaactcattagttaccgaggatttggggatacctctctccaccatccaaaaatgtccatttggaatcacaattattttattctcaggagattttgttctcggctcagcaaagctctaaaacagtgcaagaacttctgttccactgcagaggcagtaaaaccagtgtaccaaaaactaaggttactaactatcctggtttgccccggactgatgggtttccagggacactggactttcagtgccaagactgagacagtttatggtaaataggaggttggtcctactaacaaagacatctacaatcatggaatgtttatttttctttcagctacaaagccgtttcttatcatgcctcaggccacagtgttgcctacaagcctggaggcttcaaggccagcactggctttgggtccaacaccaaaaacaagaagatatacgatggaggtgcccgcacagaggacgaggtacaatcttatccttccaagcacgactatgtgtaatgctctaagacctctcagcacgggcggaagaaactcccggagagctcacccaaaaaacaaggagatcccatctagatttcttcttgcttttgactcacagctggaagttagaaaagcctcgatttcatctttggagaggccaaatggtcttagcctcagtctctgtctctaaatattccaccataaaacagctgagttatttatgaattagaggctatagctcacattttcaatcctctatttctttttttaaatataactttctactctgatgagagaatgtggttttaatctctctctcacattttgatgatttagacagactccccctcttcctcctagtcaataaacccattgatgatctatttcccagcttatccccaagaaaacttttgaaaggaaagagtagacccaaagatgttattttctgctgtttgaattttgtctccccacccccaacttggctagtaataaacacttactgaagaagaagcaataagagaaagatatttgtaatctctccagcccatgatctcggttttcttacactgtgatcttaaaagttaccaaaccaaagtcattttcagtttgaggcaaccaaacctttctactgctgttgacatcttcttattacagcaacaccattctaggagtttcctgagctctccactggagtcctctttctgtcgcgggtcagaaattgtccctagatgaatgagaaaattattttttttaatttaagtcctaaatatagttaaaataaataatgttttagtaaaatgatacactatctctgtgaaatagcctcacccctacatgtggatagaaggaaatgaaaaaataattgctttgacattgtctatatggtactttgtaaagtcatgcttaagtacaaattccatgaaaagctcactgatcctaattctttccctttgaggtctctatggctctgattgtacatgatagtaagtgtaagccatgtaaaaagtaaataatgtctgggcacagtggctcacgcctgtaatcctagcactttgggaggctgaggaggaaggatcacttgagcccagaagttcgagactagcctgggcaacatggagaagccctgtctctacaaaatacagagagaaaaaatcagccagtcatggtggcctacacctgtagtcccagcattccgggaggctgaggtgggaggatcacttgagcccagggaggttggggctgcagtgagccatgatcacaccactgcactccagccaggtgacatagcgagatcctgtctaaaaaaataaaaaataaataatggaacacagcaagtcctaggaagtaggttaaaactaattctttaaaaaaaaaaaaaagttgagcctgaattaaatgtaatgtttccaagtgacaggtatccacatttgcatggttacaagccactgccagttagcagtagcactttcctggcactgtggtcggttttgttttgttttgctttgtttagagacggggtctcactttccaggctggcctcaaactcctgcactcaagcaattcttctaccctggcctcccaagtagctggaattacaggtgtgcgccatcacaactagctggtggtcagttttgttactctgagagctgttcacttctctgaattcacctagagtggttggaccatcagatgtttgggcaaaactgaaagctctttgcaaccacacaccttccctgagcttacatcactgcccttttgagcagaaagtctaaattccttccaagacagtagaattccatcccagtaccaaagccagataggccccctaggaaactgaggtaagagcagtctctaaaaactacccacagcagcattggtgcaggggaacttggccattaggttattatttgagaggaaagtcctcacatcaatagtacatatgaaagtgacctccaaggggattggtgaatactcataaggatcttcaggctgaacagactatgtctggggaaagaacggattatgccccattaaataacaagttgtgttcaagagtcagagcagtgagctcagaggcccttctcactgagacagcaacatttaaaccaaaccagaggaagtatttgtggaactcactgcctcagtttgggtaaaggatgagcagacaagtcaactaaagaaaaaagaaaagcaaggaggagggttgagcaatctagagcatggagtttgttaagtgctctctggatttgagttgaagagcatccatttgagttgaaggccacagggcacaatgagctctcccttctaccaccagaaagtccctggtcaggtctcaggtagtgcggtgtggctcagctgggtttttaattagcgcattctctatccaacatttaattgtttgaaagcctccatatagttagattgtgctttgtaattttgttgttgttgctctatcttattgtatatgcattgagtattaacctgaatgttttgttacttaaatattaaaaacactgttatcctacagtt

SEQ ID NO: 616 - DNA, 4208 bp, Homo sapiens
gccgagttccagcagtccgcgagctgccgtcggctccgcggggggggcgggccgggcaccccggggcgcggaggagcgctcctcgcttctctccttcccccctgccgcactccgccggaccctcccgccggcccgcgccgctgcactcgccctctcctctcgccccccggcaaactttcggcccctccccgcccctcgcccgttattcgtcgtggctcaagcccggccacgccgccccaagggctcctcccgacctcccggcctgccgctccggccactgcgggatccagaaacatgtcgaccacacttctgtccgccttctacgatgtcgacttcttgtgcaaggtaggccagggagcgggcccggccggcagcagccgttgtagttcttggactttgcctctgtccccaggttctgggggacgcccctcccgccctgcctttcaggtcgggaaagtcccggggtttgcaaaagagtgtccgagcgccctggaggcggggagggcggcaaggagggcgccggtgtcgcggttgagtttctccactgccgaccgcggccacgctgcccggggcttcccggacaggcttcgcgccgcccacctcggcagccggggcggaggatcacgtgtcgaaacccagcgcggcccacggtgggcgtcctcccctctcccgctccgtccagcaagatcttgctggttttgcgcgtgtataggtggagggtggaggccgagtcgggatccgccaagagtgggggaaaaaaaggaaaagaatcaggctgggagttcctctgcggctcgccccgagtctgtcttccccttccgtttttcatcccttccccgctcccctccctttggcagacagagaaatccctggccaacctcaacctgaacaacatgctggacaagaaggcggtggggacgcctgtggccgccgcccccagctcgggcttcgcgccgggattcctccgacggcactcggccagcaacctgcatgcactcgcccaccccgcgcccagccccggcagctgctcgcccaagttcccgggcgccgctaacggcagcagctgcggcagcgcggcggccggcggtccgacctcctacggcacccttaaggagccgtcggggggcggcggcacagccctgctcaacaaggagaacaaattccgggaccgctcgtttagcgagaacggcgatcgcagccagcacctcctgcacctgcagcagcagcagaaggggggcggcggctcccagatcaactccacgcgctacaagaccgagctgtgccggcccttcgaggagagcggcacgtgcaagtacggcgaaaagtgccagttcgcgcatggcttccacgagctgcgcagcctgactcgccatccgaagtacaagaccgagctgtgccgcacctttcataccatcggcttctgcccctatgggccgcgctgccacttcatccacaacgcggacgagcggcggcccgcgccgtcggggggcgcctccggggacctgcgtgcctttggcacgcgcgatgcgttgcacctgggcttcccgcgggagccgcggcccaagttgcaccacagcctcagcttctcgggcttcccgtcgggccaccatcagcccccgggcggcctcgagtcgccgctgctgctcgacagccccacgtcgcgcacgccgccgccgccctcctgctcttcggcctcgtcctgctcctcctccgcctcctcctgttcctcggcctccgcggcctccacgccctcgggcgccccgacatgctgcgcctccgcggcggccgcggctgcggccgctctgctgtacggcaccgggggcgccgaggacctgctggcgccgggggccccgtgcgcggcctgctcgtcggcctcgtgcgccaacaacgccttcgccttcggtccggagctcagcagcctcatcacgccgctcgccatccagacccacaactttgccgccgtggccgccgccgcctactaccgcagtcagcagcagcagcagcagcagggcctggcgccccccgcgcagccgccggcgccgcccagcgcgaccctccccgccggggccgccgcacctccctcgccgcccttcagcttccagctgccgcgccgcctgtccgactcgcccgtgttcgacgcgccccccagccccccggactcgctgtcggaccgcgacagctacctaagcggctccctgagctccggcagcctcagcggctctgagtctcccagcctcgaccctggccgccgcctgccaatcttcagccgcctctccatctccgacgactgaggcaagagggcgccagtgaggaggaagggaaggcggttcagagatgttggaggacacccctcgccatctcgcccttgctgggggcacgggagtggggggggtgacatgggccctaggcagactgcaagcccgaccgagcacttggactcgaactctgtgccgggaggggcccccacccctcctttttcggtttcctcttgtctttttttttttatttttattacgaagtttcattctttttgagcaaaaaagtcgaactttttctgttgaacaaaatattcacaacagggcagttgtgatacgaatagaacaaaaaaaaaaaaaaaacacttaaactttgttaggactccgatgagtttgggacttcaggaaaaatcaacccagcaccagcagctaccaaccaccattccatctcttcacttgaacagcattagttaagtccagatgtgggaacccttctcttggaagaagttcctaattgtgtctcagaccggtgtaaacaaaccagccagccgccaccttgctaaacctataagctttttaaaatccaatatattctgccaagaatatgccttgatagttagccctcagcccataggtgttttttgttttttaacagaattatatatgtctgggggtgaaaaaacccttgcattccaaaggtccatactggttacttggtttcattgccaccacttagtggatgttcagtttagaaccattttgtctgctccctctggaagccttgcgcagagcttactttgtaattgttggagaataactgctgaatttttagctgttttgagttgattcgcaccactgcaccacaactcaatatgaaaactatttaacttatttattatcttgtgaaaagtatacaatgaaaattttgttcatactgtatttatcaagtatgatgaaaagcaatagatatatattcttttattatgttaaattatgattgccattattaatcggcaaaatgtggagtgtatgttcttttcacagtaatatatgccttttgtaacttcacttggttattttattgtaaatgagtacaaaattcttaatttaagagattgtatgtaatatttatttcattaatttctttccttgtttacgtaaattttgaaagattgcatgatttcttgacagaaatcgatcttgatgctgtggaagtagtttgaggaacatcctatgagttttcttagaatgtataaaggttgtagcccatccaacttcaaagaaaaaaatgaccacatactttgcaatcaggctgaaatgtggcatgcttttctaattccaactttataaactagcaaaaaagtgtttgcttattccaccagttctactgtgacatactcgagtataaagacatgtagcaataacggggagtggggggggagtctcacagtgcctttggaagggcccgaacttgccttaaatcttcctcaaccaaataagtattttattagtgcttgagagaatctgaatgtaggatgggttcaactgcacaaaaggaaaagatttttaccactttttttatatagatataaagtgaagcaaccgccttagtgctgaaatatgtagtacatgaatatgccttgtttaattacagaaaattccaaaacttgtactatttttttttccatgtagaaaggcaggaatgtctcctaagctttcctggacagcagatgaatgagcggtagctttagtttgtacgtaggtacagttggagcactatatgtactctctggactactttggacagaagtaggtttttgaatgtaacaagataagtcaacttgagttgtaatatattttggggaatcagctcactacaaattgtgactgtaaacattgtactgtaaatgttttgtagttttcccccaataaaatttttgggaaaaaaaggta

SEQ ID NO: 617 - DNA, 1205 bp, Homo sapiens
tatataaggcctctcccataccagccctaagcctctactgggaaccaccttctgtaggacagtcaccaggccagatccagaagcctctctaggctccagctttctctgtggaagatgacagcaattatagcaggaccctgccaggctgtcgaaaagattccgcaataaaactttgccagtgggaagtacctagtgaaacggcctaagatgccacttcttctcatgtcccaggcttgaggccctgtggtccccatccttgggagaagtcagctccagcaccatgaagggcatcctcgttgctggtatcactgcagtgcttgttgcagctgtagaatctctgagctgcgtgcagtgtaattcatgggaaaaatcctgtgtcaacagcattgcctctgaatgtccctcacatgccaacaccagctgtatcagctcctcagccagctcctctctagagacaccagtcagattataccagaatatgttctgctcagcggagaactgcagtgaggagacacacattacagccttcactgtccacgtgtctgctgaagaacactttcattttgtaagccagtgctgccaaggaaaggaatgcagcaacaccagcgatgccctggaccctcccctgaagaacgtgtccagcaacgcagagtgccctgcttgttatgaatctaatggaacttcctgtcgtgggaagccctggaaatgctatgaagaagaacagtgtgtctttctagttgcagaacttaagaatgacattgagtctaagagtctcgtgctgaaaggctgttccaacgtcagtaacgccacctgtcagttcctgtctggtgaaaacaagactcttggaggagtcatctttcgaaagtttgagtgtgcaaatgtaaacagcttaacccccacgtctgcaccaaccacttcccacaacgtgggctccaaagcttccctctacctcttggcccttgccagcctccttcttcggggactgctgccctgaggtcctggggctgcactttgcccagcaccccatttctgcttctctgaggtccagagcaccccctgcggtgctgacaccctctttccctgctctgccccgtttaactgcccagtaagtgggagtcacaggtctccaggcaatgccgacagctgccttgttcttcattattaaagcactggttcattcactgcccaaaaaaaaaaaaaaaaaa

SEQ ID NO: 618 - DNA, 56614 bp, Homo sapiens
ctgttgtaaactttgcctgtaggaggactgatctcttgatgaaatacagaaaaaccatctcagaaaaaggaaaatgggcaatcgtcatgtaagtactcattgcctttgggaattggttttaattttggttagcatgtggaagaatttaaactataaaatcatgactgatacttgtatactttatcactatggttaccctttaatattggttttagcaacagcataccatgcttttaaaatgcattgaggccgggtgcggtggctcacacctgtactcccagcactttgcaaggccagagtgggcggattacttgaggtcaggagtttgaggtcagcctggccaacatggtgaaacactgtctctactaaaaaaattaaaaaaaaaaaaaaagttagctaggtgtggtggaacatgcctgtagtcccagctactcaggaggctgaggcaggagaatcatttgaacctgggaggcggaggttgcaataagccgagattgcaccactgcactccagcctggactacaagagtgaaactccgtcccaaaaaaaaaaaaaaaaaagcactggggatatattattcccttattggccaaaaatctcttaagaggggctaaagagaaagaagtatgtaaaataaggcagtaaatagtgccttgcagagagcaaatggttaatatgtatctgtagaatgtataactaaagctgttagtttgtagcaaatttgtataaaacttcataaactaagcccattcagagttatgtgggaaagataggttcatgttgcaaatattaatagaccaaggtaaatactcatgtaagtccacacaacttggattgcaaggtgaaaatattccattattatttctaaacatccacatatttgcaaatatccatggaatggacttaataatttacatttcttttgaaatgtttaggctcctgaatagtgtgtctataaatagttaatgactaaaaactgactaaaacactaccttttggaaccaactacacacaggacagatcagagttgaatcttgaatattttttacattgaagtatatctaaagctattccaatacaaatcttaataaggttttgtgtacctgctgtaaatttccacagcaagaatgatatatttcatgcacactatgagcagagaataaaactccaaaactttctgtaaactgttactttgtctataaggtttttccttcgctatatattcaagctgcactcagatgtttacaaacttacaaatatattcttaggaaaggcattgtttttcaaatcatctacaaatagcattttcataccagcagagattatgagccatccgttcagtgtatctttcagagaaactgaagcctatttttcaaatatttctgatagatgcagaggaccccaggaataatcaatggaccctgcattcacagcttaggaggataattttgtcttttgaaagtcaacctagggagcagctggcctttaggagtggaccagcatttttatgtatttttttttaatcctcagagccagtcgtacaccctctcagaaggcagtcaacagttgcctaaaggggactcccaaccctcgacagtcgtgcagcctctcagccacccatcacggaatggagagccagaggccccacagcctgtaagcactttattttccccccaaatcataggtatgacccctgctctgtcatggggccaatatgagcccccagtgatctgtcatgttggaccctccaccagccaccagccatcatcaggtgtgacttccaagcagggaaatctttccctgcaaaaagtttgttactgtatttacaggtaatgtaaaaatgaactcttctaggggcttagtttctgttcccaacagtgtctcattaacaactccttgaaatcaagcacatgaggctacaccaggaccactatgacatttcagaaaatagtaaaggaactcaacatgtgcacaaagaatgaatacatgtaaaaaagtaaatacaaaatctttttaaagaacaaaaaactatcccagtaatggcttaacttatttgcattagaaagttacttgaatatgtacaaacaaaactagaatgctggtggttttgaaacagctacacaaccaaaacaaatatataaattaaatgataatgttataagtcaatgctgtttaaatgtatgtcatcaacatagtgtaatagacaatgttattttgttgagattcaatagctgtgctcaacatgaaatggtcccaatggctataatgctgggtttgtttttttttttttttttgagttttacttggtttttgttttggtttggtttgttttctgaatctcagcaaatctaaaatatgatgtggtatgtgacttctgagttcttttatcatatttctctattgaacctactgagacacttttgtttgtaagcctccttgtaatgccgtgggaccttctctcggcttacacacatggtgtttctattaaatctccctctgttcactcttctttcatcattagcctgcaattattgaagtatggctgtttggcatataaacaatcgtaaatacaaacacaaatgcagacatttaaatcatgagccaggacttggtcatcttgatgatctaggatgctttatattaatttttaagttattatcagcatgaaatgcaaaagactcctagaaaagtttttattcccccaagaatatgtccacagaccagggcccatagataattgacaactattattgcagagccagtagaatattggccaggaaattgcatttttcaaggtactatcatctgaaatcctaaccaatcctgaaacgaaaattacttttgtgctatcctcaattcttttgccactattaatgatttttttgaaccaaagacctagtgtttgtaactaacctatgtggagcagcagtaaccaagatactgggtcattatcatccgccaaatcacacaatgttcaaagaatttccttatcctggaggacatgtccttgtgtccagtgagctttgcaggtagagtgtacacagagagaaagatcagatcagtggaaaaatctgcttaggtttagctagatgactcttctattgtctgggttttcacaagaatcactatctagggaaaaatacagaagtgagatcaatattaagattactttaccacgggagtgtggctataggatatgtgcagaatgacagagggagggagacctagtagagccattgataaatgtggaaataatcacaaactcaaatggactcatgatttctgggaaattacttgcaaggctaatgaacaggcaatagaaaggactacagccctgctactcaaagtatggtccctggatttgtagcagcatccacattgcgtgggcacttgttaggaatgcagatgctcagcccactcagatctattgaatcatagtctgcattttaacagactcttcaagtgattttcaggcacattaaaatcttagaagcactggactatggaacgcgttgtcaaacttgcctgcattgagatcacctgaggagttctaaaagccaccgatgcctgggtcccagccctagagtctgaattaattggtctggtggttgtcctgcgcatcagggtttgtaagtgctccccaggtggctctaatgtgcagcagagtttgagaaacactggactgtagaatatggctaacctttcaagaagagctctgcacactggggacaaaggcagatggtcattgcacatgctcctaactgaaaaccgatttgtaaatgttagaacatctgttcagtggtctgccacgttgtttgtgaacatgccaagtttatgacttgcttgtgccaatatttagccaacataaatattgtctccagtggagaacagtttgggacttgtggcaggtgaacaccaggcaaggtgaacactcagatgaacgtggacaaagaacatctgaaagctgcatgacaagtggggaaatagatccagattcctgagaaaagaagacaggctctggaggcaggtgaaatatggctgagaatttgaaattaaaataagtatggtcttaaccaagggtgtgcattaaactgtgatcccaaatccagaagacccatgatcaagccctagcagaaagcagtctagatcatttcaaaagacttaaataaataaataagatccttatttatttatttatttaagatcatcttaaataaataagattaggaaatattacttttttttgagacagggtcttgctctgttgcccaggctggagtgcagtggcacaattatggctcactgcagcctcaacctccctggttcaagcaatccttttacctcagacctccaagtaggtgggactacaggcatgtgccatcatgcccagctaatttttttaaagacgggtcatcctatgttgcccaggctggtcccaaactcctgggctcaagcgatcctcccacctcagcctcccaaagttctgggattacaggtgtgagccactgcacttgacctcaggaaatctattatcccagaaagttagtccttcagaatgccactgcaaaagtgtaggaggaagtgaaaagggcctttgatgtcaaagcatgacatgcaccaatgcataccttcttcatttaaagacaagtctctgaagggtagctacattttaggtacaattatgcaatcttggccttttggatattttgtctatggtggatgcaaaaaaaaaaaacaaaccagccattgtaaggaggtggtaagaagtcggcagaggacagatacactgatagaaggaagaacatgttaaatgaaacctcaacacaagaattctagagccgcgggagtctggagccacttggtgcaggggagagaatcctgcatgtcccagcagcgtgagcccacctcccagtgctacagccacagcaacaggaaccaaaactaaaactcccagtggtgatggttgtaactggaagtttaaacgagatcttctgaaatgttaatgataataactgacatttataaagtgcttactagactgtgggctgttttgagggtgtgaacagtgaccctggaagtttgagtccttcacgccaccaagcacttcacatgtgttacgtcatttggtcttcacaacaatcctatcagggagatactattattagtccccttttaaatatggggaaagtaaggcaaagagagtttaggtaaattgttcctagttggacagctagtaagaggtcaagcacagatttggatttaggcacaaatttttaacactatgccttgggttcaataaagcttctttttacgccaaatagaagattaacctattgggatttctgaaactgttgaactgaatcatcacctcgtcatctctttagccccttccctgagctttctccatcccctgccccccaagctggattggatgctcttccttaaggcttccatagttctctctgcataactattactccactcccatgtggttttagaaccatctgggttttttgtttttgttttgtgttttgagacaggatctcgctctgtggcaaaggctggagtgcagtgtcacaatcactgctcactgcagcctcagcctctcggggttctcctacctcagcacccccatacccccaagtagctgggaccacaggcgagcatgacaacgcccagctactttttaattttttgtagagatggggggtcttcctatgttgctcaggctggtctagaactccggggctcaagaatcctccaacctcagcctcccaaagtgctgggattgattacaggtgcgagccactgtgcccaacagaaccacctgttttgtatacctgcctcacactggactgatggtttcctgaaggtagaattgtattttgttcacctatatatccccatcaccaacacaatgcctgcagcatggtagatgcttaataaaatttggataaattcatcaatgcattcattgcattttctaaataaatcttaaacaaatcagtgttttgcccagttggagttcaaattcttatatctatttacattcccagaccaattcatgcgcaaggccctggcgtctgtatatttttaaactccccaaatgattctaatgtatccaaagttgagagccacgagtctaacgtcaggtattctagtgcagtagttttcaaatgaggtctcccaggcccgcatcattggtataatccaggatcttgttaggaatgcaaattctggagccccaccccagatctacagaatcaaaaactctggagatgggatccagcaatctgcatctgaacaagccttccacgtgaaactgatatgtgctcaagtttgagaatgacagttgaagcataagcctttcccatgcccaggctggggctgtgcctcagcattgactatggggaactcccaccattcaacctacagagatgcccagatgatggcattgaaacccgggttagcaccacacctgcctcctcaggcttctcacccggaatgcagcccggagaactcccccattctgctcatttccccaccccacccagggttccctctctccctgctgccatgtaagatgtgactttgctcctccttcaccttctgccacaactgtgaagcctccccaaccatgtggaactgtgagtccatgaaacttctttcctttataaattacccagtctggggtaagtctttattagcagcttgaaaatgagctaatacagacagcaataattggatttaggaaatactctaaatccaggatgatttcattttgagatccttaactaattacatctacaaagactctctttccaaataaggtgaattctgcggctgtgagtagacatgagttgggtgagggggtgggggtgatactgttcaacctacgacactaaggaaattagattttatttccttaggccagcagtgattttaaacttcagcacattagagttccttggaaggctttcttaaatggagagttgggtccaacccccagaatgttgattcagtaaatctaaggtggagcccgagagtctgcatttctgagttccctggtgatgttggtactgctggtctaggaactacactttgagaactgctgccttaggcatagggaagcccaagtcagaatcagacaagggagtaacaacttgagtgctgcttttagctagaccatgctggaagctagtggagaagggcttggagagaaacatgactagaggcaagtcaagcacttcggaagcagtggccctggagagaaatgaagaccctctgccaccctccaccctcatcggctaaaatagcaacaatggaactggggagaaggtagatctgagtcaaacgaacataacttgctaagtggatgtgggaggtgagggaaaggaagacgacagagtgactccaggtgtcttgtctagtttgtgtgcacaggtggatggtggcacatcccagggatgtaaggcagtgacagattgaatttggtttggggatctatagagtttgagatatctttgcgaagtatgagttcacagttgtttttgtttgtttgttggacaattagtatgtgtttgatcgaaagtagcacaccacaggactcactttggcttaaataacaaagacatttaattgtcaattctaacaggagctctgaattaagctgattccagtgttggttcagcagttcagtacatcattagggacccaagctatgtctgcctttctgtcagacatactctggatgtattagcaatgtctccccacctaggtgcaagataactgtcatgtgttcaagttaatgatctctcaagatagtcacaagcaagaaggaagcagatagagggaaaaaataccttcttgcttatgtacatctcccctatcagggaggaaaatctttctgcaaagctccaagcagcagacatccctttctatctcactggccagaactggtcaaaagcccaacccaagactggcaaagaggaagaggagagccttgaatcataattcatccctgaggctgaacaaatcatcttctcagttctctctctcttctttctatgtgttggcctctttctctcctactgaaaataagctttttgttttcctcgtatgggaagcaaaaggggctggtgagagggaggcatggccatagatagttcaggcaccaagagaactccatggcctcacatagctccagattagcagcctcaaggaaaatctcttctttctctaagtatctgtaagatgtcagggaagaattccagttggcttgggtcatggacctaccctgtgaataatcatagtaagtaaggttggccttatctttatcatcaccgctttcttataactattatatttattaatatactactgctattactactaccactactgatactaatactactagatggactgaaatagaaggaggatgcaaacttgaaaatcagatagaaagggagaaaataattctctttccaaataatggggacttggatggttgtagtaggaatgaaaaggaagataaaatgttaaagataattttaaagaaataatagactaaaaattaattaattaactaaaagaattaatttttttggatccaatgcataaactcttctaccaagggaaagaataacattcattgttttgatactgattgagacagaaatttgctcaaagcaaatttagctattttaccttgtttccttttcagcaaatcagaacttgtccacatactgttgactgcatcctgctacacagcacatttgatgccatgaaggccccgctcagcccccaatattctcacttttcaattccatctgcccacttatcattgactcttgaggattccagagtacacttgctaccttttttcctgcaagtaatgaatcccatgttcatactctcattgaattggcaaaagacgacctttggcaatataagaaggaaatggatcattcttttctaatgagaaacgtgcttcatttttcataactcctgaaagcatggttcctttcacggttgagaaatatccatcatctccacacaaccactttatcctccaagttctcttttgttgatgcaatacagtggtaattggatatctggaagtttagcactcttcagaggtctccaactccccaaacaatctgtggacaacctcaaagcagacagtcattttccccaggacacaaaatcttgtttccacataatgaatgttattctgcctctactagaaactccaagttctccagcccaacacagcactcaagggcccctaagaatgagtcaacagagagatgtcacttgggcacgttgccctgccggtataggctgggatgttcacaacaatcttgatgcagacaaagaagcaggaggtgacaacaggtttctcactttgaactgatctcagctcacaccttcctcctagttaccttatctcagcactcatctttcagatttgtcatctgggtttctttgcaaaaaaattaaagaatgtaagacatcatggtccatttctattcttcccttttaagttaccacagcaatttgcccttggtgactggaggccttgctttagtcagcacctgtgtgccgtttaccaccagaggcttggccttctccacactttttaaagagacccgttgacagaatcgttacaaccattcagccagggttgtggacccttggcacattcgtccttggcactgctgacatttgggaccaggtaattatttgtgtgtgtgtgggcggggggaggggggctgtctgttctgtgcattactgaaggatgtttagcagaatcctggcctctatcactagatattccagtaatactcccctactcgtgccaactgaaaatgtctccagacattgccaattgtctcctgggagacaaaaatcgctcctggtttattgagaaccaccgcttaaatgggaaaacaaggctccagggcagatgtcctcagaatgtctttatgtcactggatctccaccagaaatcaccattcctgcccttctggcccaggcatgtccctacactgatttcttctcttataacagagaaaagtcagcttctcctgaagattgacccttatcctcctgttgatgacagcagcagccaagaggcagcagtttttctcaaaactgttagcccatgagtaacaacttcttcttttttaaaaattctttatttctgtaggttttgggggaacaggtggtatttggttacatgagtaagttcttcagtggtcatttgtgagattttggtgcacccatcacccgagcagtatacactgaaccctatttgtagttttttattccttaccctctcccaccctttcccccaagtcccaaaaatccattgtatcattcttatgcctttccgtcctcatagcttagctcccacttatgagtgagaacatatgatgtttggttttctgttcctgagttacttcacttagaatagtattctccgatcccatccaggttgctgcaaatgccattaattcattcctttttatggatgagtagtagtctattgtatatatataccacagcttctttatccactcattgattgatgggcatttgggttggttccacacttttacaatcgcaaattgtgctgctattaatatgcatgtgcaagtatctttttcatataatgactccttttcctctaggtagatacccagtagtgagattgctggatcaaatagtagttcttataccagagtgagaagggtttcactgcagaaaccctcagtaaaaaggctgctgggctgctggatttcctgcctagatgagcagtgctcccctggaaagacacaggctggaaccttcaggagctgattggctcacctctcctctgtttgggtgtagcccccaaaagggctaccccacttggactccctataccacagctcagtgcatggcaggatgcccacattgtttacactcctgaggataccatcagtaccttcaggtacaatggtgcccaccagtttaaggcacagcatattgaagggccttcaagtcaggtctcctaactcctacccagccctgcagtcacctttgataagtaaatatcacatcaacacgtgtaacccagatggcatagcctaaggaagcttgtctttctggaaaatgacctaactataccaatcttcattaaaaggtgctgaaatgccaacatggaagcaatcccaaatgtaatagaaaggtcatgttttaatctaaagaactgaactcatttttcagaacatacagtcaacatatgcaagcaaatcatgttgagctgtgatccaaatggatgtttttctagttttagttttagttgttaaatgatacaaatatttctgcccctttagagtgatagccaaacacttagtcatcatgtaagtcactgtaatactgcatcttggaaaggaggtatcaacagcaatgaacaactctgtaacattccagcaccctactaaggtgggcagagctcaagtttcctaacacactttcccaacagctctctgatcaacccccgcagattaataaacttctaatgtgggaagaggttctaggcatgaaggaattggcttgcttttagtcggtgtgagatcctggagaatcctaatgaaaacagcaataactacatgatgaaataccaaatattcgtattcaaactgtgcttaaatatacccaacagggtatactgccaaatatatttttttctgttgggtagttttatgacttaatgaaaccaatatgtcactaatcacccaagattcatgcttcagatgtgaatggcccctctattttgtttcaaattgctcatcaatctctactaaccatgtctgtggaaatgtcaccaggatattttctggctctgaattcatgaatgttaaaagtacaataatttgcattcatactaactggcttcaaagtgcaaatgagtaaccggttagaggtaaaagaacattgttctgagagagataggagatggatgtttccataaggtgaccctgagcaggtgacttaacaaccaggcttcagtttctttatttgtaaatgatgggattggatacattcaatgtctcccaaacttcagatttaagtacaaccttcatgattgttgccaaatatatgggttacctcttctactaattattctattaattatttttaaatacgcactttttaatataaattaatcttaaaaggaaattttatactgataccataaatggaaaattaatgtcagttgacataaatatagataactaaatgaaagcaaaaagaatgtattaaattctaactaaatttgatgttgccagctgaagggtaaggtcctatcctctgactaaaaaaggacctgtttacatggtccacatgggatacagtgggagtccacaaagtaaataatgaggctttgtgggccacagaacctctggtgcaagtaggtaactactctgccattgtagcgtgaaagaagccataggccaaatgtaaatgaatgggttggctgtgttccaataaaactttatttacaaaaataagtaatgggccagatatggtcctcagtctgcagtttgccaacccctggattagacgagtgtgaaagatccactatcactaagcaaagacttaatcagaagagttgggagagaattttaaaaggagttcctttcctagctggaggtccaatggctttaatgctttcagtgttccatgtcacccatttggaaaaacctgggttcaattttcactttaagatttcatgctaaacctcttccctttatctttagcatcttggataaggtcaaggatttctttcttgtgtaaaccttcagcacatttctaagttgtcttcctcctttaccgggatatcaacagcggaagtttctaatttttctcagactaacggttctcaaccctggctgcttgttagaattgtctggggagttttagaaatatttatacctgatatatccctgtacctcagagattctgatttcataggatcagactgggatcccaaatgattttgagtgcaatccgggttgaaaggctactaatctatatcttggcaaggtcactttcctcagagtccattattttctccatttggtattaaattctaagagccccaaactctatttagctcaaactgtttcacacccgaaggtcttaggacttcactttcatttgtgattcctgttatttctccaactgaggtctgattgagccctcccagacaccttggttaaatttactgttcctcttttcattctctctgcttcatcattttggaaagcttgacactattctcagctcaagatttctatccagataagtttcctgttccattcttctgtccctactactgccactgactctgacattaatacaaactgggagcaagaccaggacgcaaagaaaaggcattcagtgtattctgtaacatacaaaggaagaagattcttcctcccatggaaaagaagataacatttaccaagtacctacaatgtgtcaagcattgtgctaggtgctggggatatgagagtgaacatgacataacctagcctccaaaagtcttacagtctagggaaggaaatagactaataaaaaagtatgataatgtatctgttaaaagatctgatagaagactctagagtggagggtagaacaaaagagtcagtggtgtgctagaatatgtctcaccaccagctctccaggagaaaacaaaagcctaatttgtggtgcttgccaatttccgtggtgtaaatactttcactgtgactgatttcaggttaccagcatgatctcgccaagcagagttgggaggagatcacacaatttgttcttgccagcttgcaaagtcagctccagctagcagggccaaccatcctggtttacctggaactgtcccagttttagcacttaaagacccacattccagggaacccctatgtcctgggcaatcaaacagtttagcttcagcacaccactggaagaattcgattcttcccaagaggatcaggaatggtttcagaaaggggaggcttcagcttatttgcttaagtagaaacattctccactgttgccaatggaatcaatggctctgtgctgtcaatctcaagtttctttggtcctccgaggactcaggaagttgcagggaggaatccacttgcagcattccccctttttcctccccctgcctcccactgatgggccccttgggaatcaaacaactcagcaatccatttgcatagattctgtcaagcagggagaagtgatattttacctataaatatatttggcaatttatccagctggaaagcaggcacccatcagaagaaagcatattggaaaccttggccatcccactggcttcgtgtcttttcagtcttcaaaatgtgtctgctaaaattcagccccctcgtacactgtagtcttttagctatgatccctcctctacttgaagggaaagatactttaggaaagggagaactggaagattgggtgtgaaatgaggagggaaggagaaggaagaagcttcctaacagcctttgaagggcagaagggccacttcctcccctgccagccctgagtcatcataatgaaacctccctgtccagcgctgtgacattgtcttatttaatcttcctgagattcttcagggtgggcaggtattagtcccattttacaaatgagaggcagaaaacatgattctattagcatcagaaggaatattgggagcagaatttgacaatagtgcctctcctacatacacactttgctcactgggagatggctgtctgttttgccttgcaaatagcggtgacttcatttttcattttactttctattttctcatcatcgagaatatttattgatcctacagctatgcaaggggttcttggcttctctggtcaccggacaagtctcaggtctcatctagtgtttctgtaaaagactatcattctaagagttgaactgagcttttctttctttctttctttctttctttctttctttctttctttctttctttcttttcttttctttctttttctttctttctttttgagacagggtctcactctgtcacccaggctggagtgtagtagtgcaaccacggctcactgcaacctcaacttcctggcctcaagtgattctcctgcttcagcctcagcctcccaagtagctgggactactggcacacaccaccatgccaagctaaatgtttaaaattttttgtagagacagggtctcattatgttgcccaggctggtcttgaactcctggtctcaagcaatcctcccgccttggcctcccaaagtgctggaattactggcatgagccaccctacctggcccagcttttctattattaaattaaaaataataactattatttagacaataaccccaaaaacccattaatgagaagtcaatagtagagtttctgaatccagactgcatgggtttgaatccctatctcatcatacttgtgtgtcttggtttttctcatctgcaaaataggaggtaataatacctaccccatagggttgttgggagaattaaatgagttgctatttgtaaacggtctggacccatgcccggcacatatgaagtgctctatattttgctgtcattctcaattttgagttttcctcctatacatctctcttagaactttagcccctgctactctttttctatgagtacaaagtgatttctaatttaggacaagcttttgtaaacagtcattttgagcttcctatagtaaacttccaattttaaaggcactacacaaagcaccatgcaaagggctcactcaacactcagcaggaatcaggtcaagatggaagaaaggaataaaaataacactcagcactcaccacgtgttgaatatcctgccaagcgctcttgatacatattctcctaacaacccatacgaggtgggtactattattaccatctttcagatgggaaaacagccttggaaaagatacggaggaaaaaacagcctcgtgcctggttcaaaggtagatgtctgtgagagaggaggcagaacttatgtgacctcaaagaagaaccttccccaaactggactcagtttccttaaatctgtagtattcttaagatctatacaaggcaagtttacaatggaatattattcagcctcaaaaaagaaggaaattctgccatttgtgacaacttgaacaaacctggggaacattatgctaagtgaaataagggagaaaaataaatactgcatgattctacttacatgaggtacctaaaatagtcaaactcatagaagtaaagaatagaactgtacttaccagggaccagagggaggggaaatgaagcactgttcaactggtacaaagttttggttacgcaagatgaattcgttctagagatctggagtacagcaaactgtaccctatactttattacacacttaaaaaattgttaaggtcaattgttaaggtcaagtgcagtggctcatgcctgtaatcctaatacttatggaggccaagactgaaggatcacatgaggcgggaggattgcttgagcccaggagttcaagaccagcctgggcaacatagtgagtccctcttgctacaaaaatttttaaatataaagtattatttgtttaatgggttgatgtcaagttaaatgttcttaactcacacacacacacacacacacacacacacacacacacacacggggacacaggaaacgttcatagctgatgaaatacttattaccttgatggtggtgatgatattatgagtgtatgcctatgtccaaattcaccaaattgtataattaaatatacaatatattttacagcaattatacctcagtaaagatgtttaaaatatttttcaggaattttgaaaaaaaaactatacaaggcaagcttaatcagaatcaccaatattggcgcaaggtgccattaaccaacagtggcaatggtaacagcctaaaccgaggagaatcaggtgtgtctgaggctctctccagcacacccttcacctgcctccattttgctcctgcttaacaagcccaggcaaaactacctggttctaatcttggccctggtatttaatctcatttcatgccagctcaaacagcagttctctgtagatcagtgtacagttagccctctgccctctgctccctggctcttcccgggggcccctcctggctcacagcccagatactaagcaaccattgtcaaatgtttactgagcagagtgcagccagccaaggcttctgaggaactgcactggaaatattaaacagtccaaatgccactcccattgcattttgataatactttcagagtttacaaatgacccttacatcctatgtcacccagcatcccacctcctacgtgccaccacctgagtgcttaccgtaatccagcaccgtgctactacatcccaaacacgaatgcatctacaccgcacaccaccccatgcacaggtgcatctccactttaaagatgagacaactaaggctcagagacgtgaatcagcttgcccaaggtggtacaaccagcaaagggcaaaacagcaattgaacagagtaggtctgactcccaagtccacactatgtggactattatgtcatgattagatgcaatcatgttagcacattgataggtcatagtaagcacgcaagtacacagactcccaaagcatcaggctgtggtctctccctggcatgtctttcttctacctcccctctctcttttatttaattgcttgtctaattcctaccgccctttgagaaccagcacaaatgtcaactcctccttaaaaattcctttctcctctcagctatttgtacccaaaagtgcttactgtatcataatgcaattgtcatgtgtcatttacatgtttatttccctgggaacagggactatgcttcataaatcatggagtcaacttcaactggggtagtgcttaacatacaatagattttcagtacttgtttgttcaaggaagataagggaggaaaaataaggagaagaaagaagaagaaaaagagaaagagaaagagagggaaaaataattcagagtctaatttgcctgtaacatatttcttaattaattcacatgcctctcatgaaacaatctattcttattgtccagccttgaagctattcaagtagaaaatcaggacacaaggactgacaagtatgaatgtacttaagtgagtgtatttctggctgtgttctggaagatgctggttactatataatacttagagcaaccaatttgcaaatcatatccctcagcaaactccttcacacattccatccccagagtttgctgcaacctggaagatgttcctagaatgttccatttctattataagagttaagacttccttgaattggactgggacagaaggcatttgatcaggcgtctgtttttccattctggttcttctggctgagggtatcagaatcttgattcaaaagagctgacctccctcctgggcaatctgctctgttgcagcaggaacatccctgagtcatttctcaacgtaggtgttttctgcattctttctgccaaggtgacaccgcttcctaggatcagagcatctcgtttattttctatgcttcctcctttgagaaaaatggatcattcatgtccttgttttagaggaggaaacacaggaacgtaaatacacagagaaggacatgtagacctactagaaggaagaaaaaaccaaagtggaagtccccccagcaccagtgctgccttgttcatgcaccaggcagtgcctttcatagagctgacagcacttgcttccattttggacctgaggtccaggcatgatggccagcacctcaacagaaaggtatcccagggagagtctcacaccccatgaggtgtgaattttcacactcgtcaaatgagacagttaacaaggtgtgatgttgggacatcatgccaggccacctggactccgcagtgtgactgcccggtgtaaaatatatgtctggaacttcagatccaagctgcaggtgaccaatgagaaattgatctttagagtgccatttacaaggtgaaaactcctcaagcaggaaaggggtttgaaatattctggaaagtttattgctgatttgccttcaacaaatatcaatagtttgcatttacaaagtccatgctgtcagccaggcttgttttagatgcttggcatgaataactttaattcctccaggaaccttacgtggtaggaactattattatccccatttaccatagttagtttctaagtgagatccgaaaaaagtcggtggggtggcgggcagctggaaaaacactcgaggaatcgcagggagtttcaacatggctttactctttctctgggcgcaagcgagcctgggtgcgagtctgggcgtgagccccaagccagaggtacagcgttagcagcgtaattgtaccttttacagacaacagtggctccaagccaagcacgagcgcatctgagtggttacttaatgcgcctcacgtggcgtggttacgtaaggtgtggacttgtgcatctgcactccaaacctgctgagacacgccccgtcagaaagtcgcctcggcctactccctactagagtgcagccatctcccttacaaccatgaagaaagtacagcacagagaggttctctaacttgcccgaagtcacacggctaataagcagttgtgctgggactcaaattcactctgacaataaagccacattcttcaactttactattatattttcagtggccacctattataaatatgatgttgcttgggcattataagataaatatttgacaagtatggaagatatctatccatctgggatcaacatatgtgaattagaaacctatatatctacatatggtacatatgtttgtgtatgtatcttcatatacataccttccaaacctgttaaatctaaatatgtagaattgaaatctgcttggatatcacttttatgaaatcttatcacaaggcaaaaagccaagaaatgacccaaagagacaggggaaggactaacatttatctagctccctgttttctggcatttgaaaagttatttcacgtaaacctcaagccttgcaacacagagactgctcccattttacagatgaggaaatggtagcttagaggttaatggcccaagttcacacagctgctaagaggcagatcctcattcaaaccaggattcctgtgggctcaaagcgcagacctccaaaatcattattattgacgtttaatatcttgtgctgtttttatctgtctcctgagtgtcagtgcaagcactgtcaaaaaataaacaaattgaaagaaaacaaaacaaggaatgttgccctggctctacaatgtctcctagttgaaaacaaatggaatatccgtgtggtctcctaaagcctcacaagcttgtcagaccccatcctggagtaccccgcagcccattctgtatctgacttgcattctcactgtatgcagaagttctgctcagttgcttcaggtttcaaaaactaaatctctggatagggaaacaggcctgaggcccatcgtcagctgtctatcctattaacaatgaacaatggacgtggaatgtccgctccatctacattcccgagaagaagttcggtacccagctcctgggaacaagccataggacacccgttccatcagcactgagcatcgctgatgaatacagccattgtggaggcagcccccaccacaatgaggggacaacgccaaaccgactgtttttctttttcttttaaaatcacatcacatgattctttcacttcgacatcaaatatcctgctgttacaaggaacaagcctgaattatcttctcaagcagattaggaaagataaccaacgtggctaacagtggttcctacagggagtcaggccactgggacctcaacctgccctgctgatggtggcgcctctgatagagagtcctaccccacattatttgttaaggtggctcacgcctgtaatcctagcatgttgggaggccgaggtgggtggatcgcttgagctcaggagtttgagaccagcctgggcaacgggtgagaccccatctctaccaaaaatacaaaaattagccaggcgtggtggcacatgcctgtaatcccagctacttgggtggctgaggcaggagaatcgcttgaacccgggaggcagaggctgcagggaaccgaaactgcaacactacactctaccttgggcaacagagtgagaccctgtctcaaaaaatttttttgaaaaaggaaaaaaggaaaaattaagtcccaatattatcttcattcatagcacatgactcaacactctcctgctgcacctcccagatatcagagttacttgggatcaaatgacacttatttactaggttttttggtcttgggcatgttgagagcattcttttgtctcacccctcagctcctacaactctgtgatatttgtatcatggaatggcctccctaaaacgggaaggggatgaggggcaggcatgtcatttagatctgtcagaatcagaaaatctggttctagccttggctcccactcaaccgctgcctggccaggtgatcttagacaagtctccacacggtctctgcaagccctcacagcttctttgtgcaaatgagaaaaaggtgacccttgaggggaagcagtcctgccagcaccaggcttggcaagcatgcccccagctcagttctgccccagcccctcagccagggcctcaggcagggcataacccacacagccatttgcagagccctgcatctctgtttcagcgcattagttgtcaagtgggacagatcatgtgtcccaaaaaattctctgcactgatgaggctaacaggacatagagaacagctcatgaattagccgagtgataggagatttctgttgccctgattcaattctacctcacttcctgggcactccataatacttcggatgaaaagcaaagaagccattactatttcgaagttgccacttccacacttagaggaccagctccttcagaatttgatcaaaagtagggtggcctttataagtgtgcagcctctgcaactgcatagggccccatgctcagaagggccctgtgcttggcttaatactctgatgttaccatattgaaattcttggtaatttttgaggaaggagccctgcactttcattttgtactaagcccagcaaattatgtagctggtcctgccaacaagcctacaaaagcaccaaatagctttcttacatctcacaaaagatttggataaggaaaacaggaggtatcattctgcaactccagagtcatccgacccctctgttggatgatggaagctctagttatagaatgtgaggcagtattgtgcgctgcacagagcacaggctttaggaggcaaattgagctgggttcagtcctgcatcctgccagacctcaaacaaattatctaacctgcctgaacccaggtttccttacctggaaggcagactagtaatgcccactcttccctatgcataatgaagaaaggtctataaactgcctggcacacagcaggtgtacaacaatgtcagtcccctttctggcttgtttcaggaacagatgctgcgagatggggcatgccctcatgttccaaaaggcagggaggttataggtggccctgatgttcctttcggctctaggagtctatgattctccattaactaaagcctcaagccaactcaccttcagcccacagatgttagccaggacactttggatcgcaaggatggaaacccaactcatattaacttagaccaaggaagtttgctagctaatgaaacggggaagcccaaggacacaggcgctgctgtgtctgaggatttgtacaatgtgattctttctctctctccctttatgtagtggacaaaatgggcactaagagccctagactcacgcactttcactgtagcagactcagcaggaggcagacgtgtatctctctcagtatctatgtatccaccaagggaaagactctaattgactctaatcctgcttggattacatcttcactcctgaaccaatcctgattgccagagtcacaggacacgtgcctacattggtgaccaagggcaggacaaaggggctcaagcctcatgactgacagccccagtgaggccacacaatgggggaaggggaaataaggagaataaggatgccatgcagagaaaggcaacatacccactgagctgcatgtggttgactgttcacttccactgggtgccaaaggatatgaaagcagggagagttgaactgcggtgctactgccagtagcacttaaaccagccttcactgaaggatggaaaatatatggacatgccgggcgccgtggctcacacctgtaatcccagcactttgggaggccaaggcaggcagattgcctgagctcaggagttcaagaccagcctgggaaacatggcaaaaccccatctctactaaaaatacaaaaaattagccaggcatggtggcgtgcacctataatcccagctatggggaggctgaggcatgaaaatcacttgaacccaggaggtggaggttgtagtgagctgagatcgcaccacttcactccagcctggttgacagagagagactgtgtctcaaaaaagaaaagaaaatatatggacacatatcacttaggaaaagctccatgagaaaaggcaaagacaggaaactcagggtgtgttcctagctaccagctgcataactacaattaacctcacaggttaattgcagtttttaatagttatgtgtttatatttatggttaccttccatttatgcaagcaatactgggtttccatttttgtgctcacaaaaatttcctttttaagataactttaagtaaaaacaaatgtcaatttaaaagaaaataataagcaaataataattataagcaaacaataatttccttattatttagacataggtaactgtggatgcaatagtgcatgtattgtgccaatgactgaagtatgggaaacagctcaatacactatataaacaggactttaccttcccaaggagcactaaaaccaaaactgtgcttttactggttcctacagtatctccaacaaaccaaatatgtatctctcattgtatggatggcaaagatccaagtcaccatatgaacctgtaataaggtcctagaaccctcagcctctgacctattccttagacatagctgtgtctcatgacaaagggggagaacaagcactccagtacactggcttacagtattattctttgtttcagaggcagacacacaaaggtggggttgatatgaaaatctctcattgcagagctggccaggatgattgtccttgagaacagaggggcccattctcctggtcatccaaggccagctggccccaaggagtaccagccacctctctggggccagagtctccccagctgatttccgcatgtaccagtgtgtgaagtgacagctggtccctggttaggatgactatttggtcctccagtttgctaccgattttagccagagatcatttaggaatgcgtatattgtcatctcaccttttcaattattttctccaggctaaagcgagcagtcctcagggttttgatgtggatcgagatgccaaaaagctgaacaaagcctgcaaaggaatgggtatgagagatattttgttgctaatttgcttctgaagttgattaaacttggtctcatgtccaacttccccatgatgttaggaagctgacatctcactatcttgtgtattccgagctaacgcaagtcaatcacttccactaacctctttattaaagttcgcaaaattacagtaggatcctattacttttcaggattctatataacagctaggagttggatattgtgacgtttaatttgaacttgaggtgagagaaacttcatgagaagtgcagttcatgcaatcctggtgtattagtctgttctcacactgctaataaagacatacccgaggtggggtaatttataaagaaaaagagtttaatggactcacagttccacatggctgaggaggcctcacaagcatggcagaagacaaaggaagagcagagggacttcttatatggcagcaggaaagagagaatgagaaccaagtgaaaggagtttccccttataaaatcatctgatctcgtgagactcattcactaccgtgagaacggtatgggggaaactgcccctgtgagtcaattatctcccaccaagtccctcccacaacatgtgggaattatgggagctacgattcaagatgagatttgggtgaggacacagccaaaccagccaaacctggtatgatctaaacccctctgatcccttccctaggagatggtggggaattgagtctgatgagagccggattagggacctggaagcagcatgtagaagtagatcggccgggcacagtggctcacgcctgtaatcccaatactttgggaggccgaagcaggcggatcacgaggtcaagagatggaaaccatcctggccaacatggtgaaaccccatctccactaaaaatacaaaaattagctgagggtattggcatgtgccggtaatcctagctactcaggaggctgaagcaggagaatcgcttgaaccagggagtcagaggttgcagtgagccgagattgcgccactacactccagcctgggtgacagagagagactccatctcaaaaaaaaaaaaagaaaaaagaactaaatcaagtgagtaactggccaagatcaaccatcaagggttgaaaatggagaagctgtttacatcctaagggtcagtgcatggccaagagtgggggactctgcaggaagtcaaaacaaaggtagaccagggaccagggtgggatgagggagacagcatctaggtctagggccatgaagagaggccctgggatccaaggaagccactcatgacacaaggtctagtcccagaagcctggaagagggtgacatccaaagcacagatggaaggatttcccttgaacaggacagggagggaaggtactgagactgacagctggagtagatgccttcataggtgttgttggggcagaaattgaaggcatccatgcctggtaacctgacattgctcagtgagtggtaggtgaggttgtctgctaaagagaagggtttgacaatggagtatggggcttgagtggtggcttgaaatagcccttgagtagcagagaagggggagacgaccaacagaagactgctgatacacactaagggccccactgagtagggagatcatggtttctcatggctccagcccacatggttgtgtgattttcccctgtatccttggaggtaggacgggaaaaattgattgactctgggcttgctgatcaggagttccagaacaacaagcaagtgaaatcattgaaggagacagaggggtcaaggggcaaagtggattaatttcctagattttcttttttacatttattgagaaacggttaaactttcaggcattggactaagcactttatatacaaaatctcatcaagttcttacaaaaatccattttccagctgaggaaactgatgacctgacattttaagtaagacagccaaagtcaccaagccagtaagtggggaacactgtgattgaacatattcttgtcactcactccaaatgccaccaatttagagacatcctagctagggcacctcagccacatggctgcagtcctggagggggtggggacagactgagaagacattgctcagtgtcattaacaataggtaggagccatgtcagtccacagaatgttttattaaactaattttttgcttatcgagatataatttgcataccataaaattcacccttttgcagcatgcagttcagagttttagtatattcacaggattttgcgaccatctccacttattccagaacatttcatcaccccagaaagaaacctcacacccattagcagccccttcctcccttcacctccaggcaatcactaatcagctttctgtctccacagatttgcttattctggacatttcacataaatagaatcatatgatatgtggcttcttttacttggcataatgttttacaaaaacaagtgataggttttttacatagaagtggattagtagagatttactttcctagaatgggtgtcatggtagaataaatatggccacaaattttttgtatggctccagaggaataaaacttggatccatggtagaagttccaaggaaacatattttgctttaatataagaaacttggctgggcgcagtggctcacacctgtaatctcagcactttgggaggccaaggcaggtggatcacctgaggtcaggagtttgagaccagcctggccaacatggtgaaaccccgtctctactaaaaatataaaaattggccgggtgtggtggtgcacacccgtagtcccagctactcgggaggctgaggcaggagaatcgcttcaacctgggaggtggagattgcagttgagctgagatggcaccactgcactccagcctgggtgacaaagagagacaccatctcaaatatatacacacatacatatatgaaacttatctagccatagaatggtagccttgcccaagaaatgttgacaagtctgcaggagttgggattgggaagatctggtaggaaagtagtacaagctatggctacatattaaaacccatttatgcctagtgttccattattgggacactaagcatgtgggagttatttatatcctactgctcaaggtcattgccaaggtctgattgcaaaaattcaaaaaactgcaacctcaggcatcaatgcgttaagaattcttgaataaatcagagctagagaatggggggaggaagacagagaaggagggaggaaaagaaagaagatagggagagagaagagaaagagagaagagagagggagggagagagtgaaggagagaaagaagagaaggaggaagagagagaaagaagaaagaagagagaggaagagagggagggagggagagtgaatgtgcaacctgtgttctcatctacaaaatgaggataacaatgtctcctcacatggagagggataaagcaggcaacgcagagcccagcacctcattggccctcgttgcatgtggatcgcctcctttggaacaatgtgctgggatccaaaatctgcacaaagccagtgagatcggtatgagcattgagtaggcgcgcccttgttctccatcactcagggtgaactgggttgaatgggggctccccaaaaatatatccccccagaacccgtgaacatgactgtttggaaaaagcgtctttgcagatataattaagttaaagatcctgagatgtgattatcctggattacctgggtgagccctatatctaatgacaagtgtccttaggagagacagagacacacagagaaggccatgggcagatggagacagagactagagagatatggccagaaacccaagaatgctaagggttcccggcagaagccaggaggggcaaggaacagacactgccccggggctgctggagggactgtgggcctgccgacaccaggatttcagacttccaccctccagagctgtgcaggaatagactgctgttgttttaagctatcaagtttgtggtcattgaatcagcagcctcccctccggaaactgagacagtgaacaagtgggaagcagtgacttgctcaggcaggcaggactgtgcccattcattacttcatctgtcttccttgcactcccatttccaaaggagaaatgagggactgcgcggcccagcagtgctagcagaagagagtgacccttaagcaccagagcgggggctgcagcctcctgggcccagccaggcaggctgggctggcattggagcccaagggaaagctgagcctccaccacagccccgatcactgttctgccacaagggcctgggggcttcccaccctgtctggagcccccttcctgctgaaatgtgactcggtatcttcccagaaaatttctcggaaaagcaaaaccaaggaggcccggaggcacttcctgaggctgattattgccccgtctttgacctctgctgtgaaattacagtgtccagtgtgtggctccttcttttctcatttttaaaaaagcctttcccagaaccactggggactggccctggtgcctcaaaccattgtaagtatttacaggaaatcattcagcggcactgcttatacgatacacatattgtgaaatgtaaagtgaggtcactgttcagtgactgggtagtagaaacaccccccggatcaacctgagacctggactcaaagaacttgggggaaatccagtgttgttttcatagcctcccccgacgtccaggttgttgctgggccgtctcaggactgttttgcaatctggtttctcgcccttttttttcttttttagctttaaaatttcatagatttttattaggttttttattattattattatactttaagttctgggatacatgtgtagaaggttcaggtttgctacataggtatacatatgccatggtggtttgctacacccatcaacccgttatctacattaggtatttctcctaatgctatccctccccttgcccctgaccccctgacaggccctggtgtatgatgttcccctccctgtgtccatgtgttctcattgttcaactctcacttatgagtgagaacatgcagtgtttgcttttctgttcctgtgttagtttgctgagaataatgatttccagcttcatccatgtccctgcaaaggacatgaactcattcttttttatggctgcatagtattccatggtgtatatgtgccacattttctttatccagtctatcattgatgggcatttgggttggtctctttttttttaaagcattcccaaaaagaacatctaaagatcactattattttcaatattaatttcattttcctgattatccagttgtggactccatgtggcatcagagtatggaggatttctattggtccttgctacacagacccatctgaatatcacatacaacttaaaccacttcagagacaaggttctgtcgtgatgacatgcaaacttcctcattcatccattcattcattcattcacccatcaattcattcattcatctgtgcacatgtttaagcatccgttcattcagcaagtcatctgataaatactgacagccttctgtgggaataccatggtgaacaaaatactctgctcccgtggaatttgccatgtgtcctggcagaaacaggaagagcaggcagcatgagagacacagagggcgagatgcctcatctgtccaggagtgtgcagggagctgagacctgaaggagaagtaggagtggaggtgaggattggtgtgttccagatgaggggaacagcccatgcaaagacccagaggcaagaaagaaagtgttgtttgttctaggagctgcaaatcatctacaaagtgggtggaaagtagcctgggagaggacaggtaggaggatgagactttgagaggccaaaaggccccataggcccccctgcagagttgaagcctcattctgcatttgagagggcctatactgaaaggtttgaagcagaggggtgagcaggccaatctgcacttcagaacggttgttctgggggcagtgaatgccaattggaaaaagtgagagcaacagaggaacttgcatgtgggtggtatccatagttctgctgagcgatggggtggagatgaggatggagagaaatgggtgcatctgagaggcactaaggaggtggaatggagaggccttagtctgattgaatgtggggtgagggaaaggggacagccaggcctgagccccagcttcctggctggcccagtacagtgagtgggtctcctgcacgcagaaaggctccttccgggcttggcacctgccaggatccaggcctgagaggccaaggccctcgtctgggacaggagtggcctgaatggaaagaaagaggtaggctcaagagatatttacaagaaaaagaaatcccttttgaagtgagatttctgacactccgaagtttttttttaaaaatcataatagtgtcatagaatgagtaattggattcccacgatggaggcgaagctccgggaggaaatgaaggaggacaacgtgaatcccagtgttgaaaccaagccagcaccaggcaggcaactcactcctgctatttttgcaagtgagatcctcctagaattctgtttctccaattgaaaccaaacagctaaatgttcccagagctgtagaggtgaaaatactctttgaggttaagtgaacggttcaaggacccaaaggtttggaacatggttgtcacatcagacccctgctcaggcctgtctttccaagtcgcctctctgtctttccaaagctgactctgagggctggtgctggagcagaaggagggttaaacagctcacatttttttgccagggctcccttttttttctctaccccatctccagctagtttccctccattcatttcccatccccatggcctagatttttcctactctcaacccttccatcaaaatgcattgcacgatcttgttccttcaggatcctgatggctcagctgggtggcagccatcatctaggtccacacaccaaccagagcaagacagcagtaagtgacactgtaacagcacacactgccatgtagtggccactccctagagcccaggtgtcgggctcagaatgtcactactgcagtcttggataatcactgcagtgatcctagaaacatacatgtaaatagtgtgctgtgccaaaacagaggaagcagaaacttaacaagtgtggctgagattaggtgagtaagccttgggctgctctgtgcagagatggatctagaagagtagcatgacaccaaactgcgggaagtctcgatgccaccataagggattctgatgtaattctaggagtcaagaggaatcactaaaggtatttaaagtatggtgtgaagtgaacacatgcgagcttcccagggtggactgcagagatcagagcctggtatcggggtgaaggctaaaaacacttaggacctgttaggcagtgacagaaggaatgaagaagaggaacaggtaaaagagttgtctcataggtgagacaggcaggacttggtagtatttgagagtaaaaaagactgatgggccctcaaaggtgactttggattttctctaatccgtgtgatgccatgcactgagacaaaggaacaggatgaggagtggatttaaggatagacaaaatgagtttggtttaagctacaatggaagttgaaatgccttgggagatccgtgggaagttgactacaggcagctggaaataagatctgaactcagaggagagattagggctagaggcgctgatcctggagtcatcagtcaaagggcgaaagtcgcctgggaaaggagtgactccaatagagaggagaactgaaaatcgagtttaaaaggccagtggaagaatacaggccaatcaagaaccctgagagggaggtgatggagaggagaaaggaaagactgggaaaggaggtacaaagccatctaggaaggtgtttcacgcaaagaattgtcaaccgcaggccgggtgcggtggctcatgcctgtcatcctagcactttaagaggctgaggcaggtggatcacctgaggccaggagtttgagaccagcctgaccaacatggtgaaaccccatctctactaaaaatacaaaaattagttgggcatggtggtgggtgcctgtaatcccagctactcgggaggctgaggcaggagaattgtttgaacccaggaggtggaggttgcagtgatcatgccactgcgctctagcctgggtgacatagccagaccctgtctcaaaaaaaaaaaataattcccgactgcagaattcaaatgctgcagaacagtcaggtacatgcaggaaccgagaagaggtgctgcattgtgcctcagcttcctcttctgtaaagaagagcttggactagatagtctctaacatttcctccagctccagagattgctgactgctgtgccttgatcccaccgagctcgatcactggggtgagcagttcatggagggtggtccctgtgcacaccctgcatggatgtgaggcagtgccaggcgcgtggtcatttacatcccctggtgtcccgggtttcccacgtgcgtgcttaggaccaccgcggactggacccacacttggattctcgcatttcattctcacaatagccttgtatactattaccctcatcttagaggtgggaaaactgagacttggcaagaaaaatcacttgcccaatgtcatgcagtcggtacagggtggagctgtgatttgagtccaacctgaataaatctaatgtggggtttgatggtaaaaccgtctttcttattcgcacactggaaatacctgtgtcatctttccgatcctggttcctggttcaaacaaggacattctccccttctttcttattcactatagttttcagtactgatcaaattgctgccatgagcttgtattactttgagcatcaggggtaaaaaagcttctaaaaataacataatctaaaggtaataggagttaaaaggggcaacctcccttcatggtttcaatcaagacttctctcctgagattaacaaatgtatgggtggggttaatattgtaacagtttcagcctatatcctaatcttgttcatgcaattgtaagcacccagaggccaaggaacaggccatctttttcctttttgttttttaaaacattttaattgagatataattcatgcaccatataattcacccatttaaagtgttcaattcaacagtttttattatactcacagatgcatgcaaccaccaccacagtcaattttagaacattttcatcacttcaaaaagcagccctggactccagctaccatccccctaggcagcccacccacccccagccactagtatacttccagcctctgtatattctcctgttccggactttcatacgaatggaattatataacatgtgatctgctatgattgacttctttcacttagcataatgttctcaaggttcatccatgttataacatctatcagtaatttattcctttttctggccaaataacattccattgtatggataccccatattttgtttattcatcttcaggtgatgaacactggggctgcttccacgtttgagctattatgagtaatgctgctatgaacattcacatgcaattgttgggtggacatatgttttcatttccctaggaataaaattaaggaaccagccatactcgttcctctttccaccacaatgcctagcactgtgtgccatgtgctgtgaggcctcaatggctatttgtctaagtgaatgaaaagaatacagttttcagcacaaggcatcaaagctaagggtccgttgggttccatagacacctccaaccacctttaagctgtgagtcctggcttcctcaccctggactaaaataaacttccaccttgtttcttattcactgtggctttgtttgtttctcctgtattttagggaccaatgaagcagccatcattgaaatcttatcgggcaggacatcagatgagaggcaacaaatcaagcaaaagtacaaggcaacgtacggcaaggtgattccaggggtggtcagcaagcttgcacccagccatggcctcagccgtctcggcttcctcatgtccccaggccacgcagaatatctttatagctttattgagtcagcccaggaggaaaagtgaaataaccacttaaaagcattaatggagttcagaaaaactgaaattgctttgttaactcaatagcctgtaaaatcaatactcttaaactcatttcttaaattgacttcatttttctatgaagaccctagtctttttttcacttaattgggactaactgtacatatgtagctagatcagtaatttgaaaatcagtttccacaagtgggtctttatacaggaatttttcataagcgattgttacagaaaactaccaaaaaaactctccattttattaagctatcaacacctatttttctttacattttctttcttttctttcattctttttattgttgaaaataattttatagagagaagtcttcaagtatgcattaggctttcttatttctttattaatatgtaatgaacacaacttaaacttttcttaatgtcattagaattatcattatgcaaaatgaatatcaattattatgctgtattctcatttatatttttcaaacttttaccatttcaatcactgtaggtataaatagatatatagaaagatgaagatgggttttcctatttatttgatactgagcaggtaacaattgcttcaggccttggtcttttcatggatagaaagaagatgataacttagctcccttctcaggttgctgggagaatcagtcaggataatgccagcatgtaccaatacaggaaaaagctatgatagctatgattgtttccattttacaaaatcacacacctaaaaaaaaaaaagagaaccaggactcacatccaagtctcacatccaagtctcctgacttcaagaacagtatccattcctggaggacccagtgccataaatagagctatttgcttgtacactaaatggcccaaatggctgtgcttttgtgctttttctgcttctctccttactattaggtgcgtcaatgtaatttttgatgaaaataagtgcatcttcagttcaactgcatttaattgaatgcatgaagctgaatgtgtgtgtggttttttttgttgttgttgttttgttttgttttgagacggagtctcactctgttgcccaggctggagtgtagtggcataatcttggctcactgtaacctctgcctcccgggttcaagcgattctcctgcctcagcctcctgagtagctgggattacaggcacgcgccaccatgcccagctaatttttgtgtttttagtaaaatttttgtattttaattttggtcaggctagtctcaaactcctgacttcgtgatctgcccacatcagcccaaagtgccaggattacaggtgtgagccaccgtgcctggcctgaagctgaatttttatccctgtcaacatccctaactccagtagcctcccaagacacattcaccctaccaatatgaaaagtcagtccaggcaaggtggctcacacctgtaatcccaacactttgggaggccaaggcaggaggatcacttgagcccaggagtttgagaccagttgagaccttcatctctaccaaaaataaaaaattagctgggcatggtggtgtgtgcctgtagtccctgctactcaggaggctgaggctggagggttgcttaagcccaagaagttgaggcctcagtgagccgtagttgcaccactgcactccagcctgggtgacagagagagaccctgtggaaaggaaagaaagaaaagaaaagaaaaagagagaaagggaggtggagaggaagggagagaagggaaggaaggaaagaaaaagaaagaacaaaagaatgaaagagagagagaaagaaagagaggaagaaggaaagaaagaaagaaaaatcggatacaatgcttcttaatctttagtctttagtctaaagaagagtaaatggattcaaactgaaagcctaggggccctgttaaaacttaaatgggcatgttctggcacaaaactttgtgatacttcatttgccaatcatttgcttactttctggttctcagctgtgtttcagagaactgagactgccaaacagataatctagaatcccaacaacgcaaagctagaagatgttaggtatgatccaatctcagccccgtgtcagttgacctccaaagagaataaccaccccgtggtaacagagtcagcaggaaaaccaggagtagagctgagctatcccgagccttctactctgtccagtcagaatgtaagcacacaaggatttgtttttatgcctgtggcttgtaagagtgggaagctgggatttttcttctctgcagcttatataatgcccatctggcctgaaaatatatttccaatttttagatgactccacaccatagagtactgaccacagacctgccttcacaagatgcagtgttggctggagcagccactgtggggcggaggcataatataacagcccccttgtaggactgcagatcccagggctttggacaaaaatattccgggtttttctcccaggccaagagctcagagcttcatttgaaaaatagttgatgtgcctcctcttagaaaatttttttcagcatgggagattaatgataagcatttattgaccgtttaaaatatgtcaggcagtaatgctcagtattgacaaggattgtcacatttaattctcccaaaaaccctgtgaggtcagtctagcactgtctccattttctagagctgaaaactgacagttggtgagattaagtacatttccaaggtcacaaaggtactgtggctgtgttctttgccaccatgccacactgctggggagctgcccaccctatgctatagtttgtgtccttgaaatgccagcttgtctatgggcctccaatctgagccatcccaggctgtcgctctatgtgaaggtctttggtttaagttagggcattaactactctaggtaggctgatgcccatccttgaccatttctcctgttaaaccacattgtcagagggagacagggagaaggtagttagttttcttgtgaaaagagggtgctcaaagaaaagaggaagacaggtgcttgtcagaatagatggcaggctggggtcatggtggctcacgcctataatcccagcactttgagaggctgaggtggaggatcgcttgagcctaggagtttgagattagcctggacaacatggcaaaaccccatctctacacaaaaaaatttaaaaattagccgagcatggcagtgtgtacctgtagtctcagctacttgggaggctgagatgggaggatcatctgagcccaggaggtcgaggctgcagtgagccatgattgcaccactgcactccagcctgggtgacaaagtcaccctgtctcaaacaaagaaaaaaacagatgccagtaagaattccatgtacttccccttctacatacctgcattcttcttcacctgtgtcccttccaggatttagcgagataacggaagtgacggtacaggccgtcgttcttcccatgacaatcctctttattcctgttatcctctgcaattgctaatagtgccccctttcacactgaaaggcatcccaatttggatgacaaattctccagtcctagagataacagccctgtatttcagcccttcctagctgaatatttggggaaaattcttcatcttatcaggttcaacagatcttgaggattttttcagcgatcttgaagactggctgaaaaagctctctgagctctcaaatgttccacagatactgttgttattgtgattcatcggtgaggtctccagccctgagcagggagctcctctctgcctctctgccagccctggggaaacgtggatgggcagctgagagcaggttgcatgttctcagcaggttgcaggttggcagaattcatgtccacagcacctttcttgtcaactatgagcacttgcaatagtgcaagcagacacctgcccctctcctcctgggccattcccagcacgtctctcactgtcttctggtaggagctggaggaagtactcaagagtgagctgagtggaaacttcgagaagacagcgttggcccttctggaccgtcccagcgagtacgccgcccggcagctgcagaaggctatgaagggtctgggcacagatgagtccgtcctcattgaggtcctgtgcacgaggaccaataaggtcagtcccagctgagcccgcaagggagcatcacacacccaatagagatggttgcagccccccagaagggaccctacttcccagcattctatccatggactgagcaggtgtctggggagacatatgtgtgcttggtccatgtgggaggacatctcttccagtcttccagaggtcagtcttggtgttgctgccacttaacagaatcgatcttttcagaagagctgtgtccagcgagcttctgcttttctaaactgatgcttttataagcaggaggcacaattctactttcccccacccagcctgactttgcggctcttctgacatgaaaaatcaacaagcagcccaagcatgcctgtgccactgcctgggctatggcggtcagctagcatagggtacaaaagagactataatgaggaagagaggtgagtggtgctgggggatgccagtgaacaccccagtggctgccagtactaccctgaagggttgtgtgtccttctgtcatcagacagagggatgtcactcggcacatgccacctttgcaggggctgaagagagcatttgttgaggccccatggagaactatttgtctctggctccagaagccaggagaaccaagggactcatcaagtcaagagggtccacaaataattcacaggagagacccctccctcttcagcaaccacacatgacagcagaatggggcagcccagcaaggaaaatgccagaagagcccaacattcttgaggcctctcagcaggaaatagaagcagatgttggagcagacagcaggcaaaatgcaaacagtgccctgacacaaaaatgcctggagaaggcctgggtgctgggccacgttcacgctgctcagcctcttttcctgaagtgccgccagggtccaggctacaggtgcaaaccttttctggagcatccccggacttcttttctccccacaagataataaaaatcctccatttcaaggagtctcaggttgggatgatgcttcggaggagggttagcacaggccccccgggagtgtgagttgaggccaagaggcacacaacttcccccactcagcatccacccttctcagaagcaccaaggtcccagcagggaggcagccaacgccagggcggtcagcacctgcctttgtgaaaaggttaattttaatcatatttttcaggccaggtacagtggttcacgcctgtaatcttagcactttgggagaccaaagcaggaggatcacttgaggtcagacggagtttgagaccagcctggctaacatgatgaaaccccgtctctactaaaaatacaaaaattagccaggtgtggcgccatgcatctgtaatcccagctacttgagaggctgaggcaggaggatcgcttgaacccgggaggcggaggttgcagtgagccaagattgtgccactgcactccagcctgagcgacagagcgagacttcgtctcaaaaaatatattcatatatatttttctaatctcatgtgatcatagctttttctccctcagcctagtttctttaagttcctggcttcaaccaataagcaaggcctctctatcaatcaaatagatctgatgggatgagaagaaaaacctgcagagagtgggtgccaggttcaggcagatcctggttgcgggttggaaggagaaaagggagggagctgcacaaacacaagtgatcagcctcccccagcacctagcctgcccttccctcccacccaggagcagtgaggctccccaccgctttctccccatcaccaccttctcccaatcaccacctactgactttcattttaaccagcttggtggtggggggggtgggggagcaggaagcctgctcttacaagctgctggttcaagtgtaaactgaggcagctcctgaggtgcaccccttggcaccagacattgaaatataaagcagtttctccaagaacacaccctcaagagaaactagcactcctgcacgcagccagtctgttactgaacgaagccttgtttgaaggagagaaaacttggaaacgacctaagcctccatcaataggaggttggctaagtaaaccgtagcttattgtagtatggaatattttgtgtccctttaaaaaactctaggtgactatccatgtacaagcatagctggatctccgggatactattattgagagaaaaactaagtcaaggaatgataggtacagtattccacctgctaaacacatgacacctatacaattctgttttcagtagcacatatatatacaaacgcaaaaaaaaaaatctgtgtatctttctgatacgcactgaacttctaacatgggttacctgagtggggaagagagagtgagaccaggcgaggaggtggtgaaagaaggtgttagcctagctgtaaacttctcacatttaaagaaagagaatgcatgcatttgtcacttgtgtgttagagatgtttgcagaggtgggcggagtggggggggggcgggccgtcacatctccagggactcgctccaggcgtgtgccctggacctatagggatgaccatcttaagaggaagtcttgaaggcactttgtgtccagacatggtctcccgcctcttctctctgtatctcttattgattaatccctccttggaatattgatttttttgtaaattaccttccctaggaaatcatcgccattaaagaggcctaccaaaggcgtaagtgacttttcattctggctttggataaagtatgtttctttcaaaatacctctgggaaactaaatcatctgctttcttccctccttgtttacttccttcgaagtatttgataggagcctcgaatcagatgtcaaaggtgatacaagtggaaacctaaaaaaaatcctggtgtctctgctgcaggtaagaggaaagaggtgtcacctgttttatcatcttaggaaagaatccttggcaacatggcaccatgatgaaaaagggtaacgtagataaacatttctttcttatattaaaaatattatcaagggattatcaacccatgctccatcagcccagctctggtgaaattatattcaattggaattacttccatataaacaatctgcctagtcatttgcagtttacaatcactttttgtaaatgaatcggctcattaagcatcactttgtcattttgccagtgaggaaatgtaggccatgagagggtgggtaacctgcccaggttcatgcagccagtaagagacagcccagaagcaagaaccagactatctgaccccaagcagggccgcttccacaacacaactctacaattacttccaggattcactggatcctgggcctgtaaggactacaacaagaaactcagccaggacatcagggctttcagaattggccctgctgggacacagccccccgagacctctagacagacacatctgtattcttatggacacactcatctttacgagctctgtgcattttctctgttttgtttctcccaatgggatacactgacagcagagaacagaagagagaggcttccactgcagcaggaagagagtttaagttttctcttgctgcataacaaatcgccacaaacttagcacctcagaacaacatagatctatcatctcacagtttccatgggtcaggagtccaagtagtatcttggagatccagctgaataatatttgggttcgctgagtcctttggtcaggttatcaacaggctgaaatcaaggtgtcggccagggctgccatctcatctgaggctcagagtcttcttccaagctcattaattgttggcagaattcatttccttatgtctgtgtttgatgtccccattttcttgctgttgaccagaagctactatcagctcctagagaccgccagcagctcccttccacacagtcccccaaggcagtgcaccacatggctgtttggtttcttccagtccagcagcagctcatctctctgacttcttccatctctgaccttttaagaagagctcattcatctgggtcaggccggccaaggataatctcccttttggtggactcagctgattggagacctgaattatatctgcaaaattcccctttgccattgaatataacacaatcacaggagtggcatctcctcacattcatagctctcacccacactcaagggaaggggattatacaaggatgtggaccattgggtcatcttagaattctgcccaccacaaagggctcaagttagacttccatgaccagctctcagggttttttaggactgggaccttgagtggtgaaatctgatattttgaaacgaagaggggactcattctagggaaaaccagagatcgcactcagtctgctcagaggtcagtggggtgtgtgggtgactctggtttctacaaaaaaaaaaaaaggcaaaaccaagtgttgccacagaagctcctctgtttatccattgtgcccaaaagatggcagcaaagagcaggtgtttcctccttgccaggctgaactgagctgagctgagaaagaattcacctctttctccaggactttgttttttttgttagtttgttttctgtggtcaagcaggaatgcaagttaataacaatgtgtcaatttttctaggctaatcgcaatgaaggagatgacgtggacaaagatctagctggtcaggatgccaaagatctgtatgatgtatgtgtgcagacatgccagtctctgcaaattctttttttaaatttattagcattattttcaacaaatgtttatttcatgcaaagaggagttacttgggaaataagaaacaaagatatgcttagatctttctagatcatatatatagtctccatgaatctaaatgaatggttcctattcttatactctggggttgaccacatcagatctgttttggaacaaagaatggtataaacaatataaataagtatgtgaaatacatttgtgggttagaagctgaaagtgcttagtccatttgacttctattcaatgcatagtttataatttcctgtcagtgaggcctagtcacagcactgcataatcagtcttttcacaaaagcctttttcaaagtgtttgtatttgacccttgaggcaggggaaggccgctggggcactgatgagcttgcgttcaatgaagtcctggccaagaggagctacaagcagttacgagccacctttcaagcctatcaaattgtaagtcataaagtattggggcaaaagagttcactctgaaagtgtcttaagttatttccaaaagaagccaagatctgcaataaggaattggggatcctttacaacagtggttctcaattggaggcgattttcctacctagggaatatttgataatgtctagaattatctggagttgtcacagctgggggtggtggccctggcatctagtgaacagaggcccgggatgccgctaaacagcctgcagtgcacaggacagcccaccaccaagaatcctccagccccagatgcagtacccaggctggaaaccggcttcacaacagacgccagggaagcaagtgtcccattcaggggagaagctctagagtccaagagtccaggtgcaaatcctgggtctaccactggcaagtgaccaaatctctccatcctgtttgtagaacaggaaccgtgaacatcatcttcacaccctcagagtgattttaaggttaaataagataaagactcagaacagttgagctggcatgtggcaagcatactaatgtttgctactattactccagtttacagttggctaacagtgcccaccattctcaagacagatatgaggtacctcaaagatagcctcctgaaaagatgcacataaattatattttaatcccaggataaatttaagcccacaaagcgagttagttatttcaaggcccttagcagtaagtccttccctgaaaagcagtctttacttgcaaaacgcctggagtggaatatcagattttttttttggcatcctattttatatgtgtagagtgcttttacctgctcaaagcacttctatgttctgtgtctcattcagtttcacaacaacagggtaactataatgtaggccgaacaactattgtgacccacaactgctggacaaggaaagtctgttgagtgaggaaccatctgtaacttatcaggaccacacagcaagttggtagcagagagtggatgagaactccaagactccccggcctgagctcctacctcagctgaagctggccactcctcactccaaatagcatttcctatgtgttgccagcagataaaaagacaataaagctttggaattttatcatgactgtatataagcctttagggcctgctcctttcaaatcgtgcccagagtcatgatcaaagacagctgaccctgcactcccctggtctcttgttcctggagctgcgtagcctctgagctggaggacttctctatgactgagatcctcctcccacactacggagcccacagatggagtttctgggtacgtgtgtgtgtgtgtatgaactgactacctgaaagtacactctccaggctaatatctcaaagttgatcctgaaacagcaccatcagcatcacttgagaatttgtttaaattgagaattctcagtccccaccagacctactgaatcagattccccggggctagggcctgaccatctgtgttagagcaggtgttccaggtgattttaatgtatattacagtttaagaagtcagctttaggctacagctgtatgtccttgtgcaagttattaagggttctgtgcctcggtttcccaaacgtaaaatagggataatagtacctacttcatagggttaataaggattaaatgagttaacagaaataagcagttagtccctggcatgcagtaggcgttcaatgaacattagcaattgtcgggcgtctccctgggtgaacagacagtgccaaaaatcagggctaaagcttatatgtacaataaggtaatctatggatttgatgattctttacatgaaaccagctctaaaatgctatctattcatccatttcaaaagccttgctcaagtgtcattcttgatatttattgctgatgtttttagagttcagcctgctcttagaccctggttctatgatttttctgatggcttctgaccaaaagcacagagatgctagtctgagatcactggagtttcttatgtggcatgagtcgtcctggcttagggttgaattttaattttcagcacaaaaactcagggttttgccatttatttatgctctaagcctgagtcttaacttctgacactcccagcaatcccaggccacgcaacagtttcccaaacttctgcatcatgcaggattattacagtccccagcgttaccaaatatgaaagacttatatagctataaaaccaaagtaaagtccccaaacagggctcagcataaacagtaggtatgcatacccatagcccactttgctgccacctcactgcgtgcctcaccctttgcccctcccctgtacatgttccttattccacgccagaggcttcagccctctaactgctatagtcagtgccagagcacagagggctctgctgtcagcgtgccgtccatttggggaaaccgattttcaaagaaagaaatgtctcccctgctcctctaataacctccctgcaggcattgctgcctgtttaactagagtcttagagacttgtttggaatctacccttataatgtgtttttctactgagatcagaaaatctgcttctgtacaaagagcccctaagaatcacgttgcagtaactgaagtgagaagtatccaaagtacagtcccaacagcttgggccagaccattgtttcagattgtgtcccacggagacgcctcagcagctaccaggagtagggtggggcaggaagcagacagggcagtaccttcttgttgcagtgtgtgaatagcgcctcctggagttgtgcaaggaaaaaacctgagcgggcaaaaacatggtatagatgccaatggcaagggaaaggagcccacctcccgcctcccagcacagctctgctttctgctttcatctgttttgtaggctgagattctacagaaaatttaaaatccctgctctagcctggtattaacaatagaaatggaaaacggtttaatgtgaggattttttaaagtaaacaagacctgtgtgaacaaaatgttctcttgaagtatgatctcagtctacagaacaagaaccttgtttctgggaaagggataccaatcccttccaaaataatgactcccacatcaaacccaaaaaagactgggggcagctaaggaagggacagttcccccactcttctaatctggtttctattgccacacaccaaggcctccagatatgcaaacaatgactaggagatcaagcaacagggcttcattaaatctggacacagttcctcccccgacatatattgtgcttacatcacaaagaacattttgtttacctgtgttttcaaaataaaccacataaactccactggtgcatactcaaagtccccaattatttatagaatcaattgtgtcatatcctcaaaagataatttctaagaaagaaatttcagtgtttctaatgcttaattgcatttctccaaacccagcaaagcattctcctttctctttatgtgcctgccctgagcttggcccgggcagtatttgtgttaaggatagtcacaatttactctgaacttcagcttctgtaaatatttagaaagaaacctaatgtgtaatgctgcgcagagcaatatgtgagccagtggtgaatataggattatttggaatcaccccagagtgaagacaagtggcattttgatgtggtcagcacccccggctcccagcccttgcagacccaccctctcaggaactttagatcaagttgttatcatgaacttcaccatgcctacttatttcactcaaactgtgactaagtccctggtcccaagacaagggagaggatggaggtgcatgtcagatgatcataaccacagcctcctgggaaattgaaactggaaagggtgaagaacacatgggaactaaactacacatcaatgttaaaaaaaaaatctatgattatagtatatataatatattaattatatatattataatatatattatatattaattgtttctccactcccaaattttacagatgaggaaattgaggttgagggagtggcactaaggtcaaatccattgggagtcaaatctagactgactcctcagcaacgagagccctctctcgaatgggtggcaaacaccccaatcctacaaggcaagagtcaggatagcagttccctgaagccacaggactaaatctggaaaacttgagtgctttttgtagaggaacaaccccaagagtactaaggtcaaaggcaaacctggaataacagttgattttggttttcgctgcagctcattggcaaagacatagaagaagccattgaagaagaaacatcaggcgacttgcagaaggcctatttaactctcggtaaagtaaagttaggagagctcctgtcttaggttgggctgcctggaaccagactcagacagaggtttgtgtgtaggaagatttgagggaatagcttttgggggtcaacaggtctaagcagcactgagcaagagagagagtgactgtgatgtagttgcaacaggggcgttgctgatcccacaggaagcttggaagctgagatgtccaaggtggagcaagggggccaggcttttgcaccccacatcaaacagtcatgtaacactggctgtaccaggggagcagtgcaactttgggcaagccagctctctcccttggagggagattcctggggagggactcagctgtgaatgactgcctcgatcctgaatagggcatctgagtggcacaccacagcatccattgcagtcctgctgtattagtccgttttcatgctgctgataaagacatagccaagatggggtaatttataaagaaaaagatgcttaatggactcacagttccacgtgcctggggaggcctcacaatcatggctgaagacggaaggcacagcttacatggtggcagacaaggcagaataagacccaagcgaaagaggaaaccccttataaaatcatcaaatctcgtgaaacttattcactaccatgagaaccgtatgaggggaaaccactcccatgattgaattatctcccactgggtccctcccacaacatgtgggaattgtgggagctataattcaagatgagatttgggtggggacacagccacaccatatcacccactaacaccatgggtccctgagggcacctgtcaacaacctagactgttatccagtttcaggcagcctgatagctcacaggtttccttttccatttggttcctttcaatgttttcaaataatgaagtttgtttggaaagagaggtgagggagatcagatcctgattgtgccaaccaaaccccaggacctcctctccaggtgttgcccaaaggcaggaaatagcagagagatgggcatggggctgtgtctgacaggctccttctttctttctgcaagccctggaatgaaggcattgtccattgtccacagtcctgtggtgaggaatccagggcaccaacccaaatggcagaaggaatggagagacctgttctcagaagaggaagaaccaaataagcagccctggaagttaaaaaatgtgctccagttgccaaactcttttgtttggtttctttggggtttttttgaacaatgtcagcaattgatttttttttaatccatccttattttgcattcaatgagcaagacctctgctgtgatatccggaggcctaaaaatccctggcattactcatgacccacactggatatatacacgagccctggtataagtgactgtgcttagggccttaagccatttatgccggaggttgcaattttttgaattgcagacatgtgtgaaaaattcagacctcggcgatgaccttgagcagtaggatataaataactcctacaagcttaacattccaataatggaacactaggcataattaagaagagtcttgagtagataataggatctactcacagcctggttctgaggctgtacgtccttgcttgctatacctgcattgtgagaatcgggaaaacaccagagtgcagtcagaagatggtattaaaactattcaatgatttaacatttactcagcacctgcctgggcccagggtttgtgctgggttgggaataagaggtaaataaggccagttcttgctcttaaggagcctaaagctcatggtggattttaagctggtgggtacaaatcaacagataaggctaaagataaagataaaaaaacaaagagcaaagatggtacagatgacagaaaagccaagtccctggggttgaggaccacacagtccaagagagagctgtactccagtggtagcgaaaaaaagtgattagaaaagaccttgagaataagccacacaaataacagaatacggcttcatgactattttctagacacttcccaccccgctcccacctaacttacagcgatgccagtttatgactaacatctaggagcagggggtgaggtcaaatggctcccaccacatccagcctctggagcagcatttctcaaagtgaggtctatggaccccctaccttggaatcacctgttacaatgcaggttcctgggccccactccaggttcccattgagaacctccaggaagggagcctgggaagccacacttctacaaactgtccaagtgactgtgttatactcactgaagttcaggaactcactctgaaggcaaaggggagcaagatatagagcaccgggctggctgcctttcctgccatttgctgtgaagaggtttttttctttctttctttctttcttttttttttttttaagacacagtttcactctgtcacccaggttagagtgcagtggtgcaatcttggcttactgcaacctctgcctcccgggttcaagtggttctcatgcctcagcttctcaagtaactgggattaccaagcctggctaatttttatgttattagtagagacggagtttcaccatgttggccaggctggtctcgaactcctgacctcaaatgatccacccacctcggcctcccaaagcgctgggattacaggtgtgagccaccatgcctggctgcagtgaataattttattccacatcttctttggctatccctgcccagccttttgagagattcctgctgctgctaacaacagaggttgttccccaagcatagattatagacaggagaaatgttgagagttttcttcctgaaatatcaggtagaaggaatgtcaagggagaagatccctgtgcaggagcggaacacggtgacttcaggcagacaatgatccccacatcaagccgtgctgtatggaagaggattttcaggaaaactttgtggtgctcattagctcaaattgtctggggatcacagtaagtcttgaatatgctactccccagaatagcatgcaagtttcccctgaaccaccaatccagcagcttttgggttgttctcaggagaaagaggccagacattgtttcttttccggtgcgattttcttttccactgaaactgtggcagctgccacatggcctgtaaaaggcggctggtccccaaactagactctccttcccgaactctgctcctctcccctgcttataagcatcaatcacacagacagtcccctagacaacaacagccccattatgggacatagtaagattgcacattccacatttatgctgaaataatcacttactgttaatcactaacatcatcaagtgttctagagaaatgttaacagcctaaagggcaaatattttttttttcctctaacgtgttagccatgatggattcatatgagcctgggaagaggggaaggaatgatttattcccaggagaagagatgcaccctgtcacctgcttgatgaatagagaccacgcttcattaagctgtagatagatcaaagctggaaggcaaggggaagccaggaaagagcaaatagcagcatcgtaggaaagtgatctttaaaaaggatcaaacatttcatcaagtccacatcccggattgcaaaccaaaagatcgtggggaacctggaaaaggttcagagatgaggcttgcaaaacaaccccagtgaggaaaaacaaagagtagggaggttgttgagcataggagagcaggcggctgtccaactggatacattgtcaagatgatgaagttttgttccagaaggttgctggccaatctgtttcccttcagaaccctaggacagcaccagagatttcactcgatagggaaagttatttctgctgggaaataacgagaatcatggacgtggccgggagggcccgaggatgccacagctctcctctagagggtcttcaggggacaggaggggagctatgcttgaagattccaggtgctctgaccagggaatcttccaaatctcatttcgcaacggtgtcaagtcagctcttttcacacctctgtctcaccatccagtcagctcgaagggcagccaggtgacatttaggggggtcccaaggtcattccacaaaacgtgaaagcctcacattctcttttcctttgtcctgcccagtgagatgtgcccaggattgtgaggactattttgctgaacgtctgtacaagtcgatgaagggtgcggggaccgatgaggagacgttgattcgcatagtcgtgaccagggccgaggtaagacacactccgactccaaagaggcggctgcaacttctcttttttccaccactgatgtcatcaacaaatagtttctattaagggcctatttacagaaaaagtaaaacagagacggccccttgccttcccagaatttgcagaagacattgtgctctgcttcaatctgtttctttttataaaaatacaataatgatcgttgcttctttttttgtcctctgtggctctggagagctagtggaggggcgcagaggcaaccatgtcgagcagttctcaggggctgcagctatgcatggctccatgttaaggaagacaaaacaaacacacttgaaagaggtcaaccagcagcaggaacaaaaagagaatgatttctgaattcctgagtgaggcctttccttaactgaacacactgcagaagcaagcacatcagcataaggcaatggttctcaatctttttaaaaactattgctgttctaaggaacctttttagacacgtgtttcttcattgccatcccttccccacaagaaatgttaacaccagagataatactacaaatctgtttatataccatgtggatatcagtgctttatacataaaaaaattaagggctttttcaccccctaaaaaccaatttgtgcttgctctcggagaatgtgtatgtataagaaagaaaagggagaggaagagccaacggcttgggagcagccgtcaagatcacagctggtcgggtgcaatggctcatgcctgtaatcccagcactttgggaggccgaggtgggtggatcgcctgaggtcaggagttcgagaccggcctggccaacatggtgaaaccccgtcactactaaaaatacaaaaattagctgggcatggtggcacacacttgtagtcccagctactcaggaggctgaggcatgagaattgcttgaacccagaaggtggaggttgcagtgagccaagatggtgccactacactccagtctgagtaacagagcgagactcggtctcaaaaaaaaaaaaaaaaaaaaggtcacagctaacagttcgggatatggggccacagacagaaggtggtacaaaataaaggggaagtggcatttcatcggcagcaggagaagccttggggaatgaagtggaactaagcacttgaaaaccacagacatcttccctcaaaaaaaaaaaaaaaaagtggttaaatgaagggggaggtgaagggggagggacaccaacccaaattctgatccatggcttcttaacaaataatgcttaacatctgacactgtttttaaatataactttgcaacaagatggttcttgcttttttatttctattcctggaatttctcctcccctcctttctcctcctccacaactcatctttttctattgaaggccatgtctctctctctcccctctttccctttgccagtctctctgctctgctcctgccatgcctctgcctctctcctccatggctccaaatccctctccctcctttctctccaggtcttctgccttgtccgtccctctgtctgttagcaactcgacctccagccaaagtcactgagagatgagagatcttgagggactcaaaagggacaggttgaacacaatgaagacccaggattccaaatgacccccagagagactggatccatccgaagggcttgtgagggttccgtgatcactccgacatggcccacggagtgttttattccaagaagctctgtcccatctcagaatcaaccacacgtcctgggccatctcaacatgtgggcagttacctcagaaggcttcaggcctggctagatatagtagtttggccagatttcctaatctcccaaagccacagaacagagccctgtgcaccccatccctacccaccctccaccttcctgcccgtgtcccagcacggggcaaggagccaagcagcggagcagggggacacacaggctgggggagagacagacaccacctgtctcctgtagtgtctgccacctgctccacatccactgcaaaccctccctcactcccccacatactcccatcctgatcatttctctcactgtctcagctcagccctctcactggggcaagagaagaaagaatcagatccctgagccacactttttgggtctggagtacaaggtagggtctaagccaaaaaagaaaagaaaagaaagactcctggttaaaaagagttctctgcttcttttatgagatccattatgttctacctggaattacatcttttctggtacaagtatcgtctcctttgctaggctgtaagaatcttctggcagagcaatctttggatttatttttctcctgagtcctatcatcacttctagcacctgggtttttcaagcttccaataaattagattcaaaataaatcctacaagttgctagtgatttgagttgtgttgactggtactaatatccttgctaatcatggtatgagggaaaaactgcttaattgcttaattccacatctctgtgttgacaattttcttagttttataccaggggtcaaccaactacagcctgcaggccaattcaggctcactgccaggttgtgtacagtcctgctagcttagggcaattcattttcaaataactgttaaaactcaaaagaaagataatactttgtaacatgtaaaaactgtatgaaattcaagagttttagggccaggcacggtggctcacgcctgtaatcccagcacttcgggagctgaggtgggtggatcacctgaggtcacgagttcgagaccagtctggccaacatgatgaaacccccgtctctactaaaaatacagaaaaaaattagccaggcatggtggttgactgtaatcccagctacttggggggctgaggcaggacaattgcttgaacccaggaggcggagattgcagtgagccgagactgcaccattgcactccagcctcggcaacaagagcaaagctctgtctcaaaaaaaaaaaaaaaaaaaaagaaattcaagagttttagtggaacacacacacacgtggacacctctgcaacctttggggaattgacctctgccttccctttcctgatcacaaaattgaaataacgtgataaaggaaataatgataggaaataaagccctatctcaagggctgttttaaggcatgaatgagcaaatgagtataacatgtgtagaacagtgcccactgtttgtgaacacaccataaacgttcttatctccattgctgttattttttctacaggtggaccttcaggggatcaaagcaaagttccaagagaagtatcagaagtctctctctgacatggttcgctcagatacctccggggacttccggaaactgctagtagccctcttgcactgagccaagccagggcaataggaacacagggtggaaccgcctttgtcaagagcacattccaaatcaaacttgcaaatgagactcccgcacgaaaacccttaagagtcccggattactttcttggcagcttaagtggcgcagccaggccaagctgtgtaagttaagggcagtaacgttaagatgcgtgggcagggcaccttgaactctggcttagcaagcatctaggctgcctcttcactttcttttagcatggtaactggatgttttctaaacactaatgaaatcagcagttgatgaaaaaactatgcatttgtaatggcacatttagaaggatatgcatcacacaagtaaggtacaggaaagacaaaattaaacaatttattaattttccttctgtgtgttcaatttgaaagcctcattgttaattaaagttgtggattatgcctcta

SEQ ID NO: 619 - DNA, 6868 bp, Homo sapiens
gcggccagagggaggagagaaccggggctcgccgcgagccttcgagagcagcggccgcggaggaggcggcggcggcgggcgggagcagcggcggcggcggcacaggctcggggccagccgggcgcgcatccccgggcgccctgcgcggtggagagcttggcgggctgcgggtgccgcaggacaggagtggacaaagcaagatggcagggatcttagcctggttctggaacgagaggttttggctcccgcacaatgtcacctgggcggacctgaagaacacggaggaggccaccttcccgcaggctgaggacctctatctcgcttttcccctggccttctgtatcttcatggtgcggctcatcttcgagagatttgtagccaaaccgtgcgccatagccctcaacattcaggccaatggaccacaaattgctccgcccaatgccattctggaaaaggtcttcactgcaattacaaagcatcctgatgaaaagagattggaaggcctctccaagcaactggactgggatgttcgaagcattcagcgctggtttcgacaaagacgcaatcaggagaagccaagcacgctgacgaggttctgtgagagcatgtggagattttcattttacctttatgtatttacctacggagtcagattcctgaaaaagaccccctggttgtggaatacgaggcattgctggtacaactacccctatcagccactcacaactgaccttcactactattacatcctggagctgtcgttttattggtctttgatgttttctcagttcactgatatcaaaagaaaggactttggcattatgttcctgcaccaccttgtatctattttcttgattaccttttcatatgtcaacaatatggcccgagtaggaacgctggtcctttgtcttcatgattcagctgatgctcttctggaggctgccaaaatggcaaattatgccaagtttcagaaaatgtgtgatctcctgtttgttatgtttgccgtggtttttatcaccacacgactgggtatatttcctctctgggtgttaaataccacattatttgaaagctgggagatcgttggaccttacccttcctggtgggtttttaacctactgctattgctagtacaagggttgaactgcttctggtcttacttgattgtgaaaatagcttgcaaagctgtttcaagaggcaaggctgggaagtggaaccctttacatgtgtccaaggatgatcgaagtgatattgagtctagctcagatgaggaggactcagaacctccgggaaagaatccccacactgcgacaaccaccaatgggaccagtggtaccaacgggtatctcctgactggctcctgctccatggatgattaattactcaaaactacaagtcccaagcaaagtgaactatttgttcctggaagtatttaataagttgcaaatgcagttcctttcataatatctcagcaccagaaacaaaaattaagattatcaaagcattttgaatagtgcactgccatgtgtcctgtctgtgaatgaagaagaattaccattctctctttgtaggcatgctgtatgtaattgacacaagggaacagtatttgcatttgtactgtcttagaatattatttatttttttgtatttgtaaatctgtggacaaaagagggtttcctcactccttttactcactgggctcatgacagtgaaggagatgctccatctgcttctccccctttctcttgctgtagtccaatgtgctatgagcatcagcttactttgtcacttagagcaagcaaaacccagtgcaagagtctcgttcagctctaaataggtttgctttcttttagttacagtgcccattttgaaattgcctatacagtcttagtgaccatttaaaccggacgaactaggtgtttaattttcactcttcatgttcaattagcagttcaaattaaagaagatggttattggagaacttttttgaatggttttgtattaaattgctttgaaatagatttcatttcttgtgcacacagccaagatttcttcaatgggtgtgagctagttgagggttaaccttgtaggttgcagagtgtatttgtttgtttgtttgtttttctctgtgatgaggtcagtgctctgattttgaaggaggatattcactgaagctcatagttataaacaaggaaatcactgttaagaatgggaatttgtcctgtgttctgggaataacataaagagagcaactgatttcagccaggttttgccactaccctataattagtgcagtcttatgttataaaagaaagaagttaactatatttggggacaaaaaaatatttcaagagttgataaagattacctgtgcagtgcagagcactttaatgcaaccagctttcaagaaaaagccctatctagtacttgatgttgatgtttttattttgctgagcaaaataaagccaatgggagaaagactattttaccctttgcttttctccttaaacgtaatccagatgactttcctgttactaaacactgagcagcattacactacaatgcttctttggtttccaggaatttttttcaaatggggctgtttctggaaaaatgaaaaattctattggacaatggcaatatcaacaatgaggaaaattactgaagaataagtttccataagtctcctacatagcagtgttatttatgtacagataagaaaaccatatgtcagccaaagattttatctcttcttctaacttttagtaagaggaaaaagggattataaaacccttcataaatcaagaaggccatcacttagaacgaaccccaaacaaaaatgccataatataaatgtgtgaatcagggctgtgaagacaacagcagaaatgctaacaagcgtgcagaaacaccagagagtgcgtatcctgctcagaaccattcacatttaattcaattcttggaaaaaattaaagctttttgcccacaatttgcaatctgtgggttaatagttaaaagaatgttcccaaccaaaaaattcttaccgtaatattatatcttgccctacttatttacaaaataatatgtttctgttatggtccttagtaataattgaagaggcttagaaatacatctgcttgtttattgagaaaacgatgcaaataattctgcttttagagccttgttattttatttcacaaaacaggcatatgtctaggagtgtaatttgtggatggttgagtttgtaagaacaatcataaaaggacttgttagtctccagaacatctgctaaaatgcaagtatatgtataaggtaatagcatattacagctgaaaattttgagaaggtaaaagtttcttaattaaaatatgaacatatttagcttgctttagtgtctggggcaagtcctctcaatggctaaaattaactttagagatccatgtgttcaggtttagatcatatgacactcgagcacagaagaataatttcaaggaggtcatcttgtaaattaaaggtttagaagaattgcataaaacgtagtaaatggggtctgtcattagcaaaggcaaatctaagcaatcatttttccccccagaagttacttagaaggagaactgggaacacttggggtctctctaactgatggcattcacttcacacagtcgtctatgttatccagagatttttatttcattttacattttagggcacagttctttggggctaattaaaatggggtttgcaggctttttatggtgaagaataatatatctctgtctatagctttcccatggtagcctgataaggctgagagagaaaaatatgtgcagtatctcatcctccccctgtaccaggccatagctttgaagtgtattttgtaaattcaactataggttagtcagaatgctgtttttcgttaattaacttagcctgtgttgatatctcctccttcctggtcacattcaaaccttcccagagtacaaaggggtatgtagaaaggattccagaagaagtaatactttattctctaatgttaatagcttttctggatctcttagtagggggaaagtagaaaatcgagtagaatttggcctcaggtcaataaatgatataaaaacatgtgttctatttatgtatatatatgtatgtttctccaaaaagtgataaaaccaaaatatcactgactcatccctacccatattcttttcataaaacccactcaccaggtacaatagaaacttccctccttgtttgtcagcctcctgttcatgttccccacacacctgaaggtggtagaatcttttcagcctcttagccagtgagctaaatatggctaagcacaggtcataagagcacctaaggccagcatataagccaactacagttcacctttccaaatttggtcctatggatgttgagcatagggaagcaactctcagtattttggattattcaagtgtatgtggtaaaaatgcagatgattgctgctttaccccagggtttattagcatcctacttctgctgggctgcatcattatataatgccacaggcatctagtcaaggtaaagaagccagaaaggttaggcaagaagtgagataaaatcagatcacctttgatcaaaatggttggtgaacctccacatgtccagttctgttgccaaactttccattcagagtatttggtggagtttgaatttgagcaaactaaatgccttcatcttaggtagaaagggcctgaatcttccattttatattcaaacctcattgttatttggcctaagtaaaaagtcagatttcatttccatttacctgagttcgctttaaagagcttttcaaagagagctttatagacacccacaattgtccccaatctcttcatgatgttgcattaatagttgtttttgtccctttcttggaaatgttaatgccaaagttgcctgaacattgggcggttttcttaatttgaagtataaaaattataaagagtaattccaaaggtattaaaagattgtttaacagtatgtgtggtgatgtcattatctccagagaggcttcaagaaatcctttggaaataaaaagttaaatgtttacatttcatgtggtatttcaggtcttcaggttctgattagcttacttttttcctttgtctttggctgatttctgctttgtagataaataataatagccctgagatgtttctaacatttaaataagaaaaaaatcaaatcgaagtcagcctgctggaaaagtgatcacatggcagttgcagtaacttgtatggaaagagaaaatgcaatgagcccagttactgcacttgccactaccatgctgtccatggaaggaataatcagcagttcagttgtcacaagccgcccttgaagaaaacgcagcaaaatattttaaaatgaagatattgcagtccccagagccagtgaaggtttcttttggtaaaatgaaattgtgccattgtcaaagtaccccgtagtgatgagcactgactggttcactggccacattttagttcttcataataataggccacaaaagggctctgtggtttgcctccatgtgcactggcccctccccacccctagggggcactcagtagctgctgagaaggcctgtccacgaggctgttggaacccctccaataaatacttagaggtagtgtatctgatgcttgttttcgtggagaaaattgtattggagaacttaaaacatcacgaatatttttaataggatccgcagacacccaaaggagaagcttggtcttttccaggtatttccaacttgagttcaacccaaagcctttgaaaggaatgcattaccacatgaccacatgctgagaccccatggggtctaacacgggacctaagaaagtctctgcagccagatagtacatggtgtctccacaaaactaggcattctggagattgcccagaaagggatgtgaggggaccgttaagatctgtcttgcttatctcatgcactcacattccttcagcctcctggagttcctgataaaaggaagccagggtgtggacattttttagctattgatttcccaatagcttgtggatcagttgtacacccacacttccttctctgcctaattccgtttttctggaaaaagtagtatgcccatgtatgtgtgtttttcttaacacaggtccatgaaagtttggcttcctggtttgatgtctgttgcgtggcctggaaaccagggagcagcaactattgagatggtttctgtgttcagtgaaaaattctatttcattgagacaattttttctttatccacagtaattttttgacactgtcatcatgaaactacccttaggaaaataagattacctgcaaaaaaaaaaaagaaatgagttatggaataggaacagttatgtgatgattctgaaactttaacttagagcttcattactttaagaatggaaaacaacctctgagtttgatttcccaaagtttcataaagcccctaagctcatgattttcatcaactctttgcccacatagtcatttacctccacagccgtttgttgtcatagaaggggtggtggtgtttggatttgatttttttcaacttgcagtgagaaataggataggtgacaaaaccttacttgttttcttaagacaattcagtgcttgagcatctctgtcagaaatggaatgaaatactgttagccaattagaattattttatgtattgttattgtgttttgctgatttttatatgaaaatataattattcattcttgatctctggaagcaatcattattatgaggatcattttactttggaaacactttcataataaagataagtattaagagtgcaaaaaaaaaaaaaaaaaa

SEQ ID NO: 620 - DNA, 3985 bp, Homo sapiens
cgctccccagtagaggacccggaaccagaactggaatccgcccttaccgcttgctgccaaaacagtgggggctgaactgacctctcccctttgggagagaaaaactgtctgggagcttgacaaaggcatgcaggagagaacaggagcagccacagccaggagggagagccttccccaagcaaacaatccagagcagctgtgcaaacaacggtgcataaatgaggcctcctggaccatgaagcgagtcctgagctgcgtcccggagcccacggtggtcatggctgccagagcgctctgcatgctggggctggtcctggccttgctgtcctccagctctgctgaggagtacgtgggcctgtgtgagtactgccctgactgccccggtggcagggtgggcgtgaagggaagggatccaggataaggggggattctgcattcatttaataatggccacctgtcacatatacactttttcctgcgctagccctttgaagtgggtctttattgtccccatttcacagacaaggaaaccgaggctcagagaaagttaacaacttatccaaggcagccctgcccagtctgtgttgaaatcagggtttgagcctgagcccatcccctatgaccccatagccatctttgctggagatttctaaattacaatataggtctttatgcattgttccacatttacaaagaaaaaggaaagatgcaggagaaaaaccctgacttcagaacactgtcaataccggcaggcacaaggttcatttagccattgcatagcaaccctgccatggggtgtggctgctccattaacccaagtttgaaggaatgagggcatggcttttatctgggtgtcttctgagcagggtcaaaggcagtggttcccgaacttgcagcccattagaatcacctggagagctttaaaaatcctaatgcttggggcacaccagttacatcagggcatctccaggcaagatccaggcctcagctgttttgttttgagatagccttgctttgtcactcactgctggagtgcagtggcacaatctcagctcactgcaacctccgcctcctgggttcaagcaattcttgtgcctcggcttcaagtagctgggattacaggcatgcaccaccatgcccagctaattttttggatttttagtagagatggagtttcgctatgttggccaagctggtctcaaactcctggcctcaagtgatcctcctgccttggcctcccaaagtgctggaattacaggtgtaagccaccatgcccagccaacgtcagtcatttttaaagctctgcagctgattccagtgtgagcgaagtttggatgccaggaggataagcaattacggactgggagcaagagaagggaatgtaagacactgcacgtgattgccattttcctaaggaaatactcagttcgttaatgaaacgcagtgaacttctgctgcacatacagacatagaggcttgcctgaaacatgaaaatattggggactgaaggatgtcccgggagggtgggacatgctcaacaattcaggaaggggagatgcagaaaaaagtgaaaagcaggcagcatgcgttgcaatgatctctatggcgtgtgcctctcctgtcacggttttcatttaaaacaaaggggcaaggttttgttggtcaaacaatgaagggtaactttgtttctgggttcaagggaccccagattccccaggggttcctgccagctggaaggtacccaggtccgtatgtgacttcccgagaaggtgataagagcgtgccaaggagaaagacacttaggcaaatggccagagtccccgagctgagcatttaacagactgcctctctttaaatattcacagggaaagtgcatcttcctaagggcgagggtttcagcagtggttgaactcggcggggtggggcggagcgggaggatgcaaacttgcaaagtgaagcaaacacactcaccgcagcccagcaagggctctggcagctgacagggctttgtctgggacagctgcaaaccagtgtgccgtgccagccaaggacagggtggactgcggctacccccatgtcacccccaaggagtgcaacaaccggggctgctgctttgactccaggatccctggagtgccttggtgtttcaagcccctgcaggaagcaggtaaggccccagtggcatcgtggtctgggcccagccccataaggcagggggtctcagggcctccctgtcctttctgggctggagatggaggcacaaggaccccaggaagccacacacacacacctgttccaaggcctcagagcagaggcttcacacttagggcagccatggccaggggctgtcctcttctgtcccctttatgtaaaacataaaagcaattgtttcaaaaaggtgttcaaaatgatggcatcgcatagagggaactgatttagtaactattcttgagagaagtggaaacgcataggtgtggaaagccgggccgacttttgggctgtttttgcaaatcggccccccagagtcttgtcatttgtggcatcccctacacagacggcaggcggtcccagccctagacgtcaggcctcggtgccacaccccacctcccccactctgccccccacaagggtcatctcctctccctctctctgccgtggtggagggcaggtgcagggcaaccaccctgggggttccctccccaggggcggagagcctgcgtgctgtgcgggtaacagatggccctgcacacgggtttgccaccctggctccaccaggcttagctgccccacatcgtgggtggggcgattggctataagccatctgccatgtccaagtgccagctcagcccccacgaaggccgcacctgcgtgaggtaccttcctggaaccagcatccagaggggcctctcttgccctttgtcctagggtgaaatgcgggaggctgagtcctgctggccccggctccctgatcaatgatgggcccctgcccagggcctcccttcaccctccccagcaagtccagggtaggggtgggggtgggggtccagagaaggccaggagagagaggggtctggctactgtccactgccggtcctgttccttcagctccactggaactacactctcctctgagtgccagccatggccctgccaaggcccatctcgcttgttatctgcctgatccctgggtcccactatcttgcttagcaacccgaggtgggaatcttggctattcccccatgtggtggggactcaacactccccggtgactctggggaggaggcagcactaggtgctggccttggagcctgccctgaccttgggaagctgggcagcgtgggtggagagagactgctcacacaagcctttgctctgtttgcagaatgcaccttctgaggcacctccagctgcccccggccgggggatgcgaggctcggagcacccttgcccggctgtgattgctgccaggcactgttcatctcagcttttctgtccctttgctcccggcaagcgcttctgctgaaagttcatatctggagcctgatgtcttaacgaataaaggtcccatgctccacccgaggacagttcttcgtgcctgagactttctgaggttgtgctttatttctgctgcgtcgtgggagagggcgggagggtgtcaggggagagtctgcccaggcctcaagggcaggaaaagactccctaaggagctgcagtgcatgcaaggatattttgaatccagactggcacccacgtcacaggaaagcctaggaacactgtaagtgccgcttcctcgggaaagcagaaaaaatacatttcaggtagaagttttcaaaaatcacaagtctttcttggtgaagacagcaagccaataaaactgtcttccaaagtggtcctttatttcacaaccactctcgctactgttcaatacttgtactattcctgggttttgtttctttgtacagtaaacattatgaacaaacaggca

SEQ ID NO: 621 - DNA, 29270 bp, Homo sapiens
agggctgggaggttgaacttgagccggtttgggagccaggagcgagtgggtgacaggtcattcctgactgggaaggttgcttgacaagtcaggattgtgcctccagtcagaaggaccatgaagagagagaagagggcagagccgtgcatggggctgctccccaggacctgagcaggaacctggagttttcaggtgagaggctcacctgtgagcaggatacctgcctgctcgcctattggtctccagattgactagttacctagctaacatctttcctagtacctgtttactttctttccttcctttcttccttggcgacttctttcccttctccctccttcctttccttccttccctcccaactatctgctttctcagctgcctaattttcttcctccttaactaaccaacttacatcctcacttccttcccactgacttcattttttccttttctagctttctattgtcttcctgaaattccaggccgtgggctttgcagtcagatggcctgggttcaaatcctggttatgtcatttattaactgtcttgatcatgtcacttccctgtccttgcctcagttttctcctccttgaaacagggacgatgatagttcctaacccgtggggttgtgggaacaaaataagatcaagttggcacttgaactgggcaggcgtgtaaatgaacaagttacagtgaagacagggacagcagcaggagagggtgcatgggatcggagggtcatctggcttccaggaaaggcaatgagaacaggtgaaaaggtgagctggaaagaccaggtttgttggggaatgttccaaggagagagaactgtgtgacactgtcccacccccacaccccatttggcagggccagggagctgtaagcaggtccatgtaacagtgggacagagggaggcaagtctgggctgtggcaagttaggaaagggacaggcttgaggactcatggaggggcttgagtgggagtttgcggagtctgaagagttaggagaatatattgatgtccagcttctggccagaaaattagaacaccgtggtgcgagagagaagaaagccttaggaactgagggctgcttaggcatgggggtcacagtcaaggtgatgggggagggtgtgatgggccatgggcatgccaggttcccaccaggaactcagtacttgaatattaactcaacagcaatatcttgagaagctttacacaatagtacaaagataaaagttaaaataaccggccgggtacagtggctcacacccgtaatcctaacactttgggaggccgaggcaggcggatcacctgaggtcaggagtttgagaccagcctagccaacatggtggaacctcgtctcgactaaaaatacaaaaattagccgagcgtcgtgacacatgcccgtaatcccagctatttgggaggctgagacaggagaattgcttgaacccaggaggcggaggttgcagtgagcagagattgcgccactgcactccagcctgggcgacagagcgagactccatctcaaaaaaaaaaaaaaaaagttaaaataacctaacctaagaacccgctgtgaccttgggtcatgaccctgcagtctttttttggcagctgtgctcacaaatgtgtacgtgcagacatgtcttttgtttttcttttacaaaattggtacccctacaacacctactattttgaaacttggttttttgcttgatattgtatcacatgtatgttcctgttttggtttatataggttttatatagtttttggttgtgtaattttccactttatatatgtaccaacatttatcaattcatttattgattcattagtcaaattgtactgggcatctactatattccaggccctgtgctcagtgctgaggattcaatagttgaacaggaagtatttgccctcctggagctgatgttctagttggagatagaaaataaaaactaataaatacgtgataaggcatcagtgctacaaagtaaaatataaagtagacaaaatgtatagggaatgagcaggactggtatcagagtgactaaccatcctggttggcccaggactatagcggttttagcactgaaacccatcagtcccagacaaaccaagatgacttgtcacccgtaatcagtacaagcctctccaagaggtgactttaagcagaagcctctatgacgttagtggaaaacagccatgcaggtgcctgggggaagagtgttgtaggcagagggaaaactaagtgcaaggggctggaggccagagagcacttagtgtgtctgagggacagcaagagaaaggagagaggctgagggcagtcaggaaggaggggagtggaagccaaggaggagatggagacagcaagctaggtcatatggatctcataaaccatggtagaggctttggattttttttttttttttttttttgagacagagtcttgctctgtcaccaggctggagtgcagtggcgtgatctcagctcactgcaacctctgcctcctgggttcaagctattctcctgcctcagcctcctgagtagctgggactacaggcacatatcaccacgcccagctaatttttgtatttttagtagagacggggtttcaccatgttggccaggatggtttcgatctctgacctcatgatccacccgcctcggcctcccaaagcactgggattacaggtgtgagccaccgcgcccagctgaggctttggattttaattctaggtgtgttgagaaaccactggagtttttgagcaactaaggcacatgatctgatttacattttaagactcaccgtggcttttcatagagaaagattgtagtgggtaaatggagaagcaggggtcagtggagaagccattgcaataatccattcaagtgacaatgggggctcaggcagggcggttgcagcaatgatggtgagcagcaatggtttctggatatattttgaatggaatttcatgatggagtggaggcggagtgagggtgcaagctttctagaatgaactcaaagttgctggcttgaacttttgagtaggcggtagtgccattattgaggctgaagactgagggaggagcagactggggcagagtggaaggaatatgagtcaagacctttgttttggacatgttaacttcgagataccagccaggcgcagtgggtcacgcctgtaatcccagcaatttgggaggccgaggcaggaggattgcttaagctcatgagctcaagaccagcctgggcaacatagtgaaaccctgtctctacaaaaagtacaaaaaaaaattagccaagcctggtggtgtgtgtctatagtcccagctactcaggaggctgaggtgggagaatagcttgagccagggaggtaaagattgcagagagcctagatcactccactacactctaacctgggctgcagagctaaaccatgtctcaaaaaaaaaaaaaaaaaaaaaaaaaaagattgagatgctttggctgggcacggtggctcacacctgtaatcccagcactttgggaggcaggggtgggtggatcacatgaggtcaggagttcgagaccagcctggccaacatggtgaaacccagtctctactaaaaatacaaaaattagccaggcgcagtggcgggtgcctgtaatcccagctactcgggaggctgaggcaggagaatcgcttgaaccagaaagcggagcttgcagttagccaagattgtgccattgcactccagcctaggcaacagagtgagactctttcttaaaaaataaataaataaataaagattgagatgcctctagacatctgactagtgaattgtcaaggaagcagttaaatatttaaatccagagttcaggagagaatcagaactaggctgggcgcagtggctcacgcctgtaatcccaacactttgggaggccgaggcaggcagatcacttgaggtcaggagttcgagaccagcctggccaacatggcgaaaccccatctctacttaaaaaaatacaaaaattagccgggtatggtggcgggcacctgtagtcccgggtactcaggaggctgaggtgggagtatcacttgaacctgggaggcagaggttgcaatgagttgagatagcaccactgcactccagcctgggtgacagagcaagactctgtctcaaaaaaaaaaaaaagaaagaaagaaaaaaaaagatttgggaactgacaagtatagttggttaaaccactaaaatggtagtgatcaactaaagaacaagtacgtgtagacagaagcccaaagactaagccctgggataggcctgtgtttaaggataaaaagaggaggaaaatccagcacaagagatggaggaagagcagtcagtgagctagaaggaaaaccaagagttcctaaagccaaatggggaacatgagcacaccaaattcttcagagaagttgaataagatgaggatgaggaactcatcactggctttggcacatagaggtcactggtccacggtttcattgaagtgttgggatgagagcccatttggaacgggctcaaaagagaacaggaagaggactggagacaaggagtccagacaactctttcaaagagtttagctgaaaaggggtacaaagaaatgggaccatatctggacacggtatatggtcaagagagggagctcttgcagctggcaagtgttctgaagtgctctgtggtgggacacttaggttactattagcacaattattttgctgttataaatagtgctgctgaatgaaggccacatcaggatcttgtttttgaaaataaatgtccttgttctgggtatgtgttttgtcaacatgacatcctgctgatcatgaattggttccacatttctattttgttcaagatggaaggctttgatactgtgcactcaggttttctctggtcaacacttccagatcctccgcatttcagaacccacagagaacccctgaggcccctgggctcagttccctccctgaccaactttctgggccctagccccatgtgtccctcccctgtagtatactgtagccacacagaaagtttgagaagggcaggggctgtgggcccatcaactcctttattcttgagaacatctgcctacccctcgggatcctggggagaggaagggaccctgtgagaacctaatgaccgccccaggcagcaaggccttcatgagccagggtgctctctgggaccgtttcttacgcagcaggagagtcgtgggccaaccaggcctgccctgaggactgggccagagcccttgaggggcccgcagggaaaggccaaaaggaccaagtgctcattaaagaccaaggcaggctggactgagctagacacccaggctccaggttccttcctctgaaacatctgcaggtttttgggaggcgaagggctctcagctgccatggctgatgtctggggactttttcttcagctccagatggtctacacagggttcgtatacacaggccccctagccgcacgcatgcgtgcatgcacgcgcgcacacacatacacacacacaccccagagtaaattcactgatatacaccactatgaacacacacaatgacttacctatacacacatattaatagacacccatactgctcttaacacacaccttcagacatccacacagactcacactcacccacatacacacacactgacacagcatattcacatacaaagatacacactgatatgtaccacacagagacacgctgaaacacatccatatgcacaccacacacactgagatacagtgacacacacagtcacagatgcacagacatatgctgatgtaaatgtacaaatgtggtcacactgacacatacatgcaatcatctacgcagactcatagaaaccgacacaaatacctgaaatacacagccacagacagacacacacggaagcactctatgcacaaaacactcacacagtacacaccatgctgcacataccctgacccaaacagtctaacaagccctgagggtctccagggctgccctggggctattgcccacccctcccaccgtccccgctagggtgagatggtgttccccagggaacagaagtctccagtcccatcttaagctctgccggatcccgcgtgacatcagctagccccctcgcggctgccgggagctgtgagctctgtgctggggccaggccggcaccaggcacagacacttaggcccttgttgggagaacagagagaggctctcttgtccactgcctgtcttcggttccaactgctggttctcctagaggcctctcctcagactcgcaggtatgtgggaccagggaggccgggtcctggccaaagggccactggggtcagcccaggagagggtgtggcagtgttgtgggccgtttgcaggagcacacacgtctggcattggctaggggcaggctgcgcttccttagcagttctgcagcttgctcttaaggcttggcagggctgggcctctcagggaagcctgggctgggggatcctctcagttccccttcactttctctgttcccaagaaggccatgaggttggtgcctccaggacccccccttgtaaagataggaaatctctactcagagaggctgggctgcagcccaggccccacagtgggccaagactaaggtcttgagatgcgcggcaactgggctttcaggtgagatctctgctctcagcctttgccaagcaaggatgagactgtggggccccaagcaatctgtggcagggcctgggcaccctggccccgtctcccctgcagggtggaagcaaggaagacactattcctggccacatagatcagctggtcacaccttctgttgtttggccccgaatagatattggccagtcttgggtctctctgtggccccagcccaaggcttccagggcagctgcctttcctgaggcattgggcagaattccttgtggcaaggagatcgtagcacagagcccagctgggactgcgcacagtaattcagggttgccattgttcctctatgggagtccggagagcccagcctgtgcttcacaaggctatgtggccctaggaaggtccttttttaggccacaggccttccatctgtgaaatgggggatgggttcagactttatgccctgaaaagatccttccagccctggccatcttggacttctggagctaccctggctcacaggggtcttgttgccctgggtgtccccagttcttgaaaagaatcagcctgggaggggccacaccctgaccatccccctttatcccttctgagatgtttgttaggaagtctgggtccaggggatatcatttcttgttccatccatgcaggggttgcttacctcgggtaggaaaccctcaggcggtggcaggtgcacaggtaggggaggatggagagggcagtggtgcctgaagccctggatgggcggagctgaccccccaacaccaactctctcatgcctgctcctccctgtccccccagagctgcctgatcattgctacagaatgaactctagcccagctgggaccccaagtccacaggtgagtggttcttggtcccccacccatcatcgggggctcacttcttcccgaggctaaggaaatctgtgggtcccagacaatgtcaggggctgagagggttactgcgagcacatagaaatgagccacttgcagggtgaatagagtagagatttgaaatagggcttcaagatgaactggaaaaatcatgagatttgtcatggagacacctgggtcgtatcccaacctggttgcctgtgagaccctgggcaactcctctctgggcctcagtttcctcgcctattcaattagcacaacagccagctgcctcccaaggctgttttgagaagtgggtaagatggtggataagtggatttgtgggtgggtagaaggagggagggagggagggaggcgggcaggcgggcaggtgaaaaaaaaagaaaagaaaaaggcaggcaggcctagtagagttgttggagaagggatcagggcctgggccaggagaaagggaggtagccaaggagtagggatctgctgatcataatcacttctttctttagccctccagggccaatgggaacatcaacctggggccttcagccaacccaaagtgagttctggtccctcaagcacctttcctacttgactcccctcatacctggctccccttgccttgggaataaaatccagattctctggtctagcattcaagactgtctgccatctgggcccaggacctttccccagctctatctcccacaaattccccagcctctgcccatgctgaaccctcttcctgcaatgccacctaaatgtctgcattgttagcaactccccacacttcaggcccttctgaggggctttgggtaccagaaccctgccttctatgcaggccttctgtgcagtatgtctggttttatctctaccctctgcctgttgtttaacttgaatttgagttcccctggggccagggtgaatcttacaagccctctttcggctgggagaacatggggttcttcgggggtgaggaggcatggctcctggaaggctctctgtatttccccattctaaagttaaaaagaagcccaggtttgttctcaggcaccaggtttccagacattgcaaatgctgatccgtgtttttccctcttcccccagtgcccagcccacggacttcgacttcctcaaagtcatcggcaaagggaactacgggaaggtgagtgacttggtgagggtgggaagcctgggtcttcccttctgcagcctcttccagcccctgctgccacttgtatgtatgaagagagagcactcgcacctgcagacaaaagcaggggcaggcgggaggccttgtactgctgttgggaagtccaaagtcacctacagggcctcaaattcatgtttcttctcaggtcctactggccaagcgcaagtctgatggggcgttctatgcagtgaaggtactacagaaaaagtccatcttaaagaagaaagaggtaccagagctcgggcacaggcatttcttcttctgcttctcaagccgcagcctagggtggctttcaaagatgggtcccacctctgacaggtccatgggcctgggtgcagaagtggtcacaacaaagggtagaggggaggtggtacgcaggatgctggcccttctcaaagaaagcaggccaagccatctcaccacagggctttcaggaaaaccagcctggctttgccttcccctgggaaacacaggctccacgatggacaagtcttctgcctgctccaagtgccaggctccccatctgtataatgtggagccccactttattctctctgaagacccttcatgccatcaggccatatggctggagtgcagtagtgcaatcacagctcactgcagcctcaaactcctgggcttaagcaatcctcccgcctcagcctcccaaagtgctggggttagaggcatgagctacatgcacagcacatcatggacttctttttttgttgttgagacagagtcttgctctgtcacccaggctggagtgcaatggcaccatctcagctcactgcaacctccgcctcctgagttcaagtgatctcatgcctcagcctccccagtagctgagactaaaggcacccgccaccactcctggctaatttttgtatttttagtagagatggggttttgccatgttggtcaggctcctggcctcaagagatccgctggcctcagcctcccaaagtgctgggattacaggcatgagctaccacactcagccccatcatggatttcttgatgcctcagctgacctgagttcctttaacacctgactccattagtaggccagagcaggcccagagagaggattgcataggaggttgggggactcagagaaaagagagattaatgttaacaaggtctccgtggggggtggaatgggaggtcttcctgagggaggcagcggtgcagctggccttgatggtgggattctgatggtctgaaaagagggtgcgacatccaggaagaggaaatagcatgagcaaatacatgaatatggatagtgtgtggcttctttcccttaggaactcagttatgtaggcatcacacatgctttgcttttcactccaagggcaagaagctctgatacaggggctagagctgtgcccacatgaactagcttaggatgaggctgaccaccctgagccctgaatactaaggaaggaacttgggcctggctctaagggcaatagggagccattgtgggtgtttgagcaggggcatgagaaagtcctgggtaggatgacccccacccacaagcttatatgggctgagccgggataaaagaggctgttgtgggctgtgacatggacccctctctttgtgactccacagcagagccacatcatggcagagcgcagtgtgcttctgaagaacgtgcggcaccccttcctcgtgggcctgcgctactccttccagacacctgagaagctctacttcgtgctcgactatgtcaacgggggagaggtgggtgggcccacagggaggcttccctgggctggctctcggctgggagctgtccatcccacatgcccactgcatgccaagttctggaatgatctcacttcatcttacaatagacccattttgtagctaaagaaactgaggttcagggaggtaatcatttgctcaaggccacccagcgcatacctggtagagtcaggacttgaattcaggtctgttagactccccaccataatgctttcttgccttcctcattcagagttgcccatagacgcactttgataggcccgggaaaggtcaatgctaagaggagctcgtggtcaaggtttctagtgctcccataggccacagggtgggattgactggtcactgtggtaaacagagacctcaaggccacctggtgacccagaagcacagctgggacaagcagagctccctcctgggcttcactctgtctctctggtcaagatgcaaaatgtagtggagctccagtcagtgaccccagatttaacctgcgtgatctcttgcctttgagaatgatgctaagaggggggtttttgtcctgcatccctaagtgaagggctttccatgccagcaaaatagtccaaaaacattggcccatgggtggatctaacctgagctcagtctgacagccgtatcatcatatcgcctggattgatggaaaagcataatctttgaaccacgcaggttcaaatgccagctctgccaattataagctacatgaccttgggcaagtcgcctaaccattctgacccctcctagcttcctcttacatgaaactagcatgacacttgtaccttgaaggttgtcatgaggattaaataagagatgtggaagggcctgacttggaacctggaacacaggaggtgcttaagcaatgctaactcatctcttcttctgctgactctttggacacccgggactgctgtgtggggcaggggccagcatgcactcttttggtaggaagaatgctgcaggtcagagagggagtgagctcgcagccgcacagggcggggagcaggtgcaccctagccctacagcagccacccaataactcctgtcacactcctcctcccctccagctcttcttccacctgcagcgggagcgccggttcctggagccccgggccaggttctacgctgctgaggtggccagcgccattggctacctgcactccctcaacatcatttacaggtgaggcctgcctgtggctcagagccaggaccaagcccttcttgctccaacagctaggggttgtgtggacactaaatcctgatgaaatcctggtggacttggtcctttgttttgggtggggttggagtctcctcctccgaggtccaagtgcccagcctttctgggctctccttctgcatctctggcaacctccatgaatagttctcctgccaggaccaccccccgcccaggtctccaactctcctcactaaatggctgagacacctcaaggctgttttctcttattttctgcagggatctgaaaccagagaacattctcttggactgccaggttggtgtgtgtgtgtgtgtgtgtgtgtgtgtgtgtgtgtgtatgtggttgcacaggtacactatctgaccatgagtctgtgtacatgggtgtgcatgcattgtacatgtatgcatataggtagaggaggcatttgagcatatgtgtgtgtgcccatgcacatgtacacacatacatatgtgcacatgagactgtacatgtatatgtgtgcatgcatgtacatagggggcaggggtggagccaggtggaggctggtggagtttgtcttagactgggctccatggaaacagactctgagatggagaggaggcagaagctttattggggaacattctcaagagataacacttttaaaggggtaaaaaaacaggattgggcaaaggaagaagctcacctgcattgtagttaccagtggggcctcagctgatcttgccggcagggggagggcctgagctggggtgggtctctaggattgtcccaaaatgagacaaagaggatgggcctttgtgcccctggacatggattgctcctagggacggggcataactttgggtgcgggcaatgttctagcagcagggggatggggataggcatggttcttctgtagcctggtttcagaagagggatccaggcagaaccccacagtatctactcattctaccttcctgcccagctgccacaaggtgtgattgctttctgagtccccagcctctgtctaggggttttctgtccacaagctgccactgtcgtaggggtgggtctgagtttgtgatgagctgtgggcaaacagtggaatgcccacccggccccctgtgctgctcctgacatccagtccaggagccctgtgttggagtggagcctccagcctgtgcctgggcatcagatcccacagctgctgccctggggtgtggcatctgggctttgggggttaggcctggccatacccttggctcataccaccctccagcccatgccctccgtcattctcagggacacgtggtgctgacggattttggcctctgcaaggaaggtgtagagcctgaagacaccacatccacattctgtggtacccctgaggtaagcgtaaacatcccaggagaggggaggtcatgagtgggtgaggccacagctcctgattagagccaacaggttacagtgaaggggactcactcctttgacccaaacacttctcctgagtgggctatacactgaactgtggtttcctcatctatgtaatgggggtaccagctctaggactgctgagacccagccagctagctgctggtgaagctctactgcagtgctatccagtagaaatagaaatagaaacgcaggctgggcacagtggctcacgcctgtaatcccagcactttgggaggctgaggtgggcagatcacctgaggtcaggagtttgagaccagcctgggtaacatggtgaaaccccatctctactaaaaatacaaaaaattagctgggcacggtgacgggcacctatagtcccagctactcgggaggctgaggcaggagaatcgcttgaatacaggaggcagaggttgcagtgagccaagactgtgccactgcactccagcctgggcaacaagagtgaaactccatctcaaaaaaaaagaaaaaagaaagaaattcaaaccacataaacactttaaaaacttccagcagccacatttaaaaagtaagaaagtaacaggtgaaattaattttaatgatgtattttatttaacccaatatatccaatattctcatttcaacataccatcaatataaaactggttgaaatattttattccttttttttttctaactaagtcttgaaaatctggcatgaattttaacacttacagcccatctcaatttggagcagccacatttgaagtgttcgatagccacgtgcagccagtggctgctatattgtacactactgatctgcagggtgaaggccacgtgcaacaagagggcctggcctgagtgttaagacctgggctggcaagtgtaaaccacaggtccgtgtccatcttccagctgccaagagcctggagggttacaatttgcagatctcagcagtcattcagacatgtctatatgtcctgccaaggtctctctgcagccctgaagttaaaacctttctttgggccaggcgtggtggctcacgcctgtaatctcaacactttggtaggccgaggcaggcagatcacctgaggtcaggagttcgacaccagcctggccaacatggcgaaaccccgtctctactaaaaatacaaaaattagccaggtgtgctggcaggcacctgtaatcccagctactcaggaggctgaggcaggagaatcgcttgaacctgggaggcagaggttgcagtgagccgagatcgggtcattgcactccagcctggtggacaagagcgagactctgtctcaaaaaaaaaaaaaaaaaaaactttatttgaactcccaccagtcttggaccttggaccttggacctgaaggggtccccagtggctagacagacgtcagggtgagggttggagggctgaggctacagactgggagactcctccccacctggcatgagacaggacctcagctgctctctttttctccatatgcttgaaaagctgggtcttagatctaatggcctcctcactttagttctagggtagctgatggtcggatgaactctctgagcaggagccatggtctgtgtttgggtatggtgggtggtgtttgctggataaagccagcgccccaaagcctgacagtccagccatcccttccttggacgttgctagggacgggaacaaaggatatggaaccccagctcatgtaggagacatgtggccccaacacatcacctttaccacgactcagccactgccatggtgttggggggcacaggcaagagtagccatggttgctcccattgtttgagggccagcacatatgttagcatcttagaacagcttctagcagggatttggtatcttcacatttttaggatgaaaaaaccagggtctgagaggttaaatgccctgcctgagaccacgtaccaaccacggctcaggtctgtgtgactctgcccttccctagaccccacacagtctctcagagcagcttttcctgttgctgagaccttgcccccgactcggtggcagagacaccaggctaagaagtcagtaagcctcttttttttgttcccaggttctcttcctcatgcaaggcatagagacatggtgtacatttatttatcaatagctcaggggtcaccccctccttcctgaccctctcgtctgaccctagggtttccagcacaaggatatgccacatgtacttttacttacactcacattagtctccacactgccctgtgagagtactcccggggccttccgttcccaggacacggatagccagttgaatgcctttgcaaaaatagaaaaaggcatcccctccgggcagactaattagaaaaagcaccccttgaaacaaaaataaagttgccggataatacctttgaactagtgttgcggcttggtgagtggattacagccatgagtgcagccccctttacccttttggctggtgcttttgtgtggtacacaccatgtaaattgcacaaagcagtcctggctgacctcttctacatccccaacccatggcaaagggccctgcagaaagcaggcctttgctgaatgactgatgcatgaacacacacacagccacagagcacacgtacagcagggtcagctcttggtcatcttcctccaagtgccttatttacagctggggcaactgaggcttaacgacttatttcaaataagtgtgtttccttctaacagtacttggcacctgaagtgcttcggaaagagccttatgatcgagcagtggactggtggtgcttgggggcagtcctctacgagatgctccatggcctggtgagtcaggggtagccatctacaagggccatctggctagggatgggtctgtctctcatgtggtctacacaagctctgtccaggaaaatgagcaagccatctcttcattccagactaaaaaagataacgccaaggtgaatatgcaaattattatttttttcaataatgttagtttaggccaggggcggtggctcacacccataatcccagaactttgggaggctaaggcaggtggatcacctgaggtcaggagttcaagaccagcctggctaacatgatgaaacaccatctctactaaaaatacaaaaattagctgggcgtggtggcgggcacctgtaatcccagttattcggcaggctaaggcaaggagaatcacttgaacttgggaggcaggggctgcagtgaaccgcggtcgcaccaccgcatatccagtctgggtgacggagggagactctgtctcaaaaaaaaaaaaaaaaaaagttagtttacaacacactgtctcaccttgggtgcctcaaaatagcctttggaggctgacacagcaggaaatggagttattcatattttgctgatagggaaattgagaccaagagagatcacagtcctgataggttgtggagccaacccctgaccccagtcctaggctgcctgcttaggtagaggcatgtgtagatttgccctaggccatgctttgctttgaagtggtttcaccagcatagcttggtccctaggaaggaacaggctctgtggattaaggggaaggaacagctggaagaggtgtgggaggaagaatagtaagaaagagaaggggaccctggatatggtttggggcctggctgtcttcctaactgtgccacataattgctctgagccttgttttcttacctgaaaaattacaactctcttggaggatggttatgaggctggggtgaaatgattaaggtgaaagtgcaaatgttgccaaatgcaaagttggtgcataagctagatgaaaagagatgggcctcacgctggtgggaagagacttctgaccttcctagcaactctctccatgtgccggaagcctggagtcctgtctctttccagtctgccatgcgagccattgcacaagacaggggtcatactgaatcctcccagccgcccaccttgctccaagtctccccgagcctgtgttcactttgcatgggtgatcctccagctgttctccctctctccccagccgcccttctacagccaagatgtatcccagatgtatgagaacattctgcaccagccgctacagatccccggaggccggacagtggccgcctgtgacctcctgcaaagccttctccacaaggaccagaggcagcggctgggctccaaagcagactttgtaggtgacctaccagtggagcactggcccccatggggctcgcagcttcctgcagaggcagctcagaagcacattaacacgcatcctgctgccttctaaaaccaggcactgctcacttgttcatttggaaattcactactgctactagctgactactttctccagtctagttctcttagtcaatcaatatttactaagcaccaactatgtgccaggtattgagctaggtgttagggattcaataggctgggtctctgcccttattaagtttggggtgggggccgggtgcggcatacacgcctgtaatcccagcactttgggaggccagaacgggtggatcacctgaagtcagaagttcgagaccagcctggccaacatggtgtaaaccctgtctctactaaaaataccaaaaattagctgggcatggtgttgggcacctgtaatcctggctacttagtaggctgaggcaggagaaccacttgaacctgggaggcggaggttgcagtgatctgagatcgtgccattgcactccaggcagggcaacaagagcaaaactccacctcaaaaacaaaaacaaaaaaagtttgggattgggggcaggcaaaaaacccaaacattatatacaattatcacaaggtatgacaagtgtcaggaagaaaatgaataatgagctgagatagacaataatgggagggggggcaaattaatagcggcatgatcagggagttctctctgaggaggtgacaattaagctgaggcttgacggatgagaaagaggcagccatgaagacagctgggcaaaggctccccagacacaaggcacagcatgtgcagaagtcctgctatgggaacaaggaggagagtggccagttttagggtgttttgagcagaggtctggcatgacctgatttaagtttttagaagattcctcgggcttctttgcggagagtggactgcactgcatctgctttttttttttttttttttttccgagacagagtcttgctctgttgccaggctggagtgcagtggtgcaatctcatctcactgcaacctcctcctcccgagttcaagcgattctcctgcctcagcctcccaagtagctgggactacaggcacccgccaccacgcccagctaatttttgtatttttagtagagacggggtttcaccaagttggccagatggtctcgatcttttgaccttgtgatccgcccaccttggcctcccaaagtgctgggattacaggagtgagctaccatgcttggcctttttttttttttgagactgagtctcgctctgtcacccaggctggagtgcagtggcacgatctcaactcactgcaacctccatctcccaggttcaagcaattctaatgcctcagcctactgagtagctgggactacaggcacccgccaccatgcctggctaattttgtatttttttagtagagacggggtttcactatgttggacaggctggtctcgaacgcctgacctcaagtgatctgcccgcctcagcctcccaaagtgctaggattacaggcatgagccactgcgcccagccagcacttgctttttacaaatatctgagtacttcttccttgccagaccccaggctgggcaaatgggatatagggataaatgattcatagtccattcttagcaaattcattatattcattcattaaagtggcactttaaaaataatcctactttttttattcaacacaaggtaatttggatttacaaaaagaaggccgcaatattttctcaccaggagtttgctttcttttctaacatagtggttaagatgaatggactaggccaggtgcagtggctcacatctgtaatcccaccactttgggaggccaaggcgggcggatcacctgaggtcaggagtttgagatcaacctggccaacatggcgaaacccggtctctactaaaagtacaaaaattatccaggtgtggtggtgggtgcctgtaatcccagctactcaggaggctgagacacaagaattgcttgaacctgggggtgggtggaggttgcagtgagctgagatgggcaccactgtactccagcctcggcaacagagtgagactctatctccaaaaaaaaaagatgaatggactatgaggcaaactacctgggttcagcagatccctccttcactgcttactagttacaggaccttggacatgttgcttaatttctgtgagccgcagtttccccattgtaataacagcacctaacacagctgttttgaagatcaaatggattagtattaatgtatgcaaagtactctcagcagtgtctggcacacaataagtgctttttaagtgtaccaaaagctttacattccagttactgtaaatcgtaacaacagttagggcatctgctgcctattcctggccagcttaaagaataggggcttccgtgaagatgtctcctgttccaagcaaaaatttgtatcttaaaaaaatatgtatgactcttaaaataagttatacattcacatagatcaaaattcaaagggtacaaaagagtatctagaaaaagtccttccagccacccagttcctcaattcagaggcaaccaatgttaccaatttcttgggcattctttcggaggcttttttttttttttttttttttttgagacagagtcttgctctgttgcccaggctggagtgcagtggcatgatctcggctcactgcaacctctgcctcccgggttcaagtgattctcctgcctcagcctcccaagtagctaggattacaggcacacaccaccacgcctggctaatttttctatttttgtagagacgaggtcaaccatgttgaccaggttggtcatgaactcctgacctcaggtgattcacctgccttgacctcccaaagtgctggcactaccagcgtgagccactgcacccagcctcttacggagatattttggatctgggttgttaaccagcccactggggttcctgatatagggaggtggagaataattatttgagaaacacagatagaggatgtgatggaaagaagttggtgccaatgttgattttgattaggaaaggtggtgaatcatgaccagggctgagtcctaaaatctgggtgtctgggaatctgaaggtcttcttgggggctttatttttcaaaccttccctagtgaattgatttagtctacttctctggtttgcatactggaaaactcaagatgtactgaagcagagtgaggggaggggtctccaagctcccactggtactcccccacccccagagcagattctgatgtattattcactgacacccccaaagcctagcaaagggtcggtgcccagagaagatgctcagtaaatagttttggaataaacagatgctgtagtggggagaagggtttggattctggatgatgggagaggcttggctgcaaaactctcttgtcccaggaaactagccagaactgcaagttaatttccagttgacagccagttgcttgtggagctctggaggatgtgggggtgaggtgagagcacccatggggagggctacttctaaccagaaccttttttctgcacttcctgcagcttgagattaagaaccatgtattcttcagccccataaactgggatgacctgtaccacaagaggctaactccacccttcaacccaaatgtggtaagaggtcacagcattctagactctggatttccggggctgggggagcttgctatgcttgccaactctccttatctagatggaaaacttgggggtccaagaagctcagtcatttgtcctaggctacacagtcagttagagacagaactgggcctgactacaggtgcagctcttggataaacagccatgttgctgctcctttgtcttgagcaccaataaataactctggctgcagagacttttacagtttgtgaagtgctctgtttcgcacagcacacccacatagggccaagccctttagagatattttatccttttctatttatagactttttcctgataataaaaatgacatatatccttataaaaagtatgtaaaacactggccaggcacagtggctcacgactgtagtatcagcactttgggaggctgaggcgggtagatcacttgaggtcaggagtttaagaccagtgtagccaacatagtgaaaccccatctttactaaaaatacaaaaattagccagacatggtggtgcacacctgtaatccctgctactcgggaggctgaggtgggagaatagcttgaacctgggaggcaagggtcacagtgagccaagatcatgccattgcactccagcgtaggcaacagagggagacttcatctcaaaaaaaaaaaaaaaaaaaaagggaatgtatgtaaaacagaaaagtttaaagtagcagtggcgaaatgcttattatctcactacttaagggaaaccactggcatatttccttccagtcacttttctatgtgtttttttttgtttgttttgttttgttttttttcttgagatggagtctcactctgttgcccaggctggagtgcagtggcacaatctcggctcactgtaagctctgcctcctgggttcatgccattcttctgcctcagcctcctgagtagctgggactacaggcgcccaccaccatgcccggctaattttttgtatttttagcagagatggggtttcaccatgttagccaggatggtctcgatctcctgacctcgtgatccgcccgcctcggcctcccaaagtgctgggattacaggcgtgagccaccgtgcctggcctgttttgttttgtttttaacctaattaggtcctactttatagtatctatatgtgtgtgtgtgtttattcatctatattatcttcctccttttttggctaaaaactatgttataatttcctcatgtcataaaaaattttataaatacaatttttagtggctgcataatatttccatcttatgttggtaacataatttacttacccatgttcctaatggcaatcttatggttgttactatgttttttctttatcatgatgtgctgatgaacagctttaagtatatgtctttgcccagaattctggtcatttctttaagatggattccatatggggaattcccaatgctaatgttttttagattctttttttatttttattttatttatttatttttttgagacagagtctcgttcgatcgcccatgttggagtgcagtggcacgatctcaggttcaagcaattctcatgtctcagcctcccgagtagctgtgattataggcatgcgccaccacgcctggctaatttttgcattttcagtagaaacggggtttcaccatattggccaggctggtctcgaactcctggccccgagtgatccactcgccttggcctcccaaagtgctgggattacaggcgtgagccaccgcacctggccatttttaggttgttgattcacaccaccttttcactgtgtggaagggagaaccatctacttcctaccagcggcacttgctggagagttctcatcttgcttgcactctgaagcatgtgtggttattgttttttactttgcaaatttggtaagtaaaaaacagcatctcttaattgttttaatttatatttctttgtcttatagtaaagatggttagttttttaaatttatttattttttgagacagggtctcactctatcacccaggctgatgtgcagtggcatgatctctgcctattgcaacctccacctcctggggtcaagccatcctcctacctcagcctcctgagtacctcagcctcctgagtagttgggaggtgggtgccaccacacctagctaatttgtattttttgtacagatgatgtttttctatgtagcccaggctgatcttgaactcctgggctcaagtgatccaccccctcagcttcccaaagtgctgggataacaggtgtgagccaccacacctggccagtttttattttcatttttatttttatttttattttattttattttattgaggtggagtctcactttgttgcccaggctggagtgcagtggcacgatctcagctcatggcaacctctgtcttcttggttcaagcaattctcctgcctcagcctcccgagtggctgggactacaggcatatgccaccacacctggctaatttttgtatttttagtagagatggggttttactatgttggccaggctggtcttgaactcctgacctcaagtgatctacccaccacagcctcccaaagtgctgggattacaggcatgagccatcgcgcctggcttttatttttatatttttgagatagagtcttgctctgttgcccaggctggagtgcagtggcacgatctcagctcactgcaacctctgcctctccaggttcaagcaattctcatgccccagcctcccgagtagctgggactacaggcgctcagcaccatgcttggctaatttttttgttgttgtatttttagtagagacggaatttcaccatgttggccaggctggtcttgaactcctgacctcaagtgatctgcctgccttggcctcccaaagtgctagttttgcaatgttaattggtagtggcagtgtgaatgaaaggagtcctattggaggtgggcgtgtgaagctgtgtggtctacctgtaaagcatggtgccaagccccttccatcgaaacagcctgcatatcaaacactgccaatgttaattcaccatttacatttctcatttgtttaattacctattcatgaacttgtctttgggcactggatcagataggatacactcgggccaggcaccagaaaagcttcttttcgttgggattttaaaaagacagtgaagataatgtcgaacttataccctggagagagaaccatacatggaatactaggcagagatgaatggactttagaatgagacactccggagctggattcctggttttgtcacctaccatttgtgaggtcttcagtaagtctctttagtatcattttcttctacagtcacacaactaataagggccaggatgcacattctgatcttggaactctgagtgctgggctgggactaccttgtcttgtagccttattgagaagctagaaactgtgatctgtttggctccatagcccgacttgcacactaaagcagatttgcaagcccttccccttcctcacctgcttacttcataaaacccaggcctcctccacagagagactgtattggttagctcttggtgtataacaagcaactccaaagctaggtggcttaaaacaacaatcttttggctgggcatggtagttcatatctgtaaccccagcactttatgaggccgagctattagcattgcttgaggccaggagttcaagaccagcctggtcaacatggcgagacccccatctttatagaaaaatagaaaattagccaggtgtggtgctgcatgcccagctactcaggaggctgaggtgggaggctcgcttgagcctgggatgtcgaagctatagtgagctgtgatcatgccagtgcactccagcctgggtgatgggcaaaaaagaccttgtctcttaaaaaaaattattttgttcggattctatgtgtttttttttaagtctgagtcaggccagctggtctctgtggagctctctcatatctgtggtcagctagcgggacagttggcagttgttgatctagaattgcctcactcccatgcctgggagttggcaggcagccagggcaactgagttcttcatgagcctctcatgctccagcaggctagtctggggctgttcacatggtggcatcagggttagaagtacagcaagagagcaactcctgatgtgcaattttcaagcctctgcttgtgtcatatttggtaatgtcccattggcctaaccaagtcatatggctaacttacattaaaggaatggagaaatagactccacctctagatgggaaatggagaatttgtgaacatttttgtaatctccctcacaggtcttcctccaaaatagctaaagcagccccagtcaatctccaccatatcaccctattttctcttcttcataggacctatcaccatcctaagttacctatttgtacatatgcttattatcaatcctcctaccccccacacaatgtaagctccatgaatgcaggggctcactttatcttgttctcctgtgttcccagcgccacgaacagtacctggtaggcattcagtaagtgttatgttgattaactgacttgcctgacgattggtgtggaggcagaataccagggggtgagaggaatcaaatgatcaatgtaaatgcacaggaaagtgacagtcaagtatggatgactgtgaagcatggggcactcacagaggcctgacatccctctctgaggatctgggctcctttggcagctctgaccccggtgttttcttctcatcattggcttttattgacagacaggacctgctgacttgaagcattttgacccagagttcacccaggaagctgtgtccaagtccattggctgtacccctgacactgtggccagcagctctggggcctcaagtgcattcctgggattttcttatgcgccagaggatgatgacatcttggattgctagaagagaaggacctgtgaaactactgaggccagctggtattagtaaggaattaccttcagctgctaggaagagcgactcaaactaacaatggcttcaacgagaagcaggtttattttttccagcacataaaagaaaaataatgtttcggagtccaggactggcaggacaggtcatcagatactcagaggctgtatctctgccctgccaaccttgacaaatggcttccaatgttaggtttgctacaagatggttactggagctctagctgcctattttgtgtttagggaagggaaaatggaggaaaggggagaagagcaaagggcgcttttaaagagctttcccaaaagctccacccaatgacttctgcttccatctcactaaccacccacccctacctggaatggaggctgggagatgtggcttatttgctgggtacgtgactatccctaataacaaaggggttctgacactaagacattaggggagaatgttgggtaggcagccagcactcttttaccagagggcctcctggtgtttggattttgatctcaatgtgtaaaatgacagagatgtaacaagctcatagggtatcaatatctcttattgttctatgttgatgatatttgtctttgttgtgggtaatactggacatttgttattgggtctgggtgcctggtatctgaaccccttcttgtctccagagaaccccctattttatgagacttcatgggggggcaataactacctccacttaagagtacctgaaaatgctagacactgactttcccagcctccccttagctagggccaggcatggggaccagggataaacctgtgccacattttgactcagggaagggatcgggagcgctcttttgtgtggtaactgtgataacagtacccgcaaaattgagttcctggtgtagaagtgacaaggatgcaaactgtagcagttggtgctcagtggcagcaacgccatcagaccagccctgcaatgtcattcctggaagcctcaagtgttttttttttttttaagacagtcttgctctgtcgcccaggttggagtgtagtggtgctatctcagcccactgcaacctccgcctcctgggttcaagcaattctcctgcctcagcgtcctgagtaggtggaactataggcacgcgccatcacacctggctaatggtttgtattcttagcagagacagggttttgctattttggccaggctgttctcgaactcctgacctcaagtgatcctcccgcctcagcctcccaaagtgcgggtattacaggtgcgagccactgcacccgcccaagcctcaagtcttgtctagctttccaaatgatctgagaatttctgatcctttttaacacactccttttttgcttaattggccaaagttagctttagatcgcctgcttatgcttggctagttgctgtactagactcttccatgtctgttacaaattttccatccaaacaaccctgaggtaggaattattactgtcccctttttaccaatgaagatgcagagtcagagaagctgttccttgcctgaaggtcacatagctaatgagggccagagctgggacttggagccctacaagctggctccagggctctcacattgaacttttgtgctgatctgcttctcaccctggctattaggtccaggcagaatgactgccaaaatctctagtgaggagctaagtcaaaagttggctggaacaagccaagtataagaaatggggtattgaagaggagacattgaacgggatgccgctcctggtctgagcctggctgccaggttcatgccgtgctccaccgcacattggggagctcagagctggacagagctggaggctgctgcagacttgatgcctagagcttcctgtccaccatggagctccatatgttcaagattagtcttttttttttttttttttttgagactgagttttgctcttgttgcccaggctggagtgcagtggcacgatctcgactcaccgcaaccttcgcctcccaggttcaagcaactctcctgcctcagcctcctgagtagctgggattacaggaatgcgccaccaggcctggctaattttgtatttttagtagagacagggtttctccatgttggtgaggctggtctccaactcccgacctcagatgatccgcccacctcggcctcccaaagtgctgggattacaggcgtgagccaccgcacccagccaagattagtcatttctaaagataattctgatcggacagaacgtgagcggtaacacctcataaattcagaacaccctgcacttgtgggatggattgtgcttccttacttcagtggaaaagtggttcgtttcggctgggcgtgctggctcacacctgtaatcccagcactttgggaggccgaggtcaggagtttgtagaccagcccggccggtatggtgaaaccctgtccctactaaaaatacaaaaatttagctgagtgtggtggtgcatgcttgtagtcccagctactcgggaggctgagacacgagaatcacttgaacccgggaggcagaggttgcagtgagccaagatcgtgccactgcactccagcctgggcgacagagtgtgactgtcttattaataaataaataaatacgaaaagtggtttgtttttttacaaatgtgtggttcatactcctgggtggccttattagcttttttggttgggagacaagggaaggaactttcttggatcagtgtgtgctggtgattttattgccttttcctcttaattcaatcccactctttcccttcctcaagtcttgttcacccagcctcctgccccaggaatcacggggaagaagtctgggagaccacagaaaaaacaccaatgacactgagctattagagatcaaaactgggtcaggaagagttcatgttaagctttcacatgtgctaagaacgctgaaagatacacactgatttccatcttaatagtgccagataattgacaaatttgggacaagatgagggagaggtcaaaatccccctaacttcccaaagcaaaaaaacaggagtataatgatcagaaacgtaatagtagtgtcagaagcacacaatcagctgtggacggtgaaacatataatggttctatctgttctgagattgtaaaagcacaattattttcatcaggataaaaaataaaaatgaaaaactatgctgttgaatggaa

SEQ ID NO: 622 - DNA, 54842 bp, Homo sapiens
aggtcatttttgcagcttattgtgatgacaacagtggaggatggtcttccacttcaccttaaaagcggctgttctctgattatcattaagcatggccacgcccgcacttaacttctgacagtggggaaagcagctgtgtgtgatagcttggaaggtttactgctgcctcaagtcctcttctctgcagttgaggtttcaggtttcaatcctcccaataccacaagacagagcacggggcggctgccgcctccgcctccgcgccttaacctaggcggcttgccgaagatctcagccccgcggccgcgcgctcgccctgccctagaccagggttgggcgcagcggcggaggtggcttctgggctgcgcgagctgggagagctgggaggcggcgatcgcagctgggccgggacttccttcctccaccgcacggcaacaaaacaaccctgcggcaggcactgagtgcttcgcagctgtctgggcgagaggcacagcgatgggctccgtgctgagcaccgacagcggcaaatcggcgcccgcctctgccaccgcgcgggccctggagcgcaggagggacccggagttgcccgtcacgtccttcgactgcgccgtgtgccttgaggtgttacaccagcctgtccggacccgctgtggccacgtgtaagttccaggggagctcggtttgcgcccacccctaaggagggcgatgtggggaagctgagggcatggtgtggggaaggagggggacggaagacagcctcttaggaaattgctgcagggagaaacctggacccgtcggatgcaggaccacggggaaaacgcgggtcggaaggtgacacaggatttcgggaggagaaaaaataaacaagcgggtcctgtagcccccttgcgctttcagctcccgaagcccaggtgcggaactccagagaaggggatccaggcacgggtcccgcccagagccagggctcgccaactggggagggtgctcttggctggagaaccagcgctcgcccaggcacggaaaggaaacgagctccagctacaaggcaggggctcccgcaaagcgcagttaccccgctgaacacggtagaacgggctgcgcttccctctgccccagaaacccgggtccgttttgttttgctggagctgtgcacgtgttcccagaatgcccacagaggctcgtcttaagcaaacaaggatctgtgcaaagtgtctttccacccccacccctgctaccctttcccaacacagacacccagcccctcaaagggcaagtcaaactggagcttccgagtgactttccacagttgttagagtttaacaacctgctagggtggggcttggacgttagccgccaagcccctgaatgtactccttcaaaacccagccacaacgtaacaggaggtggcaggctacctgctttacgcacggtctctccaaaccggcggaaattacagagtaaaataactttctcaaaaccgcatagtacttagctaaaactcacagttggtgcaaagccgtggtcgtttctaagaagaatttaaaaacaaagtccctatataaaattggcacatccttaatgtgtgtttgaataactggtggagttggagctgtgaatttgtgctctctgtttactgtgtgtgtgtgtgtgtgtgtgtgtgtgtgtttgagagagagagagagagacgtagtctggctctgtcgcccaggctggagtgcggtggtgctatctcggctcactgcaacctccgcccactgcaacctccgcctcccaggctcaagtgagtctcctgcctcagcctcccgagttgctgggattacaggcgcccacccccacacccggctagtttttgaattttgagtagagatggggtttcaccatgttggccaggctggtcttgaactcctgacctcaattgatccacccacctcggcctcccaaagtgctgggattaaaggtgtgagccactgcacccagccttctctctttgctttgattttttttcgtggatacgtgtgtgtgtgttgtgtctgcacagatcaggagcggaagcctacttaatgtcctttgaagggtgactatagtatgatgaagccatgtgtgataccacagtggcttgtaccagcatttggcttagcaggaagaaagaaataccgttattatgaatgcaagtgcacaacatgtttttgaggaccacttttgaaaggatttaggtagtccttaaaaacatgttgtgcacttgcagtcaaaagttttgacgcccggcgtggtggctcacacctgtaatcctagcactttgggaagccgaggtggatggatcacctgaggtcaggagttcgagaccagcctggccgacatggtgaaacctcgtctctactaaaaatacaaaaattagccaggtgtggtgacccgtgcctgtaatcccagctacctgggaggctgaggcaggagaactgcttgaacctgggaggcagaggttgcagtgagctgagatggcatcattgcactctagcccgggcaacagagcaaaactcagtctcaaaaaaaagaaagaaaaaaaagaaagttttgaaaggacttaggtaatccttaatacctatagccttgtatctgaaaagcagttttcactactgcccgtctgtgagccagggacaaaagtgtgcagcctgcacaatgtataaataaagagtgctttgggcattatttcgtagctgtgttttcttttcttttgagatggagtcttgctgtgttgcccaggctggagtgcagtggcacgatcttggctcactgcaagctccgcctcccgggttcacgccattctcctgcctcagcctcccgagtagctgggactacaggtgccgccaccacgcccggctaatttttttgtatatttagtagagacggggtttcaccgtgttagccaggatggtcttgatctcctgacctcgtgatctgcccgcctcggcctcccaaagtgctgggattacaggcgtgagccatggagcccggccgtagctgtattttcaaggcctgttgtttcagctttgttcttaaaactcgaggcttaaatttaccctcctttctattactgatgttgttgctcagctgtccagatgtagcttattaacataatatccacaggccagtctggaagccaagatgggctgtgtgagtcataaaatatattgattattttagggcaataacagcctaaagatatctccatttaaattgagtcattattagcattaaaactttaaagttgtgcaaaacataaacagtgggcgttttgaagattctttttggaacagaccgctttgctattcaatgatctgactggagattgttttctcggtttggactttgaatattataatttaccatttacaatatttttccttctactaaaggataatataaatttgcaaaatgttaaattttttgtttaatctttttctttgttaaagtgaataggaaactagcaactggaaaaatagtcataaaatagcattacaagggctgaacaaattgcctttcctctctttactgttctttgttttgacaaatctatgtccattgttctggctgtgggcagaatttccatattcctccttttggcaaacttacttggtccccttccactttataaatgttaaccagagtcctttctgcagtagagattgtgagcgttaataccatttgtacattctaaatgaattactcttttccattgaaattaagttggaaaacgaataaatgcaaatgaaccttctgtattttattatcccatattgaagctacattttcagacatgttgaactaggtggtttatgctgatttttgtttgtaaacctatttcaagtcaaacaagtttaataataacaacagtaccttgaatgaatatgtaagagcactttataagttgtattgtgatgcagtagtaactggcccttacagagagctggatttgaaattcacctctgccactagccagatgtgtgaccactttagggaaatttgaatttgatttttttcccctaaagttttgatcatttgagtctatgaaacaaactgctaatagattaacaaggggggaaaagcttacaaatgtattaatgagcatatgggcatgggagtcatacaaaatatgaaaactgagagaaagggccagatgcttgatgcttttataccatcttgaggttacagcagagtaggggcttggaacatggttatgggagggagaaagaaagaaggggctggggcaaagatggtctagttatgcagatgaaacttcatagatagcagctcctagaaagaataggcatgagcctgtgttaagttgctctgtcagaccttcgtaggtgtcagactttcagttaataatttcctaggtacagataagggggtgcctccaagaaagcctggttgtttatttcaccagtgtagattttctctacagatgcaagtctcctccacaaaaggcagcttttcagggttattcctgtgggaatatatcaaagaagtacattttggggtgaaatattttcagtttcctttagtcccccatttaaagcttaatttttaaaacattaaacatttcctttatttttattatttatttatttatttttagcggtgagatctcactctgccacccaggctgcagtgtagtggtgcaatcatggctcactgcagcctccacctcctgggctcagcaatcctcctgcctcagcctctcacgtagctgggactataagtgcctgccaccatgcctggctatttttcacttatttgtttattttgagatggagtctcactctgtcacctaggctggagggcagtggcgtgatctcagctcgctgcaacctctgcctcccaggttcaagtgactgtcccgcctcagccactctagtagctgggattacagacatgcaccaccacacctggctagtttttgtattttttgtagaggcagggtttcgccattttgcccaggctggtcttgaacccctgagctcaggtgatttgcctgcctcggcctcccaaagtgctggaattacaggagtgagccactgcacccagccaagaaagtgacaattctttacataccgcaaggtcaggattttgtaagggaaccatatacacagggtaccaggccaatctttttctaagtctgttggctttttaatgtcaatttcagtccctcaaaacagtttgatcatgtatctaagtatgacattccagttaaagccttgctaaaataaccactgtctccaattatgtcctgttcagactgttactgaacttatgcatgtaactatattgccatgaaataggaatactcaaaacccagtttgtgaatccaaagagaaaaaggtaaattattttgctcacaaaagtatacttggccaggtgcagtggctcatgcctgtaatcccaggactttggaaggccgatgcaggaggatggcttgagaccagcagtttgtgactagcctgggcaacatagtgagaccccatctctactacacaaaagtcttgttcaaaagagaaaaccatattttacttttgaatcagtatatcaataataaatttaaataaaacctaataaacaagtccatccaatttcagtcagctttgaccacacaagatttacatatcttttataacctcttacgatttttcttctatttccaactttctatattcacttagttttatctatatctttttttattctttcaatttgaaacaagcttcaaataacttctaaactagacacaattcgttttccattaacaaaaaaatcacacttcatgccattcttttttttttttttttctttttttttttaagatggagtctcactgtgtcacccaggctggcgtgcagtggcatgatcttggctcattgcaacctctgcctcccaggttctcctgcctcagcctcctgagtagctgggattacaggcgtgcaccaccacacccggcctcatgccattcttacaacctttctctccaagaacatatcttgcttttttggtatattctgcctgaagaattgtttgtcttatttctagtagttttatttgtttgtttttagagatatgatctaagaacaaactactcagtgatgtgatcatagcctactgcaacctcaaattcctgggctcaagcaatcctcctacctcaacctcctgagtagctggaacaacaggcatgccccaccacaccctgctaaaattttatttttttatagagacagggtctgcctatgttgcccaggccaatcttgaattcctaggctcaagtgatcctcctgccttagcctctcaaagagctgggattacaggcatgagcactcccaaactgctgggattacaggcatgagccaccacacccagccaactaacaatttaaaactagctttattgctgggcacagtggctcacacctataatcccagcactttgggaggccgaggcaggcggatcacttgagcccaggagttggaaaccagcctggtcaacatggcgaaaccttgtccctactgaaaatactaaaaaattagccgggcatggtggcgcacatggaggctgaggtgggagaatcgcttgaacctaggaggcagaggttgcagtgagctgagatcgcaccactgcactccagcctgggtgacagattgagagtcgttctcaaaaaaacaaaaacaaacaaaaaaacctagcttgatttaccaaagattactaaagtcatatgaacttcgaaaaacatttgggatagttaatttgtgagtactcatttatttagaagtcagtttggtactacagactatacaaactcatgtgtaaacatatatatacatgtagacacaacatatatcacatgcacacaccagtatccaaaagccagagagattaggaagtttaatgcaggagagcagaactttagacatgagaggatggaccctgcccatggcttctgtggctcagtgagaagacagaggacccccaatggccaggcgtggtggctcacgcctgtaatcccagcattttgggaggctgaggtggggggatcacctgaggtcaggagttcgagaccagcctgcccaacatggcgaaaccccgtttctctaaaaatacaagaaaattagccaggggtggtggcaggcacctgtaattccagcaactcaggaggctgaggcaggagaatcacttgaacccaggaggtggaggttgcaatagccgagatggcgccactgcactctagcctgggtgacaagagtgaaactctgtctcaaaaaaaaaaaaaaaaaaaaaaaagaagacagaggacccccaaagaggggcgattggtggcttttgtgtttgtgtatgcgtgtgtgtgtgtgttcctcaaggggtctcagggttcacagaagtcccctctaggcctcttcatgtggtatcaaaaatggcaaaaaggaggaggggcagaaggggaaggaaatggaagaacaagtcttagaggagccaatttggggagattttaagctttcaaaaggccaatacagttttagttagtaggagtctgaggaacaaaaaaaggtctagttgactaagaagttcccaagggagaaacaggatttgaaagagaacagagaatatcagctattaattaagctggcttttgaccacagagccatctttcttaaaaaaaacttttttttttttttttgagatggagtcttgctctgttgcccacgctggagtgcaacagcgcaatcttggctcactgcaacctccgcctcctgggttcaagcgattctcgtgcctcagcctaaaaaatccttttaaatatgcaagcagcaaacattttgtcctctgagcacccggtcttttttttttttttttttttttttgagatgtagtcttgctctgtcgtccaggctagagtgcagtggcccgatctgggctcactgcaacctctgcctcccgggttcaagcaattctcctgtctcagcatcccgagtagctgggactacgagggtgtgccaccacacccacctaatttttgtatttttagtagagaagaggtttcaccatgttgctctcaaactcctgacctcaggtgatctgcctgcctcggcctcccagagtgctgggattacaggtgtgaaccactgtccccagcctgagcacccagtcttttgtgggagcagagagaatggtagctgtggcatttcatgcttctttttccccagaccctcccagcaccccctctttagggggtacccacctctcctcacctgtttggttcccagctgtagcaggaggtatgtctctctggccccgtagaggaagcagattaatggggaaaaagttactatcacactctaaatataaaccaacgttttaaccaaaggaaataactcaaaatcaaaacaaataagaacatttgagactgaaaccaagaagctcttgatggcttcaaccaaggtttcctaagagggagcaaaagttgcaaccctttcaaaatccagatcattccctacaacagcttaaagaaagcaaggttttgccagccgcaaatggggtacaacccacatttttgtctggccatattctctagggtttaagacagaggaaaacaacagctggatgagaggcttacagaatgaatgggtaccccaaaggttaagaagtcatacaaatataaattcaaaacaattcaaactaattttttccaagtatttcttttatttttccttcctgagttaaaggatttacatctcctggggtcttgttccctgaaagggaattgaatccaggctgcagtggtgaaagtgcagaatccttaccactggactacaggatggagtcttttttttttttttttaatttaacaaatttcataaggaatctaaagcatgcaatttgagtacaaaggattttaactttgttttaaatctgatttctacttttcaaaaatcttgccgagggagtttctaaacctgtattccttttgtatcttttcataggtaccaataaggtagctatttaagatgtgagctctaaaaagttttcttttaaatatagccattcatttattttaaaagcgattgaaaccaatacaagaactaatttatatgtttttctctgttgatccaaatttagaaagggtaaaacacagagactcataccatccacatttgaccaggcactataggcagagatcggagaggagaactgacttggttaaaaaaaaatgagtttacctttctttgctggcttttcatccgttgttccaagatcccattcattggctctagaatgaacaaaatgacttacatcctgatcacaacaccaaaaatttttctcctaaagattcgatactttgagtctataaaacaggcagataacagattaatgggataaaagcatacacatttattaatatgcatatgggcgtgggagtcatacaaaatatgaaaactgaaagaaagggccagatgcttgatgcttttatacttgaggttacagaagaatgggggattgcaagatggcaagacaagttataagagggaaaaaaaaacataaggggcaaagctgttcttgttatacagatgaaacttcacaggtagaagctctcagaaagaatgggcagtagtcggccgggcgcggtggctcacacctgtaatcccagcactttgggaggctgaggcgggcggatcatgaggtcaggagatcgagaccatcctggctaacatggtgaaaccccgtctctactaaaaatacaaaaaattagccgggcatggtggcgggtgcctgtagtcccagctactcaggaggctgaggcaggagaatggtgtgaactagggaggcagagcttgcagtgagccgagattgcaccacggcactccagcctgggcaacagagcgagactccgtcttaaaaaaaaaaaaaaaaaaaaaaaaaaaataataggtagtggttcatgataagtttttttgttagaccttcaaacgtttcagactcttggttaatctcctagattgggcaggggagacctcagaaagcctgcctatttatttcaccaatgtagactttctctaccaatgtagacttttctctcccccacaacatgcagcttttcagggtttttcctttctgcaggccatctcaatagccatctcgaagtatgtcaaataattatttttgggggtaaaatattttgtttccttttttttttttttttgagatggggtctcgctctgttattccggctggggtgctgtggcgtgatctcagctcactgtaacctctacctcctgagtagctgggactacaggtgtgtgccaacacgcccggctaatttttgtattttttagtagagatggggttttgctatgttggccagactggtttcaaactcctggcctcaagtgatctgcccacctcagcctcccaaaatgctgggattacaggttgagccaccctgcccagccaattttctttaccactaagttgcttaatctctttgaatctctgtttcttcatttgtaaaatggggtgagtagtgccatttttatgaatatttaaaatgtaaaagtatcccatagtaaaggctcaaaacatggtttctctttccttcagtcattccataagcaaaaccccaggaacagatattatttcttatctctgtatttcttttggaagaacactgtgccatgaaaagttgatctatgacatttctaagatgtctcatatagcctcacttttagcttagttctttttcctttggtggactttaatttaagaagtttcactttaatgttttataattttaagtgaactttattcatattgctgtatcagttgtaaaaaatagatttgaaggaagagccttctcacttctgccttatcttctattagaaagctggggtgagagccactagataacttggagctgtataaatggaacttaaaaggagtctggaggctgggtgtggtggttcatgcctgtaatctcagcacttcgggaggctgaggtggaactgcttgaaccccagagtttgagaccagcctgggcaacaaagtgagacctcgtctgtacagaaaaaaaaaaaaaaaaagctgggcatggtggggcatgcctgtagtcccagctactcaggaggctgaggtgggaggatcacttgagctcgggaggctgctgtgagcagtgattgcaccactgcacttcagtttgggtgacagaatgagaccctgcctcaaaaaaaaaaaatgatttacattcaaaggaaatactcaaagacatttgttgtcagattgaaaacagtagatgcaagggagaaagatatcaaagccaaccactgggctttaaggctggtgaataaacggggtcagagagactggcacaggaggaagtgagtgcactcatgaatgggcctgctgaatgtacagcagtctgataggcagatatccaaatggaaatatccaaaggctctggaggaatagactgggggaaagagatcagggctggagactgagttatctaaaaagcatctagaggttgagaatgggctgaagagagctaaatgaactggagcacaccataagaaagagccaagtctccattgacctcagatacaactgctctaagtcatagaatgtacctaatttttatttttattttttattatttaatttaattttttgagccagtctcgctctgtcacccaggctggagtgcagtgatgcgatcttggctcactgcaacctccacctcctggttcaagcgattctcctgcctcagcctcctgagtagctgggactactggcgcatgctgccacgcccaactaattttgtatttttagtagagacagggtttcaccatgttggccaggctgatctcgaactccagacctcaggtgatccgcccgcctctccctcccaaagtgctgggattacaggcgtgagccaccctacccggcagtgaatgtacctaatttttagaaaatgaaactctgtttaggataattctgaaatactttcaggtaaatggattgaaacgttcaatttgtggtcaagtatgagcagtaaagcgtacatcaaattggtggtttcctaagtagagtctgagagtcttcctgatgagttttaaattgatccagaaatatgcatgagtggctttcattcttacaggacatttgcaatcccactgtaaaccaaaaataaaattctaaggcccccaaccaactgaatggacctttcctctctgccaagggcattctaaagtaaaccagaaacactagttcacgccatgatgggaatgggtatttatcaaatactacagactgggtaatagataaagaaaagaatcttttcagctcacagttctggaggctaggaagtccaagagcgtggtgctgggacctggctagggtcatcccctggtggaaaggtagaaagaagttggcagagtgggaaaatgcacgtgagagagctcgcttattattttattattttattttttagagatgggggtctcactatgttgcacaagctggactcaaactcctgggctcaagtgatcctcctgcctcagagagttggcttttatagcaaagccacttctgcaagaactagcccactcctgtgataacggcattcatccattcatcacagtggagcccttatgacctaaatgcctcctgaaggttccacctctcaataccaccacaagaggaaccaagttttcatgcttgaactttggggggacacattcattatatcaggcctcctggttatacaggcacattcatggtcttatatttgtgacttctgcttgttactgggaagaactgaggtttcttgaaaagactacaaaatttgaggccctacccaaactgtttaaggatcagagcactactgtctgtggctgcataaacttggcacgttgctacactactctgaaccttagtttgccatcaataaaatgaggagaaagcacagtagcgttttatgaattattgtaggagcctacaataataggggataatgtatacaagtgtccgccatagggctcggcaccagtatttgtattctgcttgcattggcatacaactcaaattgtgggaaaaaaaaaaaaaaaaaaaaaaaaaagggaaaactgctagttgacaaaaaaacaaaatgttatctgcttgcctctaaataatgtaagcaaataattcatgtcagaaccataagtgttgtattagaaatgttaattgtgagttgagcatttgaaccatttgtcataaatttcattcaagactacattttgagaacccattcttagagactcagagacatccaaggtcagattgtaccttagaacttataattagctgagatagaaagaagtaaaatatgtatagcagagaacttagatttcttgatcttaaaatattgatcttcccaactggggtagctgtggtagtggaataaaaggttactgaaatttgggtcagaaaaccccagcttaagaccaaccaagttcaagcactttcttttttttttgagagagagagatggagtcttgctgttgcccaggctggagtgcagtggcgcgatctcagctcactgcaacctctgcctcctgggttcaagtgattctcctgcctcagcttcccaagtagctgagactacaggcatgcaccaccacacccagctaatttttgtatttttgttttgttttgttttgagacggagtcttcctctgtcacccaggctggagtgcagtggcacgatcttggctcactgcatcctccgcctcccgggttcaagtgattctcccacctcagcctcccgagtagctgggattacaggcacccaccaccatgcctggccaatttttggtatttttagtagagatggagtttcaccatgttggccaggctggtctcgaacccctgacctcaagcgatccacctgcctcagcctcccaaagtgttaggtttacaggcagaagccaccatgcctggctgtattttttttttttagtagagacggtttcactctgtgttggccaggctggtctcgaactcctgacctcaggtgagccacctacctcccaaagtgctgggattacaggcatgagccactgtgcctgaccaagctcaagcactttctatttatgtgatttttttccccccaagccaaactttatccagctttattaaagatactttccataaacagtcacagtatttcaagcaggacgtgggcagacaatccttaacagtatgcaacaactttcaaactcgcttcttcaatggactaccaaaaaacataaagccactttaaaacccagtggagggccgggcttggtggctcacgcctgtataatcccaactacttgggaggctgaggcaggagaatcactggaacctgggaggcagaagttgcagtgagccgagattgcgccattgcagcctgggcgacagagcaagacatctggcaaaaaaaaccaaaaaaacccaaaacaaaacgaaaaaacccaatggagtattcatttgatactctgaacaagaaagtttagggtgagggttgacatttcacatttagcatgttgtttaacatgagccgaccctgactttcagggagtgaaatgaaaatggcagaatttgtctgacgatacacaatgtagaaattgaaccactgctcttttgaggagccccatctcagtggcatcactggaaagtccagattgcctgacatgctggtaaccaattattgggggccagtccccaacaggtgtgtgggtttaacggagttaagtttatgctgaagatggaaagggagaagaggacataggaacaaatttgtttttccataccacaaggctgttgtgccaaggtgtctgtgtttgtcaaagtcagggaatcccttctcctgggagccaagaggaagcctctcaaaactagaagggaacaccagcctggccaacatggtgaaacccctcctctagtactaaaaacacaaacatttgccgaacatggtggcacatgcatgtaatcccagctgcttgggaggctgaggcagaattgtttgaactcaggaggtggaggttgcagtgagctgagatcatgccattgcactccagcctgggcaacaaagcaagactccacctcaaaaaaaaaaaaaagtctgggcacagtggctcatgcctgtaatcccagcactttgggaggccgaggagtgcggatcacctgagggcgagagtttgagaccagcctgaccaacatggagaaaacccgtctctactaaaatacaaaattagctgggcgtggtggcgcatgcctgtaatcccagctactcaagaggctgaagcaggagaatcatttgaacctgggaggtggaggtcgcggtgagtcaagatcttgccattgcactccagcctgggcaacaagagtgaaatttcatctcaaacaaacaaacaaacaaacaaaaaagtagaagggaaaggtgttttccccacatcaatccagcttctagacgttctattagtgacagtgactgatatcccatccccagaaaacaacaatgaagtgttctgtgtgctaacaacatacctttaaaaaaaaaaaaaagaaaaccaaatactgcatttttataaaacttgataaaaaatagtatttcaaactgtacagtcaccacaagtacatagttatcacagatgcacacacttgacctggcacctccagcaccttggcttcctgtgcctggtctgtttaggcatctgcattctctgcagggttattcccctccttgccaccatcagttcttccctttttctctttgggtaccttctctcccttctttgcaagggtctccttagacttggctttggagaagcaagtttaacagacaacctcgcggatcttctctgtggttcatccttcaccttggcgttatctccttagcatcccgctcagtctttctcttgagcagggcggcagctgcagcgggacataagccctgggtaagggatgcaacagcgcataggttatagtcggtctgggggttgttcttgctgcttcttcacactgttcctttacgtgatcttgcagaagcaacttaccctgtatgtgccttggtttccttatctataaatggaaataatgatctttcttgggagtgtattaagattaaatgaattaaggtatatggaagagtttttaaaaactttggtagagaaccagtgtatcaagcttgaaattagacataaaaaattactggccgggcacagtggctcatgcctgtaatcccagcattttgggaggctgaggcgggcagatcacttgaggtcaggagttcaagaccagcctggccaacatggcgaaacacagtcgctactagaagtaaaaaaaaattagccgggcatggtggtgcacacccgcaatcccagctacttgggaggctgaggcaggagaattgcttgaacctgagagacggaggttgcagtgagccgagattgtacctgggcaacagagcgaaactccatctcaaaaaaaaaaaaaaaaaattaccatacaataacaaaaatagctaaaaggaaagggtaggaaccaaggcagatatggagttctacgtaaagggagaaaagttccatctggttgctactgaatctgtcattatgtcactgtgtgcagtgttcaacttccagagacatggtctatacttgacttggcttgccaggtgctcatgccttcagcaggagttggtaggcaccttgatttaggtcccactgagactatatgtaatataagaggtattgttcctgaagaacaagagcaggatgctattgcaagaaaaaggaggaatggatgctggacaggtataaacaacaagtagatgtctcaatcactgcacaagtgagcatcctctgtgtgcttatagtaatttgataacagatgcagaagagaatactgttacgaatcagtcatgatccaagccaaattcaaacataataagaaaaaaataaagaggaaaaaaatcggtagtgactaatataattaggagttaaagaggaaaagaagaagaagaattgtttggaaaatagctgtgcctgcccatcactaaagtttatcatcagcaagtatttaaatactacccagatgtccattaacaacagaagggtaaataaatttgggtgtattcatacaatagacttcacaaaattagaatggacaatctcaactatatacaacaatataatgaatcttttgaccataatattgagctaaagaagaccaagaatacataccagagggttccatttataggaagtacagaaacaggcaaaactgatctttgttattagaagtcaatgattagcaccaccaaggatggtaagcagggatgagaaagctgcagtctataggctggtacaatgtttgaaaagtataattttcatatgttaaaatacattttaaaaagtcagtgattactttggaggggatagaattgtgtctggaggccgggcacagtggctcacgcctgtaatcccagcactttgggaggctgaggcaggtggatcacctgaggtcaggagttcgagaccagcctgaccaacatggtgaaaccctgtctctactaaaaacacaaaaaattggccaggcgtggtggtgggtgccagtaatcccagctacttgggaggctgagtcaggagaattgcttgaacccaggaggtggaggctgcagtgagctgagatcgtgtcattgcactccagcctgggtgacaagagcaagactccatctcaaaaaaaaaaaaaaaagagaaggaaacaagaggggaaattttaggggctggccacgctgtttttgttataggtactggttatatggatgtgttcagttttgaaatttcattcaactatatgcttataagaactttccagtatgtacagtatacttaaaatttaaaaagcctacctttggacatgtattaatactcccaaatagatattatgtgctgagtagtttaagaggcatcaggtcatgctcatgtgtataaattacccaaatgctcatttttatttctatgtttatggagtcttcaacaactcctataaataggtcagaattttctggaaatgttgattatgttaagatttcataatgagcacctttaaataaaccagagaacatatttcttgaccagaaaggaaggaaggaaggaaggaaggaaaggaaggaaggaagaagggagggagggaaggagggaggggagaggggagggagggaggggagaggggaggggagggaggaagggagggaaggagaaaatggttttatagggaattataatgtgtctggtatttttacttccttgacttcctgctattttcttatgtgacacacaaaaccccacagaagaaagacatattttctcaagaaatttgaggtaaaatccaatttagacattctttaaagtatcgtttaaacttagcctataggaaagctatttcacccactttgaattcttacttttcttgaaatgtgtgaaagtgcatgtggtaagaatgtgtgattctaaagaagtcttgctgggaaggtaagcaattctcgggaagtgcagggtgcaagtggacctgtaatttggtagtatggctcatggggtacgaggtgtcattaaattacagtttacacaaatgaatacatggtggtggctccttatagctttcaaggaaagtgatgtatttttggtctgtttggggtagattctgccgttcctgtattgctaccagtctaaagaacaacaagtggacctgtccttattgccgggcatatcttccttcagaaggagttccagcaactgatgtagccaaaagaatgaaatcagagtataagaactgcgctgagtgtgacaccctggtatgtatgtgaccccacctattttcatggttaccagcttaagtccctgcgaaagttatcatttcacctctgcttctgaccccatggtacgcacctttttttttttttttttttttttttgagacaggttctcgctctttcacccaggttggagtgcagtggtgcgatctcggcttactgcaacctccgcctcccaggttcaagtgattctcctgcccgcagcttctcgagtagctgggtctacaggcacctgccatcacgcctggctaattttttgtatttttagtagagacacggtttcactatgttagccaggatggtctcaatctcctgacctcattacccgcctgcctcggcctcccaaagtgctggtgagatgtgaggccagctggacttcccgggtagagtggggacttgggaaaccttcctgtcttacaagaggattgtaaaacacaccaattagcgctctgtaaaatgcaccaatcagtgctctgtaaaacgcatcaatcagtgctctgtaaagtgcaccaatcagcactctgtaaaacgcaccaatcagcaggattctgaaagtagccaatcgcagggaggattggaaaaactgcactctgataggacagaaacggaacatgggcggggacgataagggaataaaagctggccaccccagctagcagtgacaaccggcttgggtccccttccatgttgtgggagctttgtccttttgctcttcacaagaaaccttgctaccactcactctttgggtccgtgccatttttttttttttttttttttttgagacagagtcttgctctgtcgcccaggctgcagtgtagtggcgccatctcggcccactgcaagctccgcctctcaggttcaagtgattctaatgcctcagcttcccgagtagctgggactacaggcatgtgccacaatgtctggctaattttttgtctttttagtagagagagggttttgctatgttggccaggctgttctcaaactcctggcttcaagtgatctgcccaccttggcctccaaagtgctgggattacaggcgtgagccatctcacccagcctccaatttcatatatgtacatatatcatctgcagaaaaccctgaacttctaccatcacccgtaatttgtcaaacaaatgctttcattgaccacctccattttcccttcttcccattactccagtgatcctctatgatatgtcctccagttctgctactctgttgcagaccactaatgaatagctttattatcaaacccagtgacatatttccacctgtattgatctggactttgcagtatttgtctctatcaagcacaccttgcctgttgcagttttcaacttgggtactatatcagcttccccagatcatgtgaggtcttgaaggttatgtagaagattctagattttatcttaaatgcaatagtaagccagagaaagagagtaagttttggagtgccaagatcgggcttatatctttatttttatttttatttgagacagagtcgcactctgttgcccaggctggtgtgcagtggtgcgatctcagctcactgcagcctccaccttctgggtttaagcgattttcatgcctcagcctcccgagtagctgggattacaggggcccaacaccacgcctgtctaacttttgtattttcagtagagacacagtttcaccatgttggccagtctggtcttgaactcctgacctcaggcgatctgcccgcctcggactcccaaagtgctgggattacaggcatgagccaccatgcccagcccaggattgtatctttaagatatcactctaacatacacatagaaaatggtttggaggccaggcgcagtggctcatgcctgtaatcccagcactttgggagcccgaggcgggaggattgcttgagctcaggagttcaagaccaacctgggaagagaccttgtctctactaaaaatcaaaaaaattagctggggcatagtggtatacgcctgtagtcctagatactccagaggctgagtaggaagagcgcttgagcccaggagatcaaggctgcagtaaactatgatcgtgccactgcactccagcttgggcaacatagcaagactctctcaacaaaaaagaggagctggggagaggatcatgttcatgttcatgttagagggtggttttaaaggtaaatgataaatatatatgtgatatatatataactgatgattgtcttttaacacagtgtctggaatatagtaaatgctcaaaattaatagctttttacattcttaataatagattattgcctatttttactttgtcttcacataaaattcatacacaaaatcaaactcattatattgtttaatcatccaattcttgatcccaccttggtgtctgtcagaaacaagaggattctctcaattaacttgtgtggaaatccaccactccccctcccccattatctgattaatcacaaagattttgatttttttctttgagatacttttttttttttttttttgagatggagtctcactctgttgcccaggatggagtgcagtggtgtatgatcttggctcactgtaacctccactttgcacgttcaagagattctcgtgcctcagcctcccgagtagctgggactacaggcatgcaccactatgcccggctaatttttgtattttagtagagacgtggtttcaccatgttggccaggctggtcttgaacttctgaccacaggtgatctgtccacctcggcctcccaaagtgctaggattacaagtatgagccactgcgcccagctttgagatacttcttatattctgtcttttcctttctgtgttatccctctttctaggaatgctccccattccttctacgcacattttgccctctccatgttgcactctctgtgttcttcagagtcccgccagatctccattccttgaggcctggccttagttttccagttccctatatcaaacaatttctttcttttttttttttttttttttgagacagagtcttgctctgtcacccaggctgtagtgcagtggcaccatctcagctcactgcaacctctgcctcctgggttcaagcacttctcctgtctcagcctcccaagtagctgggactataggtgcacaccaccacacccggctaatttttgtatctttagtagagagggggtttccatattggtcaggctggtctcaaactcctgacctcaggtaatccacccacttcagcctcccaaagtgctggaattacaggcgtgagctaccacgcccagcccctatatcaaacaattccttatctacttgtctaacatccttttttcttctgttagattgtaagcaccattagaacaggcacaatgaactgcatttcttctgccattttttataatgtttcaaataatcttgtgtctagactatgaattgatcaattcatttgtcagtagatagtccacggcttgttaattttcatgactaatgcttatctttgttgaacaaagaatacaaatagaaatttttaccagcaaaagtcataaagacatgagagaaccctaatgtgcaaagttggatgttacaggtcgtaaaatacatctgtttaagacagcttgtgcagatcaatcctagtttttatatcttttaggtggatatttgtaaagccagggttttgttcttacttttcacttgcttttatttttgccctttgttaaacaattataactgtttccttgacacggcagatttcatgtttgaggtttaacttccgtagcttgggcaaaatgaagcagagtgggtcggccaccttaccacagctgtacagagcttcctttagcacaagatcttatcagagtttctaatgaaacatttaataggatgtgtgatgttagcaacagatccctcatggttaggctctctgaatgtatatgtgaaagaacaagggctctttattctgcattgatcaaaatggactgcaagagctgtcttttatgtttgctcttaatgggaccattaagtatactgtgtattgtgaattcatgtaatactgttgggtgtgttataaaaccatggtatttatatctttccctaaggcacagtgtttcatttaacttgctatgggcacctctaaaatgtatccatttattcttcttatctgtccatttcttttttctgtctctttttccatcttagattgtttcttctctcttgtgctctttttcttcacccatttttttcccttgcttccttctttctaaaacctgtttatgtaatggcatgcaaaagaagtaaatttgagtcaccacacatctatctactttaaaaaatgtagatgcttttttttttttttttttttttttttttgagacggagtctcgctctgtcgcccaggctggagtgcagtggcgggatctcggctcactgcaagctccgcctcccgggttcacgccattctcctgcctcagcctcccgagtagctgggactacaggcgcccgccactacgcccggctaattttttgtatttttagtagagacggggtttcaccgtgttagccgggatggtctcgatctcctgacctcgtgatccgcccgcctcggcctcccaaagtgctgggattacaggcgtgagccaccgcgcccggccgtatatgctttttagaagaaccaaattcaagaacttaacagttggatcttctaagtatcggagaatttgaaaaatagtagtattcttgataatgccttaatttttggtggtactggtgttacgaatgcatctatttagtcagttgatcccacagtatgaccttacttgaaagttaaaaggctggatcgcataagctttcattgagcccttttttaacagtgagtttattttgaatttgtttttatgtaggtttgcctcagtgaaatgagggcacatattcggacttgtcagaagtacatagataagtatggaccactacaagaacttgaggagacagcagcaaggtttgtttcaatacaatatagtttaatgctaaaattgataatgtttataaagaatttaatgggctggaaactttaacattcttatgaaaatatttacatatttatgtttatgttcttaactataatacctggtactggtaatcatttgttgatagcaatcattgttaaggaattttgcactgtctactttaaaaatttccaggggtaaccaaccacagactggagagattggggcaacttcctcaaacaagtttgtgttaacacagatccaaaaatagaatgcagaactgttacatttctgctaggctttgttttctaatagattcctgaagtagattgtgtttgggattatccatcttctgtcaccactgctcatttcaccagctcattccttatcattttgcttgtttctctttagaatatagacagcagcatctcagtatacaagagaacaggctgggcaggcatcctgaatcctttgcctttttgatgggtaatctcgtatgggggtaggggaaagatggaggtagctgacagatgtaatggaggatattgatagtattttattctttaaaaaaagagaaagaaacattcgtggggtgtggtggctcacacctgcaatcccagcactttgggaggctgagacgggcagatcacttgaggtcaggagttcaagaccagcctgggcaacatggcgaaaccccatctctactaaaaatacaaaaattagctgggcgtggtggcgcacacctgtaatcccagctattctggaggctgaggcacgagaatcacttgaatctgggaggcagaggttgcagtgagctgagatctggccactgcactccagcctgggtgacagagcgagactctgtctcaaaaaaaaaagaaacacatctaagtcattattctcctgatgagaaaggtaatttagctgcatcagagtaattataaagtttgtaatctgcccctactaaccaaataaagtgatctgtgctctctagcaaagattgatggctttccagccattaatctgcctatggattcatgtatccaatattggtattctgtataatttctctctcccagagaaaaatgttagctctgctcatttttagaaaatatactcaaaatatagcttacatttctaaacctaaaagtctaaacaatcacctcattctttttgttttactagagatcgccttgcaaaagtacctattattataggattagctttataccctgactttataaatttcaaatgagtattttagctataaacagagtatggatcctgttagattgaccacaatgaccaataggaaggaaggattaccaatgggttgagaaagtgtatgggtttgattgcaaggttgatggcttttatgaaaatttaaaaatatatgaaagctaatttgaatcccaatttcttttactcattagaattaaatagtaaagaattaaaataatagaaaatggagagggttgttgattattttacaagatatattaatattttgatttatgataaaaatctttgctttacagaagaatttaccacataattcaaattttaaaaattcttacacctagagtttgtccagagtacaagttttgggggacaagaagttacatctgtaacagaaagtgagcaaacaactccaagactccgtattgtccctaagaacttaaggcagtgttgtccagtagaaatataatgggtttttttttttcttttcttttcttttctttttgagatggagtcttgctctgtcacccaggctggagtgcagcagcgcaatcttggctcactgcaacctctgctgcccgggttcaagcgattctcctgcctcagcctcctgagtagctgggattacaggcgtgtgccaccatgcctagctaatttttgtgtttttagtagagacagggtttcagcatcttggccaggctggtcttgaactcctgacctcgtgatccacccgtctcggcctcccagagtgctgggattacaggcctgagccactgctcccggcctagaaatataatgttaatcacatgtaattcaaaattttctagtagcgacatttaaacaaataagaagataaagtttaaattacctttcaatatattttatctaacctaatattgccaaaatattatcatctgaacgtgtaatcagtataaaaattatcaagatattttacattcttttttctttttacattaagccctcaaaattcagcgtgtatcttatacatccagcaaatctgaatttttttattttttttgagatagagtttcacgcctgttgcccaggctggagtgcaatggtgtgataccagctcactgcacttctctttaggagagaagtgcaatctgagcatgcattaactgagaaactgagtattgcagcacccagctgtccttggattaccttttccttcctccctttccgaattcacataacatttagatggggtgttatttgttttccaacttcactagcatataactatgtgcatcagcctatattgttaatttccagtgaagaaggaaaagtgacctgcagtccgggcgaggtggctcacacccgaaatctcagcactttgggaggtcaaggcgggtggattgcttgagctcaggagtttgagaccagcttgggcaacatggtgaaactcctacctctattaaaaatacaaaaaattagcatggtggcatgtgcctgtggtctgagctacttgggaggctgagacaggaggatcatttgagcccaggaagtggaggttgcggtgagccaagattgcaccactgcactccagcctgggtaacagagcgagactccctctccaaaaaaaaaaaatagaaagaaagacagaaaaagaaaagtgacctgcagctaccttattaaatccttatgtacacttaggaatatttgtcacttatctgtgctgtccaagatgtgtccactgggcacttgaaatgtggctagtccaaattcagatatgtgaccaggtgcggtggctcacgcctgtaatcccagcactttgggaggccgaggtgggtggatcaccttaagtcaggagttcgagaccatcctggccaacatggtgaaaccccatctctactaaaaatacaaagattaacctggtgtggtggtgggggcttgtaatccctgccacttgggaggctgaggcaggaggatcccttgaacccgggaggtggggaggttgcattgagctgagatcatgccactgcactccagcctgggccacagagcaagactcttgtctcaaaaaaaaaaagaaaaaaaaagtgactactatctagttgccaaccattttaatattatttgtattctgtgctatttccaggtgtgtatgtcccttttgtcagagggaactgtatgaagacagcttgctggatcattgtattactcatcacagatcggaacggaggcctgtggtaaggatttttgttacatgtattacagcaatgtctgaattcaggacacattaggaaatccatttaatagatttatatttatagataccttataaaggataattatttaagttaaggttatggtaactctgtgactgtttacaatgtgtgaaagtgttcagttgaaactgataagaacgactaatgtgtaatcactcatttatgaaattacacattatctctaacaggtaatcatgggcataatcaactaaaatgatccaaaatgcacagttaagatctaagtttaccagctgggccaatatggtgaaaccccatctctactaaaaatacaaaaactagctgggtacattggcgggcatgtgtaatcccagctactagggaggctgaggcagaagaatcgcttgaacctgggaggcagaggttgcagtgagccgagatggagccactgtactccagcctgggcaacagagcaagactgtctcaaaaaaaaaaaaaaaaaaaaaaagagaaagagagatctaagtttagtacactaactatggttatagccatgtttagaacatttaaaaataatgcaaataaggctgggcgtggtggctcacacctgtaatcccagcactttgggaggccgaggcaggcagatcacgaggtcaggagattgagaccatcctggctaacacagtgaaaccctgtctctacttaaaaaataaaaaaattagccaggcgtggtggtgggcgcctgtagtcccagctactcaggaggctgaggcaggagaatggtgtgaacccgggaggcggagcttgcagtgagctgagatcgtgccactgcactccagcctgagcgacagagcgagactctgtctcaaaaaaaaaaaaaaaaaaaatgcaaatagtgttattatgacactacactagaaacaaaaagtagtcattcatcttcattaatgtgtcgttttattcatggttaatatttatccatatgtttgtatggtaaatgtacatattgctcattatttcctatattcattgtgaatgatgctttttccttttcagccttggcgttttagttcttctttgtagagtggcttttataattttcatttttgtatagttgtgaggtaaggcagagtggatacatcattgtttacttaagctattttatttttatttttttgagacaggccatagtacagtggcgccatctcggctcactgcaaccttgacctcccaggttcaagcgatcctcctgcctcagcccctcaaatagatgggactgtgggcacgtgccactacacctgcctaattttttgatgttgttgttgttgtttttagacgtgctgtgtcgccaggctggagtgcagtggcttgatcttggctcactgcaacctccgcctcccaggttcaagccattcccctgcctcagcctcctgagtagctgggactacaggcgtgcgccaccatgcccggctaattttttgtatttttttgatagagacagggtttcaccatgttggccaggatggtctcgatcttctgaccttgtggttcgcccacgtcggcctcccaaaggctgggattacaggtgtgagccaccgcgcctggcctggattgttaaccagtttttagaatttgagttcatattcttgtatgcttaaacttttccttatattggaatttttctaagaggaaattccttacattattatttctgcaattaataatgcagactttttattagctcttgaaatgtacttttaaagtgctttccaaaaagtctgagtcaatttatatttgtgtcagcaatgtatgagtaaaccacttttaccttaatctgaccataattgggaacatttatttttaatttaccctggctcaacaaatataaaatgatactttgaagattattttatgtagtatgtagttttatgtaatatatacacaaatgtgtgtgtgttgttttctcatatgagtttttaggggtttttaattttagggttttttccataaaatcctttcagaaagtggatgaaattaaaacataaatatattagacaggtaggtagatagataatggatagaaataaagatgatagagaataaagagaaagatacagccgggtacagtggctcacacctgtaatccaggactttgggaggccaagtgggcagattacttgaggccaagagttcgagaccagcctggccaacacggtgaaaccccgtctctactactaaaaatacaaaaattagcaaggcatggtggcatgcgcctttagtcccagctactcgggaggctgaggtgggaggattgcttgagcctggaaggacggaggttgaagtgaactgagatcgtgccactgcactccagcctgggtgataaaacaagaacctgtctcaggccgggtgcagtggctcatgcctataatcccagcactttgggaggctgaggcggatggatcacctaaggtcaggagttcaagaccagcctgaccaacatggtgaaaccctgtctctactaaaaatacaaaaaaaaaaaaaaaaaaattagccgggtgtggtggggggcacctgtaatcccagctactcgggaggctgaggcaggagaatcacttgaacctgggagacggaggttgcagtgagctgagatcacgccattgcactccagcatgggcaacaaaagcgaaactctatctcaaaaaacaaacaaaaaaacccaaaaaaacctgtctcaaaaaaaaagagagaaaatcctcacagcaatcctatgagataggcttgatgattatccccattttaaaaatgataaactgagactcagagaggttaagtcaatcatacaaggtcacacagctggtaagtaacaaagacagaatttgaatacagtgatctagctccagggctgtgtgggaaacccctgtggtctatagcaagttcaagagaaaagcatgcagagatatttgttattgatcttaatggcctagggagttggcaattggaatggctaagtaggagcttgttaggtgttgagggagcagagccgatggtcacgggcttttcctgctcaagttgctctgtaggaggaactgggctagggagttgtttcacaataggtccctggggagctagaggaagttagaagaaagcataaggatggaatgatagtgactactatcactgagtttactgagttataagtattttcttgtctcctagcaactctgtgaagaaggttgaaccctgaccattagtacccagggtgctgctttggctggaagaatgccaggccctctggactgtggtcctaggctgcatctaagcagcaatctggggcaggccgtgtactggtcagttccgtggtactgtgtacctgctccagcagaaatccagtccacatgctgctcagtttggcccaaattgaaggtggcccatgaagctaggtcctccatgattttacaggtcttcagggtcattgaagacagctgacctaagcagggaaacaaactaggaatggtggaatcagattgcctgtgggattttgtagttaaatcctaggctttaaaggggataggcttggttctaatcccaggaagtctattaaattctgtcactgtttcatcatttgtaaaatggggatggtgatgacattcatgcctttttcacaagtagtaaatgaatcaggcatataataaagtaagcactctgtctcctggtgatcactccattaatagaagagggtggtggtgatagtggaggttcactacactttttcaattctataaaatcaggcctagagaagatttcttagaggaagtgatgtcctctcacagttagagaacccacatggggtggtggtgtgagtcgggggggtggcggggaggaggaggatggggaagtgaagtggtaaaatctcaccacaaagaccaggatgctatcatggccttgaagcaggagcagattgttcagaaatccaaggttctgtaataccctagggctgtctagaggtggtaattggaacacaagaccttcaggtgtcctgtgttagtgtttcactcttgagcagaagctcaggagcatgtcactctgaaggatctagagccactagaagtcatgatttaccccatggttaggaaaaggcaggggacagatatgtggtatagctggggttcacgtgcttaggggtccctaatggggacatgtgggtgaaaacacactgagggaagtcctgggcaaggagggctgggtccaatgctgattctggatgggtgtggaagttaaccaggaattattgctttaaaggactggattacaggttttgcaagcagataagatcagtgacatcatctgacttacctcacataagaggtttcctggcatttagagatttcctgggtaaatgattcttctgacttccaaaaataattagataactcagagatcaaaccacaagataaccatcttttctttctgagctgctcaagaatgataaaatgtttgttaaaaacatcaggggattttgacttttcttatatgcatccttaagagccaatagctcctttttgtcaagcagtaattatattgttatattctgccattttttaaaatttggagacagggtctcgctctgtcacccaggccggaccgcagtggtgcagtaatagctcactgtaaccttgaactcctgggctcaagtgatccttacctcagcttcctgagtagctggaactacaggtgtgcaccttcacaactggataattctttaattattatttttttattttttatttttggtaaagatgagatcttgctatgttgcccaggctggtctcaaattcctggcttcgagctatcctcccaccttggcttctgaaagcattgagtttacaggcatgagccactaagctcggttatttatttttttaaataataattccatctctggaatattagactcgaaggaagcaggtgacacaaacagcatgctttagactgaattatgagaccactttttttctttttccttaaatgtagataacattaatgagaccacttttgagagaaatgtattttattctgtaaagggaagatgttttagcaagaaccttgccctccagctagtctctcggtctagagtgcttttttttttttttttttttttttttttttttttgaagagacggtgtttcatcatcatgttgcccaggctgagtctcgaacttgtgagctcaagcgatctgctctcctcggccccgcaaagtgctgggattacaggcatgagccaccgcgcctggcctcaaagttctctttctttcactggttggctcttactcatcctttggagcttagcttaaattttacttcctcaaggaagccctccctgatactcattaatttcagcttttgcttttctcccctctacttttcagtatttaccacaacttataattgcatattcatttcatgtctgtctctccctctaatttattaggcttatggagtcatgggacctaagtctttcgtttaacactgcatgcccagttctttgcagagtgcctagaacatagcaggatgtagtgatgtggaaaaaagatagtaaagaaagacaggctgggcgcggtggctcacatgtgtaatcccagcactttgggaggccaaggcaggtggatcacctgaggtcaggagttcgagactagcctggccaacatggcaaaaccccgtctctactaaaaatgcaaaaattagctgggcatgttggcaggagcctgtaatctcagctactcaggaggctgaggcaggaatcgcgtgaacccaggaagcggaggttgcagtgagccaaaatcatgccattgcactccagcctgggcgacaagagcaagactcagtcttaaaaaaaaaaaaaaaaaaaaaaaggcatgattccattcaccctgattcaggggttccagtgagttctatattttctttctttttttttttttttgtttgagatagagtcttgctctgttgccaggctggagtgtagtggcgtgatctcactgcaacctctgactccctggttcaagcaattctcctccctcagcctcccgagtagctgggattacaggcatgcaccactgcacccagctaatttttgcatttttagtagagttggggtttcaccatgttggccaggatggtctcgatctcctgaccttgtgatctgcccgcctcagcctcccagagtgctgggattacaggcgtgagccaccacgtccagcctgagttctatattttcaatgttaccctgggggctcattccttaaggaagggacaggacttttggtttgaagtgtaaactgtgatgattacatcctgggctacccctctccatagcagttaatttccgtgagtacttagaatatctgtgacttgatgcgacagtggagatctatgtggtaataattctggaaggaaaaaaaaatctccaatagatttgctttcagtggccgggtgtggtggctcgtgcctgtaatcccagcactttgggaggctgaggtgggcagatcacaaggtcaggagttcaagaccagcctggccaatatggtgaaaccccatctctactaaatatacaaaaattagccaggcacggtggcgcgcgtctgtagtcccggctgctcaggaggctgaggcaggagaattgtttgaacctgggaggtggaggttgcagtgagtcaagattgtgccactgcattctagcctgggtgacagagcgagactccatctcaaaaaaaaaaaaaaaaaattaggtatgcagtcttgtaccttgattttaattacataggtgcctgtgaatattttcagtgcatgttccttttttcttctttgggtattggattgagtgacctttaattacctcctcaaatggcacttgtcatcacatgggaagtgttctataatcagctgagttgctgtggaggttaatctaagccacagatagagcggagtgtccattatcatagatattctgaaggatcgaatcctttgcatcttggaatggctgtaacatgagtgcactgttgtccagctcttttacacttgtactcctagagtcatcttctgacttcaggagaacttgatagaacatgctgttcactaaggatcattgatattagattgcatacatagtacttggcaactgaaatccctcaacagtaaaatatggtgttcttgcatatatgctattagaacttaagaaaagggtaccagaaaaaaattaagttctgacacacttattttctattaaatattaaatcagtcacgcacagactttagaaatggaattcaagttttatagtagaaaatagatgtcattggctgggtgtggtggctcatgcctgtaatcccagcccttcgggaggccgaggcagggagatcacctgaggtcgggagttcgagaccagcctgaccaacatggagaaaccccgtttctactaaaaatacaaaattagccgggcatggtggtacatacctgtaatcccagctactcgggagactgaggcaggagaatcgcttgaacccgggaggtggaggttgtagtgagccgagattgtgccattgcactccagcctgggcaacaagagtgaaactctgtctcaaacaaaaaaaaaaagaaagaacatatatgtcattcacagtgaggactgtcagacctgcactgagtatgattattttagggattccctataacaatacaaaaatgggggaaaactgtcaactgtaggccaactcttcaggcatagtggctcacacctgtaatcccagcactttggaaggctaaagcaggcagatcacttgtggtcaggaggtcaggagttcgagaccagcctggccaacatggtgaaatcccatctctagaaaaaatttttaaaaattagccaggcacattggcgtgtgcctctaggaggcaggaggattgcttgagcgcgggaggtagaggctgcagtgagcagagatcgcatcattgcactccagcctgggtgatgggagtaaaaccctgtcttaaaaaaaaaaaatagaactggaaagccaactaccctgttggttatgatctgtcagtaatattgcctttattcttaatgggataagggaggggtgtcttattgaaaaccctggtaaggaccagttcagaaagactagggggggagacagggtatttgactccatgtatccatgaagcagtatcaactccatttctgtggctttggtgtttggtgtgagaaactttaggaaatgcatcctaatagacctatgttagatgctctcacctatgatcctgatgatcaaagctcatatgatcatgcctgtgaagacatttgtacttttttttttttttttttttttttgagacagagtttcactcttgtcacccaggctggagcgcagtggcgtggtctcggctcggagcaacctccacctcctgggttcaaacgattctcctgcctcagcctcccaagtagctgggattacaggcgtgcgccaccatgccggctaatttttgtatttttagtagaaacgtggtttcaccatgttgaccaagttggtcttgaactcctgacctcaggtgttcctcccgctgtggcctcccaaagtgccgcgattaccggcatgagccaccgcatctgccctgtacattttatgtattctcagaagcccttacattggtgattcctaatattttctctgtcccatcacatctaaaaaatataatactgaacaaaatcattcttatttttccataagtaatagtgatgcatgagagtggtgagaactcctctggggagaaaatatggttttatcagaatttagggaaggaaagttatatcattgaaaaagaattctcatctgattctgtgtatcaactattcttctcccatttctgacctgcccaagggctctgttgtaggaactgatgtgaagtagaagacatttggaaaaaacaaaaagctagcaaaaatctgtcagaagagaaagaaaagtactagaaatctttttcccaaaaaggaattctttattcatgaggtgtctactgtgtgtcaagttatgctaggtctaggcataaggaaataagataaatatgatttgttcttgccctaggatcctttattccaaggaagaagaaaatttgaataaaatatatattatctaatctgcaaagtatatattttattcctactttagatatgaaaaattgaatttgagcttctattatgtgccaaatcctatgcaagctaacatagcaagaatttaggccagctgcagtggcttacacctgtaatcccagcactttgggaggccgagctgggggaattgtttgaccccatgagttcaaggccagcctgggcaacggagcaagaccctgtctctacaacaacaacaacaaaattagctggacccggtggtgcacgcctgtaatcccagctactagggaggctcaggtgggaggatcccttaagcccaggagtttgaggctgcagtgagctatgatggcaccgctgcactccagcctgggcaacaaaaggagaccatgtctctaaaaaaaaaaaaaaaaagaaattagaccaagttattcttatttagtttttcctgttccaacatcttgctcccggtattcattctcacactgctataaagaactgcccaagactgggtaatttagaaaggaaggaggtttaattgactcacagttgcacatggctggggtggcctcaggaattatggcagaaggcaaatgggaagcaaggcaactttttcacacgcaggagagagaatgaacgcgggaggaactaccacacacgtataagaccatcagatcttgtgagaactcatttttatgagaacagcatgggggaaactgcccccatgattcaattacctacacctggtctctcccttgacacttggagattgtggggattattaagagaacacttaggccaggtgtggtggctcatgcctgtaatcccagcactttgggaggccaaggtgggcggatcacctgaggtgggtagtttgagaccagcctgaccaacatggagaaatccgtctctactaaaaatacaaaattagccgggtgtggtggcgcatgcctgtaatcccagcttctcgggaggctgaggcaggagaatcgcttgaacctgggaggcggaggttgcagtgagccgagatcatgccattgcactccagcctgggtaacaagagtgaaactccatctcaaaaaaaaaaaaaaaaaaaaaaagaacatttaaaaattaaaaaaaatttaaaccctaattttaagaaacttaagaaatccattattatttctggctgcctttataaaagacactttgtttttaacgtcatataggactttttttttcctggaatttgcaaggattcttactctcttcagtattcctgaaaatgaaagtaagtggctcacataggaagaaggagagatttcgtagactttctgtaaagtgaacagacttcaggtactgactcctcgtaaatctagactgttataaaattgccctacaaagctctgagaaaatgactcacatgaataaagaggaaaaggactggcctggcgtggtggctcccgactgtaatcccagcactttgggaggctgaggtgggcagatcacctgaggtcaggagttcgagaccagcctgaccaatatagagaaaccaccccccatgtctactaaaaatacaaaattagctgggcatggtggcccatgcctgtaatcccagctactcgggaggctgaggcaggagaatcacttgaacccaggaggcagagattgcgttgcagtgagccaagatcacgccgttgcactctagcctgggcaaaaagagcaaaactccgtctcaaaaaaaaaaaaaaaaaaagacaattatagaaaaaaagataataacattaaacaataaaaaagagcaaaactccatctcaaaaaaaatttaaaaaaaagagcaaaaggagtgggaagtttttctaattctcatggattacagtaggagaatgagaacaggtgcaaaagaaactcaatgcacttggctttatgccaacaatgatttttttacacagcaaaaaattacaaaccttcttccttacctctcttcctcaagcttatacataatagacatacagcagcatttctatttctacattatacttgggctgtttatagtattgagctaataaagatttttacacagtcgtagagaaaagggtcctcagaggtgatctaatgtagcctccctctcaaggtgataagtaacttactgtgtgagtgcttgaagttttccagaatggtaacccagttattacaaggattttgtttctacacctttcaacatcttaatttcccttctgtgtctattgcagtttattgatgttttccttacccagcacttaaaatagaacacagcactccaagaatggtcagtgaatgcagaacagaggaaacaaccattattctagataattgaatgttatccatacagcactgtactagcttttttatgattgagtcatatttctggcctaattatgattctcagtaaaatagaaccccaaatgacttttttttttttttttctgagacggagttttgctgttgttgcctaggctggagtgtagtggcgcgatcttggctcactgcaacctctgcctcccgggtttaagcgattctcctgcctcagtctcccgagtagctgggattataggggcatgcctccacacctggctaatttttatatttttagtagagacggagtttctccatgttggtcaggctggtctcaaactccttacctcaggtgatctgcccacctcagcctcccaaaatgctgggattacaggcatgagctaccgcgcctggtccaaatgactgttttttttataggtactggagttaagaaaggtgttctccattacagcctaggtattagatttagaatttctcatttgttcgcctactattttatcttgtttctctgaaagaaattatattgtctttaaggcggttgttctcaaactttatcatgcatgagaatcatctacaagacctgtttaaacatagattgctggcctctgcccctagagtgtctgataaaataggtctgagctagggcctgaaaatttgcatttctaacaagttaccagatggtgacaatgctgctggtctgaggaccccacgctgagaaccattgcttcctttaaagcgctaaagtggccaggcaccgtggcttatgccagtagtcccagcattttatgaggccaaagtgggagggttacttaaagccaggagtttgtggttacagtgagccatgatcataccattgcactccagcctgggtgacagagtgagaccccatctctaaaaaaaaaaaaaaaaaaaaaaattaaagggcaagtgagaagtatgaccatatatgtactttcaatttttgtggatgcatagtaggtgtatatatttatggggcacatgaaatactttgatacaggcatgcagtgtgtaataatcacatcagggtaaatggcatacccatcaccttaagcatttatcctttctttgtgttacaaacaatccaattatactcttttttttttgagagggagtctcgttctgtcgcccaggctagagtgcagtggtgcgatcttggctcactgtgacctccgcctctcaggttcaagggattctcctgcctcagcctcccaagtagctaggactacaggctcatgtgaccacacccagctaatttttgtatttttagtagagacagggtttcaccacgttggttaggctggtctcaaactcctgacctcaggtgatccacccaccttggcctcccaaagtgctgggatttcaggcgtgagcccctgtgcctggcctatactcttaaatgtacaatacattattgttgactttaattgccctgttgtgctatgaaatgctaaatcttatacattctatctaactatatttgtgtacccattaaccatgcccacttcccccaatccccactacccttcccagcctctggtaaccatcattctaccctctatctccatgagttcaattggtttaatttttagctcccacaaataaatgaggacatgtgaagtttgtctttctgtgctaggcttatttcacttaacataatgtcctccagttccatccatgttgttgcaaatgacaaaatctcattcgtttttatgactgaatggtactccatatgtaccatgctttctttacccacttgtctgttgctggacacttaggttgtttccaaatcttgactattctgaatagtactgcaataaaaatgggagtgcggatatttcttgaatatactgatttcctttctttggggaatatacctgggagtaggattgctggatcatatgatagtttgattttcagttttttgaggaacctctaaattcttctccgtagtagttgtactaatttacattcccaccacccgtgtatgaagtttcccttttctccacatcctcgtcagcatctgttattgtgtgacttttggataaaaaccattttacctgcggtgagatgatatctcattgtagttttgatttgcatttctctgatgatcaatgatgctgagcactttttcatatgcctatttgccatttatatgtcttcttttgagaaatgtctgtttaaatcgtttgcctgttttaaattgaattactaatttcttttcctgtagagttgtttgcactccttatatattctggttattaatcccttgtcagatgaggagtttgcaaatattttctcccattctgtgggttgtctcttcactttattgattgtttcctttgctgtgctgaagcttttggatgtgattccatttgtccattttcgctttggttgcctgtgtttgtggggtattattccagaaatctttgcccagatcaatgtcctggagagtttctccaatgttttcttttagtagtttcatagtttgaggtcttagattcaagtttttaatccattttgatttgattttgactatttttttttaatttgatactatcttgaccagcattgaataatctatatcctaaggatttagaggaataattatcctttcaaaagaatcttcctcatctgatcaaaaatggaaagaaacatctgtttccacccacatcaagtgttgttttgtttcaatcctattaaagcagccttggtcaggagatctttccccttttcctagcaagaggatttctttggtcctcaatttggtcatttgtaaaacaaaggtagagaaaatctactcaatgattttggttatttttggctttatggtttcttgaaaagaaagaacaataaatgaagattcattgcatagaaagggcctatttggagtcaacatgctcaaggccaggaaatagaaaccacagggctaaggggatcaactgaaggcatcagtaggatgaggtgaagctcttctaagctgccaggtcacaaatcaggacaggcagatgtccggtccctgacacactggcctgcacagtgaatgggctgtaagcttatccactaaagacctgtcattgttgcgggtgggttggtgggagcataaggacatgataatatcaccatgtctagtaagtgggaggctaatcttagaaacagttttcaattctttgaagttggtagtagcttctaatatggtagctattatttgcccattgcattcaccatcagaaaaagcccatacagagatgaagccagcatattttgaatgtacactgtatagttgttggctcttaatataagtagtatagcctgggagcattgagtagagacaagtaagaaaggatgagctgatgttaggaaatggacaacattgagtataagtcaatacttaggtaatcttcagtctgtctctcacctaccatttctttctccttcctattcttaccctctcttccctcaggtttaatctcccaatttaagaaacaaaagaagtttttccactagtaccgacttcagcccattgttttgcaatgtcgttttgacagatgtgtctttagtcacacaattaaattttatgttgaccagagactgaagactccactagttgcctattaacgtcagactaacaatggcttgcacctgtaatcctagctactcaggaggctgaggcaggagaatctctggaatctgagagttcaaggccagcctggtcaacaaagtgagatcccgtttcaaaaacaaaacaaaacaaaatcttgtttgcttaaaattctagtttttttttcagacagtcttgctctggcgcccaggctggagtgcagtggtgcgatctcggctcactgcaagctccgcctcctgggttcacgccattctcctgcctcagcctcccaagtagctgggactacaggcacccgccaccacacccggctaattttttgtatttttagtagagacagggtttcaccgtgttagccaggatggtgtcgatctcctgacctcatgatccgcccaccttgccctcccaaagtgctgggattacaggcgtgagcccccgtgcctggcctaaaattccaggttttctgtatttgtcttctccactagactctaatcagctccttattggtagggaccaaggtaacagacatctctgtacctctgactccttgcatcaagtctaccaaaaccatgtcaggtgcttgaataaatatggagcagagctagttccaacttatcattccaaactcatcccctaccacttccccaactttccctaccttcagttacactgaggtttttccattgccctaagcaggcctctttcttttaggatttactgccttttcccacgttgattcctctgctgtgatgctcctccctgctggcctggctggctcattcttcaagacccacttcagttaccagcagctctgctggagcctttccgaacccttgggcaaaattagtaattccctttacagatcttgaacagttgtctgttcacatcttgagtatggcacttgatacactattgaaagtatctgcttaagtgataataatggcagctaaagactgagctaatataatgactgagctttataatagtaaatggtgtattattttaaatctaacagctctgagacacagaacatcagcgagaggctgaaatgaaatcggaaactattttctgggtactaagaatgtagggatcaactagacacatggtagtttcttccctcagggagccccaactcttcaaggacagggatcaaatagtagtaaatatgtggcatttattgaatgtttgatgtttacctggcacactgaagacattatctgtaaatattacagctactctacaaggcaggtgttattatctccatttcacagaaggggaaacttatatgctcaagatcacactgctggtgctaggatttgaacccaaagtatctaacttcaaagtatcctactgatctctatattctaagtgcggaacacgtagtaggggcataataaagagtgttggatgaacaaatttctataagcaggttccttctcccacactacaaatattaatagtgctcttttgttgaaatatttcttggtctcagctctgttctcattatacatagtggcatcagggaaaattaaatgctgtcttggaatgaccagtagtgccaattaaccaagaacattaggaaattgtaaatgattataattcaacaataattaattaaaaggatgtaattttactaaaaataagatgtaaaaattagcgaagttgagcaaaattcagaaatagacctttaattatagaaattgagcatattgaaactgagatcctcataaaacaataagaaagaaaagaaatatataaagacctcatttaaataaagaaaaacattatcacccaagttgataaattggacactgttagaatgtgaaaagaacattggaggatcagcgacattgattccagatctgatacttacagctgagtaaattcaagctatttttttttctctctgaaattgggctcatcaacaaaataaggatagcaattaattcactgagttgttgtgaggatcaaatgagaatactacctaatttactacctaacaacacatacttggcactcagtaataagtctgcatctcatactttaaaaaatgaatacatgggccgggtggggtggctcatgcttgtaatcccagcactttgggaggcagaggtgggtagatcacctgaggtcaggagttcgtgaccagcctggccaaaatggtgaaaccctgtctttactaaaaatacaaaaattagctgggcatggtggtgggcgcctgtaatcccagctacttgggaggctgaggcaggaaagttgcttgaacccaggaggcggaggttgcagtgagccaagaccatgccattgcactccagcctgggcaacaagagcaaaactcaaaactccatttcaaaaaaaaaaaaaaaaagaagaatacatgaataaatataattttaaaaaagtgaacctttgttaaaatgtgataaagtaatatatgttaaaagagttatttatattagccatcatagaagtgcaaattaaaaccatggtgagataccagtacacgtttaacaaaatggctcaaataaaaaaatttggacaataccaaatgttggggaaaataaagaaaaactgaataattcatacattgctggtgggaatgtaaaatagtacagccactctggaaaacagtttggcaatattttacaaagttaaacatatacttatcatataaccaggcaatcacactcctgaaaatttatcctagagaaatgaaaacttaatgtttatgcaaacatttgtacacaaatatttcttggagctttatcttaacaaccaaaaactggaaacaacccaaatgccctttacaaaataaatggataagcagactgtgggacatccatacatgaaatactactcagtaataaggagggagctatggatacacccagcaacttagatggatctcaaagtcatgctcaatgggaaaagccaatctcaaaaggttaaatactgtatagttctatttatataagtttctcgaaatagtaataataataatatggggaacagagcagaggttagggagagagaaggaaataaaggatagcaacgcactgacattcctttgcagtgacagaatggtctgtatcttttttttttttttaatccatcaagtccttttttttttctttttgagacagggtctcactctgtcatccaggctggagtgcagtggtgcgatctcggcttactgcaacctctgcctcctgggttcaagccattctgctgcctcagcctctggagtagccaggactacaggtgtgcaccaccacgcctggctaatttttttgtctttttagtagacatgggttttgccatgttagccaggctggtcatgaactcctacctcaagtgatccacctcccaaagtgctgggatgacaggcatgagccacggcgcccagggattacacttcaacatgagatttgggcggggacaaatttccaaactatatctcacacacacacactgaaaaatatgagtacaggcaaaatctggtgaaatctttttctttttctttttttttttttttttttttttgagacagagctggtgcctcggctgcctgagtagctgggattacaggtgctgccaccatacctggctaatttttttgtctccacacccagggattacatttcaacatgagatttgggtggggacaagtttccaaactatatcacacacacacacactgaaaaatatgagtacaggcaaaacctagtgaaatcttttttcaagcaattctcctgcctcagcctgccaagtaggtgggatagcaggcaggtgtgcaccaccacgtctgactcatttttgtatttttagtagagacagggtttcaccatgttggccatgctggtcttgaactctgggcctcaagtaatctacctgccttggcctcctctcaaagtgctgggattacaggagtgagccaccgctcctggccaacgttcataattgttgacctggtaattgccatttctggtcatttctcctaaggaactaatcccctaaaaggtaaacactatagttattctcatttgtgatagtaaaatatccatatacaaacaagtattccaagaggtaggcaaactaattaagtaaattatggtacatgtattaattgtaatattgtttaaataataaattgatgaatatgaaacaaatagttatattgttatgtatgcatatgagcaagaaatgcatatgaagacatgtaattttatttgcttaatgttgctttcatgtttatgcaattttataacataatactgaggtatggctaatggatgaataaagttgacagtttatttttgaatggttacctgttgttgttttttgttgttattgtttgttttgttttgtcttgttttttgagacagagttttgctcttgttgcccaggctggtgtgcaatggcaagatctcggctcactgaaacctccgcctcccagattaaagtgattctcctgcctcagcctcctgagtggctggcattacaggcatctgccactgcgcccagctaatttttgtatttttagtagagacagggtttcaccatcttggcctggctggtcttgaactcctgacctcgtgatccacccgcctcaacctcccaaaatgttgggattataggtgtgagccactgcaccccgtcttgttttgtttttttgtgtgtcggagtcttgctctgtcgccaggctggagggcagtggtgtgatcttggctcactgcaacctctgcctccgggttcaagcaattctcctgcctcagtctcccgagtagctgggactataggcacgtaccaccacgcccagctaatttttgtatttttagtagagacggcgtttcaccatgttggccaggatggtctccatctcttgacctggtgatccggccgcctctgcctcccaaagtactgggattacaggcgtaagccaccgcgcccagccgttgtttttaattctaacactaataacgattttaaattctttcttgaacccctggtcttgtttgtttccagttctgtccactttgccgtttaatacccgatgagaatccaagcagcttcagtggcagtttaataagacatctgcaagttagtcacactttgttttatgatgatttcatagtaagtatattttcttatttttacattatgttttcatgctgtcttgttaagcttacctttccgatccaagtgaataaaattatagaggaaaaaatgtgtatatagctatagtgttgagtattagcattaagtaagaaatcatgaaaatagaatgttttggcctggtgcagtggctcacgcctgtaatcccaacactttgggaggccgaggtgggcgaatcacttgaggtcaggagttcaagaccagcctggccaacatggtgaaatcctatctctattaaaaatactaaaaataaaaaaattagccaggcatggtggtacacgcctgtagtcccagctactcggtaggctgaggcaggagaatcgcttgaacccaggaggcagaggtttcagtgagctgagatcacaccactccactccagcctgggcaacagagtgagactttgtctcaaaaaaaaaaaaaatgaaatgcaatttcaagataaaatttaataacgattgaagattgtcatttgagaattttctccatgctttctatctgccaattattattatccaggttggatacaaggagctcaggttctaaactagttttaagcaatagctctgtcatatatgtgcgaccttgcagaaggtatttaacctcggaaactcagtttgtgcactggttaagggaagagattaaaagcacctactcccaaaattcttcttaggattaaatgagataatgtatataaagtgctttgcacagttcaggtgcagatgttaggcaaattggagatgggatgggagtagaattgttaggaccacttgaggaactgaacaaggaacatgacagaggctttaaattctcagctccatatctctaagcatgtcttttgtggcccatatggcacacaggcctcaacagaacttggttctggtctatgtgttctctctggtaatacaaagaggtttctcttggccgggcgtggtggctcacacctgtaatcccagcactttgggaggccgagatgggcggatcatgaggtcaggagatcgtgaccatcctggctaacacggtgaaaccctgtctctactaaaaatacaagaaaattagttgggcatggtggcgggcgcctgtggtcccagctactctggaggctgaggcaggagaatggtgtgaactcgggaggcggagcttgcagtgaaccgtgatcgcgccactgcactccagcctgggtgacagagcgagactccgtctcaagaggtttctctttaccttagctctatgaggtgttctaaaagccaggtcgattctatggctgttctgtctaatcatgctcagtctgttctcaagatctttcagacaaagcatgatccagagctaggcaggatgaagccactttgataggaatactttccagccactcacagccatattcttgggtagggaagtgaactggaagtagtgttctttgttttgattttttgcttcctgagctactatatactaagctaagcactatatgtatatatcacattttattccttgtagcaacttccgtgaagtgaatactgtatttttatcttcatttaactgaaatatctgaagctcaaaggttaactgaattatctaagaacaagccagtatcaagaccaaaccttgtgttctgctgtactttatgactttcctttggattttgtgggggtttttttgttttgtttttatattgcagaatggactttgaatagagatttcaccttttgttattgcggaagaggagagggattgcagaggatagggttcttaatggtttttgttttacttatagaatgtgctgacatagaattttgaattccactttgacacataggaggcaaggagaaagttttgtttttaacattttcttcagaagtagccattcagtggtactgctggcattggtgaagcctgtgggggagcctgaactttgctccattttacaggtttatgtggaacatagcactctgaccaggatttgtaatggtgactaaaaacttctcattatatcagataaaaacttcaaatttcaaatcaagactgtttattatgacagtaactagttaatcgatagacaacaaagtgaagtagaaaattcattagccccaaagcaaaagtcctgggttctatgacaggctttgtggaaccttggacaagtctcgtaactttagttccctacaaaatgagggtgttgcattgaccctcatcctctagtttctgaaatactattgactctgaatatttctaattatttttctttattgtaggattttaatataattgaggaagctcttatccgaagagtcttagaccggtcacttcttgaatatgtgaatcactcgaacaccacataattttattaaaacgaagggaaaagggaccactgaattgcaccatttaagatgctgcttgaacaaatgggagggaagttgtcaatgattgatgggcaaaaatgtacaacacagttatgtgtttgtccatgtttattgttatagtgcatttaaaaactgctttaattttaatggtttaaatctgttttacatccttgagattcttacacatctaacaacaaaaaaaattatctacatcagtcattgttacatggaaaagacaggtggtaggcaagtaggtggaggatctcggtttgcaaattagataatactctgtgtataatgctacatatcaataactaccatcatggttaggcacgataactaatctttgttctgtgtaaaaaaatatggagagtgaaacaaagtgcagacattcaaagaaataagaaatctgctccaatgctcttgttctaatctctaataggttaacgttaataatcttgtatgggagttggaaaggaaaattttggaagtcaagaaagtccatttaggccggacgcggtggcttacgcttgtaatcccagcactttgggaggctgaagcaggcggatcacaaggtcaggagttcgagaccagcctggccaacactggtctctgtgaaactccgtctctactaaaaatacaaaaattagctggacgtgttggcgggcatctgtaataccagctacttgggaggctgaggcagaagaatcacttgaacccgggaggcagaggttacagtgagctgagatcgcaccagtacactccagcctgggtaacagagctagactccatctcaaaaaaaaaaaaaaaaaaaatccatttaaccaaattgtcttacataatactgtaacaaaacaaattttgtgttagaaaagtatacttaattctttgactttttataactgcatacataagaattcaatatttttcaaatatttatagcttatttagaaatatttctataatataagcaatttcttaaaaaccatcagatgatacttacagtataagtattcacatccagactttttagtagaaaaccctaagggctttgatatcttttttgattgtaacattttaaaaattatgaaataaaagtactgaaaaccagacacaaaatttatagctgaatgccttattataaggaaatactcttttaggactcagccagtcaccccacgtgtcctttttgtgtcctgtcacaattacaaccccacaaaagtaactgctagactgatttaaatggtaatcactttgttgcatttgattactgctgccacacctaaatgcatatatctatattttaatattatcaatttaaagttgttattaaatgtatattttattttacatctcttttttaatctagaagttcctccttctttccagttccttaaaatttacctggtgaagaacctgatcctaggacctatagagtttcccatactttgtattttgctgattgcacactcatggcacggttcagcacattgccctgtcctctcgatattagcacacagtgcaggttcaggcacattgaatttgagaagacttaggttcagtcctttggcaagactgtaaatcacggtgtctttctttccttcctccttcttctctctctctctctctctctctttccttttctttctctttttttcagagttgcactctgttgcccaggctggagtacagtggcacgatctcgactcactgcaacctccatctcccgggttcaagcagttctcctgtttcagcctcccaagtagctgggactacaggtgcacgccaccatgcccggctaatttttgtatttttagtagaggggtttcaccataatggtcaggctggtcttgaactcctgaactcaagtgatccaccagccttggcctcccaaaatgctgggattacaggcatgagccaccatgcccagctaatttttgtatttttagtagagacagggtttcaccataatagccaggctggtctcaaactccttaccttgtgatccgcccacctcagccttccaaagtgctgggattataggcgtgagccactgtgcccggcctacagggtttttatctaacctttctgttacaactgtacctctccttctgtactgaaagtcctggttttcaagaacacagggcacgatagaattagaacatcccacaattactcatttcttttatttatcttacacttacagctgtctcagaataacaatagaaatacaaccacaaataatatggcaattgaaacaattaaaaagttttcatttgcttttctcattctttcccaatttttttttttttttgagatggagtctcgcgctcttgttgcccaggctggagtgcaatggcacgatctcggctcactgcaacctctgcctcctggattcaagcaattctcctgcctcagcttcccgagtagctgggattataggcatgcgccaccacgccctgctaattttgtatttttagtagagtcaggatttctccacattggtcaggctggcctcaaactctcgacctcaggtgatccgcctgcctcggcctcccaaagtgctgggattacaggtgtgagccactgcgcccgacatcccaatttttaaaatagttatactatgtcaacattttcagaacatactggtatagcatactgtactttcttccttttatcccccatttattcttagttcttcaactatatatttaacacttgcccccagttttgttttgttttgttttgaggaggaatcttgctctgttgcccaggctggagtgcagtggtgtgatcttggctcactgcaacctccgcctcccgggttcaagtgattctcctgcctcagcctctcgagtagctgggattacaagtgggcaccaccacacccggctaattgttgtatttttagtagagatgggttttgccatgttggccaggctggttttgaactcctgacctcaagtgatccacctgtgttggcctcctaaagtactgggattacaggtgtgtgccaccgcgccaggcaattgcccccagtttttatttgatggctctgactgtttctcatatctgactctttaattatgaatccagggcatagattagtatctccatcttgtaaggatgcaaagaagccatgaaaataagtaatatcaactcctgaggataaaacgttacttgactagagttagctttttaattgtaatcatttataaacttctttgttccttacatataagcatagtcataaccatggtacccaaaattttctataagttattgtaactccttaaaggtcttgctacagttcttttatccagtacaaataattgggaaaatgtaaagctgaatgaaatctagtgagcctcatatcctcccttttagatattgattttaagtttgcttttcacagctgctaaaaagtaacaactgatttttagttccacaacctctctttcttcaatttagatggatcatacaataaagcaaaatctggctggttacagtggctcacacctataatcccagcactttgggaggctgaggtggagggtctcatgagcccaggagttcaagaccaacctgggcaatatagtgagactctttctatttaaacaaaaacaaaaacaaacaaacaaacaaacaaaaagctgggcatgatgcacacctttagtttcagctactaaggaggctgaggttggaggatcacttgagcctaggaggtcaacactgcagtgagctatgatcatgctactgccctccagcctgggcaacagagcaagaccctgtctccaaaaacataaataattaaatataaataaaaataaagcaaaatctgttgggaaacgagaaaaaggagaggaatttttcaggaataatcataaaaagaaatgatcatcagactgaaagtccagagcctgagaaatgaaaacatatttttaagcattggtgttgaccatgcagacaaacttttgttaattcagagcgatacaaaaggcactttgaatctataaaacttgaaaaagttaaaaattgtatgtcggataaagctttaagtcatctgtcactattaacctcagtgcagcaattctgactcctgtgcctggattccttttatgataattttgccacctacaggacagattaggtgctggtcgcctgaattattttgtgttctgaattattttgagctctaaaatggtaaagtacaaatactcattgttttactgtgcctttggccttttataaaaaggtatttataattcgttgataaaaaccaatatttgaagctgttgattaccaacaaaaaagtttcactctctttatagtgcttcaggatacaactttttcagggccttattagagaaaaactgattcacatgttattcttctaaagctaaattattaaaatgtaggttgaaagattggattgattgtgaatctacactaaagatatggttccaggcagacctccttagagacctccaggcagacctccttactgtcttcagtgatgtttaatttcattactgttactgggtgccaagtgtctttcatttggaagtgaacttactccagttattgaatgtttatcatatcataatttgcatttttccaacattgaaggtattttaaaaagtcactaagagattcattcttttattattcaactacaaaaaaatagtgtaatgatcagaatttaaaatgtgtgattctttttcttctgtaagtatgtattgctatgataaataaaaaatggcaggaccattgtttttattaaaatatctactgtgtctattcttaaa

SEQ ID NO: 623 - DNA, 4325 bp, Homo sapiens
caggtctcccaggcttcctcagcgtcgacgccggggagcgccctggggttgggagcgcccggggcccgcgaaggaggaggtggctcaggtgtcagggcgcaccgtgggaaccggccccgggggaggcgtggaaacgcggggcctgggactcgaccagcctctcccgtgcggatcgcaaaatctcggagctgaaacagcccgttgttcgcagcctccctctgacccgccaccctgcacattgttttccattcgcccgggtcgcgggtgggaggagaggcacgccggggttctggagcttggccgcgcgccaggcttgtggccttcgtccccctggggccactggggcggccacgcctctccggcgggaggagagaacgcgtgggtccgggtggctgctccggcccttccgcctccagctcggccatggggtcgcgcagctcccacgccgcggtcattcccgacggggacagtattcggcgagagaccggctgtgagtgcgcccgcgtcggcggctgcggaggggacggggcgaacccaggcgtctggggctagggaaggggttgggttgaaggatggacgaacttacaagtctggggtccggggctccccggagctggaagaccaaggcccctgtgcctgggatcgctgggttaggggcgggttaacctaggggtcccagcctccaagtctggggaggatccgggttcacggggtcggagtccagaggaatccaggcacccaggtgtcctccagcccggctcgaagctgaaggcagagctgacggcggttggaagggatggctttggttctttggttttcgggaggttgcgagccgcccgggtcttgaacctggatcttcgcggggtcgtgtcactctccctccgccccggccagctcaacccctgattccccgggatgatcgccccttccagccagcccccgctgttctggcccatcttcctggcctgttggggcgggtttctggagctggccctgcagagtcacacacccccaccccactctccttcccgcagtctcccaagccagcctgctccgcctgcaccaccggttccgggcactggacaggaataagaagggctacctgaggtgagggggagccggcctcataacttctggcctctgtctctctgactccatgtccctctttgaccctccgtctggcatctctgccttaccctctttgaaatttggctttgcagccgcatggatctccagcagataggggcgctcgccgtgaaccccctgggagaccgaattatagaaagcttcttccccgatgggtgaggcttgctgggcgtggggaggtgaaggcgggaaaaccggtgtgtgagtgggtgggaggggaggttagagacggaggcaaagtgatggccaaggtgaccaccacctctttccattctgtcccgtctccccaggagccagcgagtggatttcccaggctttgtcagggtcttggctcattttcgccctgtagaagatgaggacacagaaacccaagaccccaagaaacctgaacctctcaacagcagaaggaacaaacttcactgtgagtttgtgaggacctgcacaagtgagaatgcagatgtacccacaccagggacaggctccagggatctcccactcccttcctgagggcattgacaacctcccccctcctccaaggtggggggaaggaaggtggctgctggaagagagccagggaagacctaccttcctttccccctcccaccctctccccagatgcatttcagctctatgacctggatcgcgatgggaagatctccaggcatgagatgctgcaggttggcagaaagcgagagcaagagatgtgatgtgtgaaggatgggatggttaaatgcaatggtgtgagagatggggtgggatgattggggaactggggcgcagataattggggtattggttgggaaatgggaatgggtgcagttagagtgtgggtttgttgggagtcggagtggggagcagttgactatgaggttgggaatagatcagtgattctcaactgggggtgattttgctccctgagtgaatatctggcaatatctggagatgctttttgttgtcacaatgggggagagagtgtgctactggcatctagtgggtagaggtcaggaatgtggctatatatcatgcaatacccaggagagcctcttccaacaaggagttacctggctccaaatgtcaacagtgccaagattgagaaactctggaacagatgtgatggaatgaggatggaattagaaacccttagtggctaaggtggagaatggtgtggaggatggatggaggttgggtgataaagttgggtaatgagtttgagcatattttgagggtagtgcaggatggtgagggagagataggagattggttgttgaagcagtagggaaaattattgggggatatggtgaaaaatggatgaaggatggattataaaattagcaataacttttgggatgaggtgggcaaggtttaggagatggggagttgcagccttcgtgccccctccttatggctgcctcttcactcatctctcaggttctccgtctgatggttggggtacaggtgacagaagagcagctggagaacatcgctgaccgcacggtgcaggaggctgatgaagatggggatggggctgtgtccttcgtggagttcaccaaggtcagagtgcccttggggattggggagttgagatcaggagttctggggcagacagacttgggaaacgttcaacggaggagggcggaaagataggggttgcctgggaatgatggggtctctggaatgggtagaaccctgggggaggaggttgggagcatggagagctgagagtcaagcctcttgcctgccatttgtttttccctcagtccttagagaagatggacgttgagcaaaaaatgagcatccggatcctgaagtgactccgtttgtgccttgggcttgctcctgcaaccagtatctccttggaattcatccaaagcccccatggacgcatggacgcagggcgacaataaactgtattttcgtttctaactctatttagggccaagagaagaaagctggaaggatgtgtactaaagtctagctcagcagtccccaacctttttggcatcagggacagtttttccacggatgggtgacaggggatggttttgggatgattcaagtgcattacatttattgtgcactttatttctattatgattacattgtaatatataatgaaataattatacaactcaccataatgtagaatcagcaggagccctgagcttgttttcctgcaattagacggtcccatatgggagtgatgggagacagtgacagatcatcaggcattagattctcataaggagtgcacaatctagatcctttggtgtgcagttcacagtaggatttgggctcctatgataatctaatgccactgctgatctgacaggaggcagagctcaggcggtaatgcaagcaatggggagtggctgtaaatatagatgaagcttcagctcgcctgccgctcaccttgtgctgtgcagcccggttcctaacagaccacagaccccacaccaggtctatctcatttggtctcagagctgtgaatcagccagcaatattttagttgcaaatcactgaaaacccaactcaaagtgacttaagtcagaaagaaattttatgaattcaggtaattaaaaagtccagaagtatctgcctttaggcacagctggatccaagggcacaaatgatgtcatcaggctccagttattctccatctcccagctcagctttttctgtctgtaagcctgattttcaggaaggctctttcctagtgatggagatgaccaccatcagctccaggcttctatcctgctaacccagtaacccagtgggaagagatttacttattccaataattccaagtggagagtgtcattgacccgtttggggtctcatctctacttctaggggaatgaaacactctgagtggccaggcctgtgtcatgtgctaattcctagagccagggaaataaggtctgaggattcaggatggggtgaaaggtggttgcttaaaggaaaatgaaatacaattagcagaataaggggaaacgagtggtctgctctgctcgggcaaaacaagagatgcccattactgtgagggacccttgaagtctggactcttaaatgggtttttgctgatttcctgggtgcatgctaggatgatggggcttgatgcagtagggaagagacgatgtaaaaataataaacaatatataccttcctagagtgtgaatgca

SEQ ID NO: 624 - DNA, 3473 bp, Homo sapiens
gcccattggacagaatacaaaggcagaaacctaccccgaaggccggggcccggcggggcgctgggggtgggcgctccccgcggcccccggcgcccttcgccccgagacgccccggcccagcggcactggcgcgaccgaggtccagcttcggggacacgcccggctggccgcggggaaggcaccaggtgagcgcggccgcgcctcccggaaccccgctcccgcgcgtcccgcggcgacgcggcgcccacccgccccgggagccaggaacccagggccccaccatggcgctggccgccgccgccgccgctgcggctgccggggtgagccaggcggcggtgctgggcttcctgcaggagcacggcgggaaggtgcgcaactccgagctgctgagccgcttcaagccgctgctcgatgccggcgacccgcggggccgcgccgcccgcagggaccgcttcaagcagttcgtcaacaacgtggcggtggtgaaggagctcgacggcgtcaagttcgtggtgctgaggaagaagccccggcccccggagcccgagcccgcacccttcggccccccgggggcagcggcccagccgtcgaaacccacttcgacggtcttgccgcggagcgcctctgccccgggagctccgcccttggtccgggtgccgcggccagtggagccgccaggggacctgggtctgccaacagagccacaggacaccccgggggggccggcctccgagcccgctcagccgcccggggagcggtccgccgacccaccgcttccagcccttgagctagcccaggccaccgagagaccctccgcagacgcggccccaccgcctagggccccttctgaggcggcatcgccctgctctgatccgccagacgcggagcccgggcccggggcagcgaaagggccgccgcagcagaagccctgtatgctgccggtgcgctgcgtcccggcccccgccacgctccgcctccgggcggaggagcccggcctgcgccggcagctgtcggaggagccgagcccgcggagctcccctctgctgctgaggcggctctcggtggaagagtccggtctgggcctcggcctgggcccgggccgctccccgcacctgaggcgcctgtcgcgcgccggcccgcgtctgctgagccctgacgccgaggagttgcccgccgcgccgccgccgtccgcggtgcccctggagccgtccgagcacgagtggctcgtgcggactgccgggggccgctggacccaccagctgcacgggctgctgctgcgcgaccgcggcttggcggccaagcgcgacttcatgtctggcttcacggccctgcattgggccgccaagagcggcgacggcgagatggcgctgcagctggtggaggtcgcgcggcgcagtggcgcaccagtcgacgtgaacgcacgctcccacggcggctacacgccgctgcacctggctgcactgcacggccacgaggacgctgccgtgctgctggtggtgcgtctgggtgcccaggtgcacgtgcgtgatcacagcgggcgtcgcgcctaccagtacctgcggcccggctcctcgtacgcgctgcgccgccttcttggcgatccaggcctgcgaggcaccacggagccagatgcgaccggtggtggaagtggcagtcttgctgccaggcgccccgtacaggtggccgccaccatcctcagttccaccaccagtgcatttctgggcgtcctggctgacgacctcatgctccaggacctggcccgaggcttgaagaagtcgagctccttcagcaagttcttgagcgcctcgcccatggctccacgtaaaaagacaaagatccgcggtggtctgccagccttctcagaaatctctcgtcgacctactccggggcctttagctggtctagtgcccagttttcctccaacaacctgaaggtccctggggctaccacctggttgatctatcgtggcctgctcgtcgcagtccaaacccgcccaagactgcagcccaatcaacgcctggagcctcattctgtttccagctttgtccagggcagcctgttttacccagatgggcctgcacctccagcttctttctgaagcatgacccatctccagagatgggatttgagaaatcagtgagagcttcctataaagaactccaggagacaggcctgaactctagagggaacttgaaatccagggtcaaaggttaaggggcagcagctggtctggcccctgaaagccttcacctgatgcctctgcagctacacaatcccaagacagagctagagcaagggtctctttaaatgttgaaagatgttaggttgtcagctttaagatatgtggtggttttgtaatttgatgcttttattctgtttttaaattgaaatgaggtaatgcaactttcgtaataaccttttggaattatatttttccacttttaggcaaagtgcttagacattttcaattttttttttgctaaatactttggaattctatttaaaaaatagatgatcaagatctaaaggaaattaatcccaaccaacaaacttaaaagtttatctacctcgttttaggcaatcaagattctggagagtcttgaacacagaataacgattgtgaccattatgaatgtaactaatttcagttgtactgtgaatgctaaatatttgcaaacaagtacatcttgaaagtaaaggtgacttagagaaaagagacattttgacagatacttttaatttgtggttgtctccatcatgaaatagaaacgtgtttggcacttgtgggtggctattttgatttggcatgactacttaattttttaaaaaaattgtggtttgtgaattgcacctttgtgccatgtttctgaatctggttttcaaatccagtggagcctttcagtgaaataggtgactattaaaaaagtaatagtattacagaaaaatgagcgattaaatagtaatggatacaattaaggagcaactattttatatgactgttctgtacaaacaaaaagtatgtaatacccattttaaaaaaccatttgaaagtagacaacttattccaaaatagcaaatgcagaatctctgctcagtgagcttggatgagtggcttaacttctctgggcctttgttcctatctgtaaatgagaaagtttgtagatattgccaagatttcccaggctcaatacagtgtaattattttatgttttaaagatatgaaatctgtttactcaaccaattttttaaatgtcatattgtgataatgctctgcttttgcaaattgtgtttgcatgtcattagttatatcaaatagttttgtggcatggggtagtggagcttccctccccacccccatatgtatcagtgaagcctttgaaattacttaaggcagtctttcatggaatgttttgattgagcaatgaaataaacagtcctccattttgtttctgcttgaaaaaaaaaaaaaaaaa

SEQ ID NO: 625 - DNA, 51727 bp, Homo sapiens
gcccctggaggaactgaacccactatcggtcatggggccgagactaaatgtggcgggttgtctttaatctgctgccaaggtaggttccaggggcggctttgggagtctgcagggccttggatgattggcattctgaccagagaagaagggactgtaggtggctttgagcacagggctgggcagggggctggaaggagggcgctggaaagagtagaagaaggggggcagtgggagggcgggggcgggtggtgctggccttgtctgtcctgttgcctgagctcaaaaaagatcctaatgaatgaccatgaggttaccagggtttgccaaactccagtcactgggtaccagcttgaggaattctgtgatatcctcaaaacacccctcaaaacttataatactttagtgttaatgcttttctttatcgaatatcacatctggtaaaaataaaataaaatagagttttttattttggtttttgagatagggtctcactctgttgttgcccaggctgcagtacagtggtgcaatcatagctcactgcagcctccacctcccaggttcaaatgatcctcctgcctcagtctccctagtagctgggaccacaaatgcacaccaccatgcccagctgatttaaaaaaaaattattttttttgaagacgggtgttcaccatgttgcccagactgttcgtgaactcctgagctcaagcagtcctcccacttctgcctcccaaggtgctgggattacaggtgtgagctacttcactcgacctctgtaacccttttttttttttttttttttgtttgtttgtttgtttgagatggagtcccaccctattgcccaggctggagtgcagtgttgcgatctcggctcactgtaatccccgccttctgggttcaagcgattctcctgcctcagcctcctgagtagcagggattacaggcagacaccatcacacccggctaatctttgtatttttagtagagacagggtttcaccatgttggccaggattgtctcaaactcctgacctcgtgatccacctgcctcagcctcccaaagtgctgggattacaggcgtgagccaccacgcccggccctctttaacctttttaaacttaaagtttatccatgttaggtctgtaactaggccagtatcacttgccataagccttaagaatcaagtgaggaggcgggtgggtcatttgaggtcagaagttcaagaccagcctggccaacatggtgaaaccccatctctactaaaaatacaaaaattagccaggcagtagtggcatgtttctgtaatcccagctactcaggaggccagagaatcacttgagcctgggaggaggagattgcggtgaactgagactgtgccactgcactcccgtctgggcgacagaatgagaccctgtctcaaaaaaattaaaattaaaattaaaatcaaaattaaaaaagaatcaagtgagaggaaaacaatgttattacattccattatattccatctgcatagcttgcctgctttcttggtaacatggaaggttagcaggtgccatgtgttaaagataccctagcaccaagcaaagccttctgtgtggtagaggaatagctaacacatgtcgaatgctaggcactatgcaaaggacttcacaaatagtcattcatttaatcctctcagtgactccaggatagctattatcattattcccattttacagatgagaaaatggaggtacagaaatatgtgaggatcagggtcactcagctcacaagccgtggagctggtctaggaagcagttctgctccagatccatgctgttaagcaagttttggaaaggagttgaaaggcttgaaaacattcacaggatatgattcaatgttacttcatactgtgtccatgtgctgggcactgtcagctgcacacatcctgcccttgggtacactctgatccagtcagaccctctgttgttgtagagggggaaagaggaccctctgttgttgtagaggggaggtgacctggccaaggtcacacagctcgtcagtggcatggccagaccctaagcaccctcagttcctacccctgctcctccctgctttcttgcacgtggttttgtctccccatgctggagtcctgacacctggggctctgcctttttggggagcagggcttgggctacttccctcctgaggagtctccaggggaggccgagtgagtgcgcttacccgtttctgggatcttccccgcagtcccccacccctcggacacactgtcccgggggggagactctgtagtggaaggaggggctgacataggacctcctcattgagtttttttgttttcccacttagaaatcttgggttccaaggcaaagcatgaagcaatggcgtggaggggctgcaccccctacctggtggggccacctccagggccttctttctcttccctctttactctcaggcccggccacacacacacttctcagaatccactggaggaggaggtcttagcctccaggggcataatagttttcctctccaaactccttcaacccaaatgtgcttctctttccctaggctgcaaggccagctcttcatcacagcaggccacccctgctgacccctctccactcagaattccttcttgtctctgtcctctttgactcagactggggctccctgagggcaggactggtatctccctcagatgggggcttcctagggatccacccaattcagtccctgctgactgaatcagctccattgcccctgagcctatgaggtggaaatgggctgggaagcggcttctgactcctttgggcttcatcccagagggccgtgtccccaggcagccaatggggcccagagataccagagtagatgattaactccaggcccattgaccctggggccactgtgtcccctccacctctcctctggttggggactggccctgctttctggaggagaagagtgtgagtgtctggggtcagcactcctacccagccccacccctctgagttgaaggcctacaggatcattgttgatgtatgggtccagctcacatttttcttcctttaaaggtgggtgttattttgttagagcagagcctgttgtcattgtgcccaggttcaggggcccagcttctcaccaggcttgggtcttggagatcctgggagcagagacataacttccacccagaagggtcctgggccccgagcacagtagccaggtttaagcccaaggctttccctcccaatacagcccttcttggccgcatctcagcccagcagggcatgaatgtgacaggaattggccagggtgaggggctggggttgacatttgacagtaccacatcacagctcctgaggggagacacacacacaaacatgcacagtacacaaatacagagccccatagcattgagatgcaaacagataaacgatgtgtagacacacgggtgtacaaagagacacagtagacaaacttggagacccacaccagccacagtcacacagacactcatctgtacgtagaggaatgcccctgtacaccatacaggtgtacagaggtacacagatccactcatacacgtttggatacagaattgtgcactcacataggccaggtgtggtggctcatgcctataatcccagcactttgggaggctgaggcgggcggatcacttgaggtcaggagtttgagaccagcctggccaacgtagcgaagacctgtccctgctaaaaaaaaaaatacaaaaattagccaggtgtggtggctgacacctgtaatcccagctactcgggaggctgaacctgggaggtggaggtcgcggtgagccaagatcacaccactgcactccagcctgtgtgacagagcaagactcagtctcaaaaaaaaaaaaaaaaagtgcacacttaggcattctcaggcattctcagcgactgtgtcatataggaacacatggacatagacgtgaaaagacaccaagaacacaaaaacacacccagctgtggccattgacagctacaggacactttgacacacccagagtagcacagacctcttgacagtgccatctgcccttatctacaaaggcacacagatacacccaggcccaaccaaaggcagacacagggcagtcctccggctttgtcatgctcatgtgacagaaaccctgatcaaatccaccttccatctatcctgtgcctgcactacacagctgagcatgcatgatggctagagaaagacatacaacctcgacgcctggtctcactttaaatttacaactacaagctgggcataatggtgtgcatgtgtagttccagctactcaggacgcggaggtgggaggattgcttgagcctgggaggttgaggctgcatgcaataagctatgaccacgccactgcactccaacgtgggcaacagagtgaggcttttctcaaaaataaaaaaagaaaagaaaaaggaagctctcggaaaacataggcacccatgtctctgctctccacctgttagtgtagatggacagcacaggtgtcatctaaagccagttcctgtcgtggtgcacaggccccatcccttccttcctcctgagcattgctccaggaagtcttccctctgctgctccatcatcaaaattcccaccagcatataaacacagttattttccatcttaacaaaacttcttttcttttttttttttttgagacggagtttcactcttgttgcccaagctggagtgcaatggcgtgatctcagctcactgcaacctctgcctcctgggttcaagcaattcttctgcctcatcctcccgagtagctgggattacaggcacgcgccaccacgcctggctgattttttgtatttttagtagaaacagggtttcaccattttagccagactggtcttgaactcctgaacttaggtgatctgccctcctcaccttaggtgatctgccctcctcagcctcccaaagtgctgggattacaggcgtgagcgaccgtgcccggcctctaacaaaacttctaacttcacctcccccgccacccctcaaccccactctgggatcaactaaatgttgccccaattctttgctccttttaccttcaaaattcctggaaaaagcgaacaaaattgctgcctccaggtcctccctctcgttctcccttaggcgcaatccacttaggccatctcccccacccctaccagagtcactgtcaaggtcaccagtgaccactgcattgctaaatctaagggtcaattctcagccctcctccccctaagcctattggccacctttgcctccctccctcctcctcgatacccccttcacctggcctcaggctgctcttcctcacactcccttcctggtcctcctctttctcctgctgtcttcctgatggagaaccacagagctcaggccttggtccttttctctactttctctctctcgggatcctgtgtagttttatgacttaaataccatctctaagctgatgactgtcatgtttttaatttcagcccagaccattcttctgaactgcagatctgtgtctctaactacctactcgaccccttggacctaatataatagacatgtagtaggcatctcacattccaggcatctaaatcagagcgccattcccccatgctgtggccaaatctactttactcacatcttcccatctcagttgatggcagctcagtttcctcttttctcagagccaaaaatctatgatcagctgggcgtagtgactcatgcctgtaatcctggctacttgggaggctgagtgaggcaggaggatctcttgagccagggaggttgaggctgcagtgagctatgaatgcaccactgtactgcagcctggacaacacagtgaaaccctgtttcttttttttccttttcttttctttttgagacagagtctcactctgtcacccagattgaagtgcagtggcttgatctcagctcactgcaacctccacctcccaggttcaagcaattttcctgcctcaacctcccaagtagctgggactgcaggtgcatgctgccatgcccggctaattttttgcattttagtagagacacggtttcatcgtattgcccaggctggtctcgaactcttgagcccatgaaatccgcctgtcttggcctcccaaagtgctaggattacaagtgtgagccactgtgtctggctgaaaagctgtttcttaaaaaaaaaaaaaaatctgtgggttcaggcatggtgcctcatgcctgtaatcccaatactttgggaggccaaagtgggcagatgacctgaagtcaggagttcgagaccagcctggccaacatggtgaaactccgtctctactaaaaatacaaaaattagccagatgtggtggtgggcatctgtaatcccagcttctcaggaggctaaggcaggagaatgacttgaacctgggaggtggaggttccagtgagacgagatcttgccactgcactccagcctgggcgacagagtgagactctgtctcaaaaaacaaaaacaaaaaaaccaatctatggtcattcttgattttttttttcataccctatgtccaattagtcagtatatattctacccataaaatatatccaatatccaatgttttcccacctcctccaggataccaccctgagttgaagaaatagcttcctaaatggccttaaaggaacgcgggcgggggatatagggtcgaagccgcattcgtaaggggtggatttttctatgtagccttcttgcttccatttttgcccactagagtctattctcaacacagctgcctcagtgatttttgaaaggtgagtcccatggtgtcattcctctgttctgaactctcatggcttccatctcactgagagtaaaagtcgaagtccttgtgattgccaggcacttgtttgaccttatttcctactgcccctgcccctccagccagctcactcctcaccagccatgaggacctcttcacatagcttaagcatgtcaggtacaattacttttgccttggcactggctgtgtcctctacttgggacattttctgcaggtatccccatggtaacctccatcagggtttgctcaagtgttaccaccctgtttaaaattggaacacccggccaggcgcagtggctcatgcctgtaatctcagcacttcgggaggccaaggcgggtggatcacaaggtcaggagttctagaccagcctggccagtatggtgaaatcctgtctctactaaaaatacaaaaaagttagccaggcgtggtggtgcatgcctgtaatcccagctactcaggaggctgaggccggggaatcacttgaacctgggaggcagaggttgcagtgagtcgagatcatgccactgcactccagcctggtgacagagacagactctgtctcaaaacaaaacaaaaaacaaccaaacaacaacaacaacatcaccccaaaaaaagaaactgtaaaaaattaggccacgtgcagtggctcatacctgtaatcccagcactttgggaggctgaggcaggtacattgcttgagctcaggaatttgagaccagcctgggcaacatggcaaaaccttgtctctataaaaaaatacaaaaattagctgggcgtggtggtgtgcgcctgtagttccagctactcgggtggctgaggtgggaggatggcctaagcccaggaggtgggggttgcagtgagctgagattgcgccactgcactccagcttgggcaacagagcaagaccctgtctcaaaacaaatgaacaaataaacaaaccaacaaaaacaaaaaaacccagcataaagtaaaaataaaaaacaagaaattagccaggtctggtggtggacatatgtggtcccagctgcttgggaggctgaggtaggaggatcacctgaacccaggaggtggaggttgcagtgggctgagattacaccactgcactccagcctgggtgacagagtgagacactgtctcaaaaaatgaaaattaccccaaaaccccatggcttgaaagaaccattttatttgctcatggatgctctccatgaggaattcaggaagggcttacctggtggttctagttcagagtttctcatgtggttgcagtcagatgatggctggagctgggacagcaagggtggggcctgggtccagctgggggctggacaagcatctctctctctctctccacgtagtctcagagtggtctctctgggcaggctgatttggagcagcttcagggcagttgggctgcttacagggcagctggaggcttcaagcccacctggtccagcagaaaaggtggctgctgcattgtcttttaaagttcaaccttagcagtcctgtagcattacttctgacccatcctattggttataagtgtgtcacaagcccaccagactcaagggaaggggtcatgggctgcatttctttcatatatatatataatttttttctttctttttttgtagagacagagttttgctatgttgcccagctagtcttaaactcctgagctcaagcgatccaactgccttggcctcccaaagtgttgggattacaggcgtgagccactgtcgccgcctgcatgcctgcatttctcttcttttcgtttttttttttttttttcattgagatggagtgtcacccaggctggagtgcagtggctggatctcagctcaccgcaacctctgcctcctgggttcaagcaatcctcttgcctcagcctcccaagtagctgggactacaggcgcctgccaccacacccggctaatttttgtatttttagtagagacggggtttcaccatgttggtcaggctggtcttgaactcctgacctcaagtgatccacccacctgggcctcccaaagcactgggattacaggcgtgagccaccgtgcccggcccgtctgcatttcttgatgggagatgtcagggcctccttgtggaagggcatgtgggatgggaggtattgttataaccatctgtggtcccagctactcgggaggctgaggcaggagaatcacttgaacccgggaggcggaggttgcagtgagctgagatcgcctccagcgtgggtgacagagcgagactctgtctcaaacataaccaaaccaaaccaaaccaaacaaaaacggttaactaatgtaaatttcatagggttctacttaatatttgcatatcccaaggtaaagttaatgtgcggataggagattgtggggtatcggggttcaggaaaatatcctaagggtgaatatcgagcctcctggactcagggcgcaggtccagccgccaaaataccccaggggtcctcggtggatagaggacagggattccactttgcgccccaggttgtaatgacaaacaattgccaccaaggggcgatgccggcccggccacgcgatgcaaagtctcgggtagtcccgggtagtcccggactggccgcgtggggtccgcctgccctgcggggaccggcggagtgaagggatcctcccgaggtgctagtgggaaccgccccggggcggcgaggctggggcgactcctgataccctcttgctcatgcttaccgcctttcccccggggccctggccacccccggccccagccagcgccctcccgttcgttgggcccaggcagggctctgtctcggatcccgagaccccaacccttccgggaaaacgcagctcgtgggtgggggagtgagggtgcagcctaacgggggaatcaggggcaaaggcgttgagaggagcaggaggttttatttgggacgaaggtggggagttctcccctcaggctgagccacggaggagggggctcaggcatcctcgggcgggacacgttaatggggcgcccttgccgcaccctggatcaaaacgcgaggttcgagtcctagcctcaatcactggattcgggctgactttgtgcaggacttttgctcccactctggggatccttccatcttctcagtagggagaaagcttctctccctaccttacacggtggctgcggctcaaacagagaaaccaagaaagtggcaatgttcgctgacttgactgttactgtgagtggggcaggggaagggtaaagccgacggtagcttgaggccaggggtggggtgtaggttaaggagacctggggagccgctgcagggttttgaggaagggagtgccttgatttgtgttgagcacttgggagataagaacagttcccaggcagagagaggggggcctggcagtgggaacagacagagggggctgatggttacagcacagtatacttataatttttttaaaatttttttttcaggctgggtgtagtggcccatgcctgtaatcccagcactttgggaggctgaggcaggaggatcacttgagcccaggagtctgagacaagcccaggtaatgtagagagacctcatctctacaaataatttgaaaattagccaggcctggtaacgcatgcctgtagtcccagctactgggcaggctgaggtgggaggatcacttgaatccaggtggtggaggctgcagtgaccagagattgtgccactgcaccccagcctgggcaacagagcaggaccctgtctcaaaataataataataataattaataaataatttcaaaaaataaaagtaacttagagaagttaccaaaaatgttgaaaattggataaacaaaacctacctggcccacaaatacagctgcagtttgcttttggtctatttcttttcaagctctttttacacttaaaaacatggctgtattattgtgtatatagaattaatttttctgatttttcacttatcagtatgtcacagcatttttttttttttaagacagagtctcactctgttgcccaggctggagtgcagtggcacgatatcagctcattgcagcctctgcctcccaggctcaaatgatccttctgcctcagccacctgagtagctgggatgacagatgtgccccaccatgcctggctaatttttttttttttttttggagatggagttgcgctctgtctcccaagctggagtgcagtggtgcaatctcggctcactgcaggctctgcctcgcgggttcacgccattcttctgcctcagcctcccgagtacctgggactacagacaccaccaccacgcccggctaattttttgtatttttagtagagacggggtttcaccgtgttagccaggttggtctcgatctcctgacctcgtgatccacccgccttggcctcccaaagtgctgggattacaggcgtgagccacagcacccagcccatgcctggctaatttttgtatttttttgtagagatagggttttgccatgttgactaggctggtctcaaattcctgggctcaagcattccaccctccttggcctcctgaagtgctgggattacaggtgtgcgtcgcagcgcccggcgcagcatttttcatattactttctgtattcatttcctaaggctaccataacaaagcaccacaaattggtggcttaaacaacagaagtgtgtcctctcactgtctggaggccggaaggcagacacgcttcctctgacaatcctccccctgttccagcctgtgtggttgcgggcagcccttgacttgtggctacatcactccaatctgcttctgtggtcacatggccatcaagtgattcgcgtgcctcagcctcccgaatagatgggattacaggcgcctgccaccatacccgactaattttgtatttttaattattattattttttttgatggagtttcgctcttgttgcccaggctggagtgcaatggcgtgatctcagctcacggcaacctccgcctcccaggttcaagcagttctcctgcctcagcctcccgagtagctggaattacaggcatgcaccaccacacccggctaattttgtatttttagtagtgacggggtttctccatgctgaggctggtctcaaactcctgccctcaggtgatccgcccacctcggcctcccaaagtgctgggattacaggcatgagccactgcgcctggccttgtatttttagtagagacggggtttcaccgtgttggccaagctggtctcgagctcctgaccttaagtgatccatctgcctcggcctcccaaagttctgagattacaggcatgatccaccgtgcctggcctcagtttcctattattaagcacttgattatcatccaatttatatatggttataaatgatgctgtaatgagcacttttgtgcataaaacgttcccttatattgttgaaatatttttttgaaggataaatattcagaagagggaatatctggtaaaggtttttttttttttttttttctttgagacagagtcttgcactgttgcccaggctggagtgcagtgcacagtcttggctcactgcaagctccgcctcccaggttcacgccattctcctgcctcagcctcctgagtagctgggctacaggcgcccgccaccacgcccagctaattttttgtacttttttagtacagacggggtttcaccgtgttagtcagggtagtctccatctcctgacctcgtgatccgtctgcctcggcctcccagagtgttgggattacaggcgtgagccaccgcgcccggccttttttttttttcttttgagacaaggcctcactgtgttgcccaggctagagtgcagtagcacaatcacagctcgctgcagcctcgaccaccaggcttagtgatcctccagcctcagcctcccaggtagctgggactatgggcatgggccaccacgcccagccaattttttgtagagatggagtttcaccatgttgcccaggctacacaagatattttaatgacattactggttcaggaagacgtatgttgtggggagaggaagcatggagaagcaaaaggaagaaaaaaagcatttgctacagcccatctgccagaggcagcatccaccagcctgaccatatagttttacatagacttactacccttatttcttttcccagttgagatcttatttatttatttatttgagatggaatttcactctttttgcccaggctggagtgcaatgacaagatctcagctcactgcaacctctccctcctgggttcaagtgtttctcctgcctcagcttcccaaataggtgggattacaggtgcctgccacaatgcctggctaattttttgtattattagcagagacagggtttcaccatgttggccagggtagtctcgaactcctgacctcaggtgatctacctgcctcagcctcccaaagtgctggaattacaggcatgagccactgtgcctggccccagttgagatcttattgcaggtgacattttgtatcctgtctttcccgcataacattaaatcctaggccgggcgcggtggctcacgcttgtaatcccagcactttgggaggccgaggcgggcggatcatgaggtgaggagttcgagaccatggtgaaaccctgtctctactaaaaaatacaaaaaattagccgggcgtggtggcgggcgcctgtagtcccagctactcggagatactgaggcaggagaatggcgtgaacccgggaggcgaagcttgcagtgagccgagatcgagtcattgcatccagcctgggtgacagagcaagactctgtctcaaaaaaaaaaaaaaaaaacaacattaaatcctagtttctcatatcataaatttcgtaatcatcttttaggtgactgcatagtgttacattgtaggaatgtttcataattttatatcaaatatgctgttattagagatttatgatgcttccaagtttttgctattataaatgaactgtggtgtacattttgtgccttgtatctcccgattgcatgtattaggttggtgcaaaagtaattgcggtttttgccattagaagtaatatttcagcaagtgcccagaagctgaatttctgggttagagtgcatgaatatttttaatgctcttgagtcttgagaagttgcttttctttctttcttttttttttttttttttgagatggagtctcgctctgtcacccaggctggagtgcaatggtgcgatctcggctcactacaacctccacctcctggcttcaagcaattctcatgccttagcctcccgagtagctgagattacaggtgtgtgccactgtgcctggctaattttttgtatttttagtagagacagggtttcaccatgttggccaggctggtctcgaactcctgacctcaagtgatctgcccgcctcagcctcccaaagtgctgggattacaggtgtgagccacctcgccccgtcgagaagctgcttttcaaagagttgtgccagtgtacactctcaccagccacgagccagccagtgtgcccgttttcctgtattcttgccatctgtgagcttgattaatttattttggaaatcttaccaggtaaaacatggcatcccattttgccttttttagttgccaatgttggtatggttccttgctagtggacttgtctgttcatgtccatttacctttgggggagcctaatgtcttacttatagatttgtgtgtatatatatatatatatatatatatatatatatatatatatatatatatatatatatttttttttttttttttttttttttttttttttttaaagagacagcctcttggtctgtctcccaggctggagtgcggtggtgtgatcatagctcactgcagcctcaaactcctgagctcaaaggatcctctcacctcagcctcccaaagtgctgggattataggtgtggagccaccatgctggccttgtattaaccctttgtcatatttgccatctgaatttttcttagtctattgattccttcatttaaaaaacagttattgagaaatgcaaatcaaaactgcttcacacacatcaggatggctaacaacaagtgttgtgaggatgtggagaaactggaatcctagtgtactctgggtgggaatgtgaaatggtgtggctgctatggaagcagtatggcagttcctccaaaaattaagatggcaaattttatgttatgtgtgttttttgtttgtttgtttgtttgtttttgagacggagtcttgctctgtcacccaggctggagtgcagtggcatgatctcagctcactgcaagctctgcctcctgggttcacaccattctcctgcctcagcctcccgagtagctgggactacaggcgcccgccaccacgcccggctaattttttgtatttttagcagagacggggtttcaccgtgttagccaggatggtcttgatctcctgacctcgtgatccgcccgccttggcctcccgaagtcttgggattacaggcgtgagccaccgcgcccagcctgttatgtgttttttacaattaaaatgctagggccgggtgcggtggctcacacttgtaatctcagcactttgggaggctgaggcgggcagatcacttgaggtcaggagttcaagaccagcctggccaacatggcgaaaccctgtctctactgaaaatacaaacattagccggtgtgttggtgcatgcctgtaatcccagctattccggaggctgaggtgggagaatcacttgaacccaggaggtggaggttgcaatgagccgagattttgccattgcactccagcctgggtgacagagtgatactccgtctcaaaaaaaaaaagacagaaagaaagaagaaaaagaaaaaaaaaagctagagaaccagaaaatatccactaaaaagaaaaaaagatgttattgagttctactttgtgttaaatatctctgtgtgctggccatggagattatcaaaacaataaaatgtcaaggtgcccatggtccatggggatggaaatatacagaaatcatcacaacatggtttcaactccgctctgagagaggattgagtgccctggagtgctcagggtggcagtcaacccagggcaggtgaagtggtcagggaagcttccccggggagctgaattgaggataaattaaagttagcctggcaaagcgaggtggtctgatctgtgatttcagttacgcttttatgacatgcacaccatttaacgcttgtgcgggcaaggctgttgacctttctttttgtgatttcttccagagcttttacgctcgtaaagctccctttccgcaagaggtctgatgattccatttcgtcctgttttccacagttcaatttatttttatatttaactctttaatctacctggaaattattttgatgattggcagtgggatgagaccctggtggaaggatgaagaggcagaaacaggaggaaatgtcttcattctgctgcccttcctcctgacttggtggctctggggctcccacgggtcaccttctcctctccctgtggtcatttcagtgatggatgagtgggatggcgtgtggctgtggccctgggtgattggaggtgatggtccagtagaccatgttggtctgaattaggagggatgcagagcagactgctgtgaggacttccggcgtggggactggacaggacagatggaggcatatgtcccaccgctctctgcccctccctgctaccgaagcactcgttctccatccttgcccccttcctccctccctattgctaattttagttctctgttcatctgtttgttttgggctgtgttccctgctggactgtaagctcttagagggcacatgccatgtctgttttgctcagaacaacaggcactggcctcctctcagtgcctggagcaaggactggcacagacgaggggcccagtgaatgttggttggatgaacaaagggaagaaatggcctcttcatgccagccccacaggggtgtggcatgtgggaagctgggaagagtggtcattctgagctgtctgctccaagacctggagacagattgctggatgggggactgaggattcagaacccccagtatgggtcgacctctcaaggtctgatcttcgagctgaattccatcagtagcagggaggctgagaggctgggagtctcccctgcccagatgccttttgtagctgaagtcccagggtagaggcgatgggctgggcccagaggaatagggctggggagacagggctagagtcctggaggcagctgcttctgatgaagctcagtctcaggggctcagaaacattcattacagccaggaggagaagtaattaagtcagagagcagcggcggggagggagggaagccccattttctcaggagtctccaggtgcaattaataagggcaagggaggggagagctctgcccagtctgatgatattggtaatagagacatggtttcagggccacggtcaccatgtctgtgctgaccaccagaggaggggtggacacaggggcccgaggaatgtgttagcatctggcttcatgaggccagggccagaccggcctgagctgagccctggtgttgccgttgacttgctgtaggaacttgggcaggtcgcataatctctctgagcctcagtttccctatgagtaatgtggagctaataatgtgaacctcataggattgctgtgggattaaatgtaaaatgcttagcagtgtgcttatcatgcaacaaaactgggatgatagttagagttgggatcccaaaaatagtttgtgacagctggtgttgagaatccacgtgtcagcaggtatgtgggcagagggcaggaacacgcaggctgcgctgacggtggctcctggtttctgagtcctgaggcagacagcagccctgggaagggtataatgaacccctgctctgtgtttttttccccaatatctgtggtccttacatgaccttgcaaggctattattgttctttccatttacagatgaggaaaccagggcttgggaaggcaaagtggcttgctgaaaatcagtgggctgtagagctggaatttcagttcaggcttgtctggtgccacaatattcaaactcctttcctttaagctgcaaggctacagaaccttggggtgcacaggaagccacatgacccagtcttggggtgcacaggaagccacatgacccagtcttggggtgaaccatggagagcaacaggcattgacctctcaggcacactccatgccatctgtcttgaacaggcatatgggcacgacgtgttcaggaaagaaagacctagacgctcaccctctctctcttttcttttctttttttttgagacagagttttgctcttgttgcccaggctggagtgcaatgaatggcatgatctcggctcactgcaacccccgcctcccgggtttaagcaattctcctgcctcagcctcccaggtagctgggattacaggcatgcaccactacatccgactaatttggtatttatagtagagacggggtttcaccatgttggtcaggctagtagtcttaaaatcctgacctcaggtgatccgcccacttcagcctcccaaagtgctgggattacaggcgtgagccaccgcgcctggccaacattttcatatatagaatacctctacagacttttcttcctgtgtatagacatatattttacgaaattggaattattatatataggtatttttttgtattctgctttcccccataaaatcatatttcataaatatttccatgtcatttaacatttttccaaaacatgatttttaatgattccattggaatattacacctcatttatactataatttgttcatggaacaaatttggaaatttgtgctgtttcctattttgtgtgtgtgctactgttcatcacattgatgaatagccttgtgctatctctggatatatccattggttacattcacaaacatggaagccttggattgaaggataggtacatttaccctaacccagcctcctgtgaggcctgttacagtctcaccagtgagggtgttactgtgttgtgagggaacttgccatggcccaggcagccttggacattgtcatttaaaaacatctctgtggctacactttgggaggctgaggccgaggatctcttgaggacaagagttccagaccagcctggtctatgagtatagtgagaccccgtatctacaaaaattaaaaaatagctgggtggggtggtatgcacctgtagtcccagctactcaggaggctgaggtgggaggattgcttgagcctaggaaattgaggttgcaatgagctatgatcacgccactgcacttcagcttgggtgacagagcaagatcttgtttcatgtatttataaataaaaaaataaaaaatgaaaacaagtgggagtctctgtcattttctcattacttgtaggtactcttcatgtattccagatcttagtgcttctttggttgtatacgttgtgaatatgttttcttaattttgagagttgccttttaatttagttttttattatacagagaactattacattttaatgtcgtcaaatttataaacctttcctttatatttcttttgtttgtatatttagaagagcctttcctttttcattataaaagttatataacaacttttctacaactttagaagagaaacagacaaagtcatgcccagttccaccatctcatacaaccaggcaggatttaattaagagcaaaatcgagatttaatcagccgctcaagccctggtgtagatttagatgatcaatttcaataacctcagagctgactggtgcctgacacccagatgcattgggcagggcatagatgtggcagtgcagaggactgcctggtatgggccttccaggctgcgtccctttattcgcctgtaaaggaggaggtggggctaacacgctggtgtcttaggaggcaagtgcagactctgggttcagacagacccagtttcaaatccctacccggccactggccagctgcaagccctaaggtttccagcctctctaagtaagcggtttccacctctgcgaaatgggggaaacagtgcgtccctcacggaatagttgggaaaatgaaagcagatggcagtcatgcttctcaggcaggcccgcgccccagttcagttagatattattataattattggttattatgggtggtgtcgatggtagctgtgtttaggaattcccgaggagcctcctgctcccacctgctgtgaatccaggtcaagaggtggggccctggctgtgtagagggccacaaggaaaaggaggccaggaccgacagggcaccgggttcggccaggccgaggccacatcccggccgcgcagaggggaaaggagcagggctgacccggaggctgcgaaggctccccgcatccccggggctggcgccccccctaacagcgaccccatcgcttcttggatccaaggagaggggccgccccgccgccccctcggtttcttatcagcgatggcccgataaacgcgggcgataagggcctccggcggccggggcgtgcaaatggggcggcgcggccgtggttccggcggatccgggcgcggtgtttgcgggagataagcgcgcgaccgctgcgccccgctgggtacacagacgccacttagctgcgcaaacagcagccgctcgcctcggaacactcagcccggccggcaccggacacgcggcccctgcgcgcgcctggggaggacccggggaggccggtggggtgcgacagcgacgtcatcaagcagactcgcgcggggtcggggtcggggcatgggactgtgacagccccggatatgtcaagggcacgagcctacaggagagtggacgtgcaccgcgagccaatgtgcgcctaagacccggccccggggagcgttgggtgtctgagcttgttgaatgagggcagtgggtgagctagtggtatctgaggggctatgcctatgacacgtgtgcttggggtccttgagggagcccccagggcatggtcctcatccctgcagtgccccctgtagccaggctgctgcctaacagttctcattctccccttgggaacaggcacccagatccctgagttcccagaagaggctccagcttcccgttctcagcaggactgggtctttggggcactgagcaggccccagagctggggctccatcaggtagggcccgcggtaggagagccactggagggccacccagcacccctttactgcttcccttatctcagggcatcagctccacccccaaaaccctccttgtccctgtctcctactccagctgcgtttttgttgttgttgttgttgttgttttttgtttgtttgttttaagacagcatctcgctgtcacccaggctggagtgcaatggcgtgaccttggcccactgcaacctctgcctcctgggttcaagcaattctcctgcctcagccacccaagtagctgggattacaagcgtgcaccaccacacccggctcatttttatatttttagtagagacggggtttcaccatgttggccaggctggtcttgaactcccaatctcaggtgattcgcccaccttggcctcccaaagtgttgggattacaagcatgaaccaccacgcccggcctccagctgcctttggcaccccaattggctgctggaggctacagacttggggccaccactttcctccttctccttagaacaccccttaccaaaggtcatctgaagaagaaaccctcttatccaggacaaaatgagcagctgtccccagcctggagcagcccgttgaacacagactgaacacaggcatcaggctcaggcagccagttgagcacagaatccagcctgacccatcttcaggcacaagtcttgatgacatttcatgagcttgaaagattttgtccagtcctgttgggttctgtccagtcacgactgttccttccacgtgccttaacctgctttccccccagcccctgctagtccccctgcttctaccacaaccttagctaaacccttctctggcttttgcctgactctgcctgtaagcaagcctaccaagtacaagtgttcagtttgtgcactgcacaagagcatcacatctaggggcatggttcacactgtagttaagtggcgtacatgagtgtgtactgtccttcctcaatcagtagaggagactcctcttacaaaaatgcacacaggcattcagggccatgcatgaggaagcacactcactgactcacacatatacaagtgtttttgccccatcctagcctcactccagacttctgaggtggcttctcctgccggcctgacactctcagagatgggattcccaatccatccactctgaaatgggggtgcttactagctggtactgacctgtcattcagagttggggggtgatgtgtatgggtgagagtgtgggtctaatatgcaggtaggcagggctctggagagctcccctgggcagagctgcgcagagctaagaagttgtccatgaagaggcaatttgatctaattgctaggaggatgcatatattctggctactgatttaaaatgtttatggaaagtgatacattggactatattgatcataccattaagagaatggaaaggcacgctacaggatgggagaagatatttgtaagggacttatttccaaaaaataaatagaatgtttacaaattaaaaagaaaaggtggacaattcaaaagaaaaatgggcaaaaggcttggtcagacaattcacaacagaggataaccaaatggttaataaacatgaaaagggcccagcatggtggctcatgcctgtaatgccagcactttcggaggccgaggtgggcggatcacgaggtcaggagttcgagaccaacctggccaacatggtgaaaccccgtctctactaaaaatacaaaaattagctgggcatggtggcgtgcacctgtaatcccagctacttggaaggctgaggtaggagaattgcttgaacctgggaggcagaggttgcagtgagctgagatcacgccattacactccagcctgggcgacagagtgagactgtcaaaaaaaaaacaaacaaacaaaaccatgaaaagatgctcttttaatcaatcatcaggaaaatgcaaattaaagccacagtgagataccaccacccatccaccagaatgactaaaatgaaaagacaaacatgatgccaagtattggtgaggatatggtataaccaggtctcatactgtgttgatgggagtgtacattggtacaaccacttcaggaaattggccatatctgctaaagtgcaacacatacacaccctataacccagcaattcaactcctaggtgtatatactcaacagacgtgtgtatatatgttcaccaaaagacacttccaagaatgttctgctcggccaggcatggtctcatgcttgtaatctcagcacttttggaggctgaggcaggaggattgcttgaggcaaggagtctgagaccagcctgggcaacatagcaatagcaagaccttatctgtactaaaaaaaaaaagaaaaaaaaaagttctgctgtctcagatgggcaagcttaaaaaagaaatgctcgtagccacagtaatcataatagttccaaacctgaaactatccaaatgcctgtaaatactacaacaaataaataaataatgatatgttcacaccacagaatattacatagagataagaatgaacaaactgtacacacaacaacacggatgaatttatttcacaaacataatattgagcagaagaaactgaacctaaaagaatactatgtggccaggtgcggtggctcacacctgtaatcccagcactttgggaggcagaggagggtggatcaagaggtcaggagttcaagaacagcctggccaacatggtgaaaccctgtttctattaaaaatacaaaaattagctgagtgtggtggtgggcacctgtaatcccagctactccggaggctaaggcagagaattgcttgaacgcaggaggcagaggttgcagtgagccgagattgcgctactacgctccagcctgggtgacagagtgagaccctgtctcaaaaaaaacaaaacaaaacaaaacaaaaagtccaggcatggtggctcactcctgtaatcccagcactttgggaggccgaggcgggcgtatcacctgaggtcaggagtttgagaccagcctggccaacatggtgaaaccccatctctactaaaaatacaaaaattagccgggcatggtggcgcatgcctgtaatcccagctactcgggaggcagaggcaagagaattgcttaaactccggaggtggagattgcagtgagctgagattgtgccattgcactccagcctgggcaacagagtgagactctgtctcagaaaaaaaaaaaaaaaaaaaaaaaggtggaggggaaagaaagaaaaaagaatactatctgattccacataacttatgtgttagaaatgaggaaaaatggttatcctcagcagggaagggatagaaaggtaggggacactgggaggacttcctaggggcttgtaatgttctgtttcttaagctgggtgctggttgcattgatgcgctttgtttgtgaaaatccattgagctgaacatttacaatctgtgcactttaggtgtgctagtcttcaataaaaagttgaaaatgtgttttgacatttatggagctagcgtttgggtaaattgaagctgtgtgtcactgattaaactctcttggccctgttgttccctcccctactcttccccctcttctattcctgggcctcacctagctacccccacacccatttctccccccaccgctggtctgcttctgattgcgcaggatatgcaattatatatataaatttttttttctgttgtttgagacagagtcttgctgtcacccaggctggagtgcagcggtgccatcatagctcaccatagccttcatctcccagcattaagtgaccctcctgtctcagtctcctgagtagctgggactacagcttttttttttttcatctttattagagaagaggtctcactatgtcatccataagcatgtttttgttaaagaagtcctttaaatttttttcccacaaaactgctgtataggcaggtgcagccattgtctagaagccctgccttccctgatgttttatcggtttgagattaggctcagctgtgagtgaagagaaatttcaaaataacaaggacttaaatcagggattctcaaatttaagtgtgcagcagaatcacttggagggcttaataagactccaactgctggggcccatgcccagggcttctgactcagtaggttcgggatggggcctgaaaatgcgtgtttctaattagccgccaagtgatgctgctgctgctgctgccaatctggaaatcaccctttgagaacaactgctggaaacacatcaagtttttttccctcgtgtaaaaagcctagaggccttttggtggttcagagatccttccagcttttcactttggctccctaaggtgcgacactcatcgcatggcccaaaatgactgcttcagctccagccattagagatttattccagcagacaggaaagaggaaggggcagaagaaaaacagacctttatggataagggcactttacagggggtgcccacagtttaagggttagaccgaccaatgccttggcccttctgatgcagagtatggagggctatgctgctgggagcacagggaggggccccaacccagccaaggggtgggagtgggaggtgacctctacaaatagcaattcctgtctacctttagtgttggtgcaaagattacattttaaaaatggatgtgactgtgatttacaagtggcaagtcctatagagaagttccttgcttttctgtctgaggtacagacccaaactggggtgggggtgtaatagcctgttttgggaattacactgagccttgcctgcaggagatatgatctgggagagaggctggcaaggggggtctttaaatactgatggaagccatgaaagatgcttttccccagaaagatacactttcttttcttttcttagagaacagagtctcgctacattgtccagactggtctttaactcctgggctcaaacgatcctcctgtcttagcctcccaaagtgctggggttacaggtgtgagctatcatacccagccaaaatacagttcacttctctctcttttccttcctttccttttcttcccttcccttccttccttccttccttccatccttcttccttccttccttctctctctctctctttctttctctttctttccttctttcctttcttctttctttctctctctttctttccttctttcctttcttctttctttcagggtcttgctctgtcacccttatgtctggtggcataatcatggctcactgcagccttgacctcctgggctcaagtgatcctcccacctcagcctcccaagtagtgtagattacaggtgcgtgccaccatgcctggctaatttgtttttttgtagaaacgggcctccccctgttgcccaggctggtcttgaactcctgggctcaagcaatccgcctgcctcagcctcccaagatgctgggattacaggtgtgagccaccgtgcccggccaagattcactttgatacatgttttactatgcaacctcaaggggttcacaggcccctgaggctcactgaggaaccccgtttaagaatccttgttctagaggaaatctccatctcagcagtggttttaggagccccaggctctgggacagcagtttcaggaggttttcctgaatggccccaactccaaagtggggactctaagtgggaagacccctgtggcagtggcataggtggctctgagatggtgctgcagtttcaagggaccccagaactgggctgaggacacagagtagggtgaaggtaagcaggagaaagtggacagagggacaaaggggcatggagcagggagagtcgggggtgcacctgccaaggaactgcaggtcagcagtgccagtgttgggcgggcaggtgccggaacacctgcagcgtgttcccagctggggcaggactccttgcatgagtcctggtgcaaggggcgtccaggagtggcccctggaactctagtttccaggtcactgacttgggccttgttctccctgggaggtggcggaaaggtgggagtgggtcaattcttgttttcttctctctctgctgtcaccttccaccctcctctctgatagatggcacagactaagtcgcagctaatggctttctgcagagcccttggaactaatgaagctgctaacaagtgcctgggtaaatgaattgccatccctgcctccctctccccctccctctccctgccccgctgaaggccatgggctgcacagcagctcaaggccactggagacacagaatgggggatgaaggatggggcctgtcactctaggccaggaaggcagggtggggggacatgagagggtggaggtaaacactggggagaagcatatatggagagggagttggtgagaattgtggagaaatgtgggtagaggccggtggcagagacatgagcaagaagaagggatgtgtatcgggtagggtggggtgaggtggagtgatggtccccttctgtgccaggcactggtgcacaaagatcagaagcccctgccttgtccttgaggaaaccacattttggtagggggtagagaaacatatagagatagtcactggttggtttttgtttttgtttttatgtttttggtttgagacagagtctcgctgtgtcactgaggctggagtgcagtggcgtgatcttggctcactgcaaacttgacctcccgggttcaagtgattctcctgcctcagcctcctgagtagctgggactacaggcatgcgccaccacgcccagctaatttttgtatttttagtagagatggggtttcaccatgttggccaggctggtcttgaactcctgacctcaggtgatccacccgcctcagcctcccaaagtgctgggattacagacgtgagccaccacacgtggctggcatatatatatatgtgtgtgtgtgtatatatatgtatatgtatacatgtatatgtgtatatatgtatatgtatacatgaatatgtatatacgtatatgtatacatgtatgtgtatatacgtatatgtatacatgtatatgtgtatatacgtatatgtatacatgtatatgtgtatatacgtatatgtatacatgtatacatatgcgtatatatacgtacatgtatacatgtatacatatgtgtatatatacgcatatgtatatatgtatacatatacgtatatgtatatatgtatacatatacgtatatatacatatatgcatgcatgtatacatatgtatatatacatatatgtatacatatatacgtatacatgtatacacgtatatatgcatattcatgtatacatgtacatacgcgtatacatgtatacgtattatacatatacatgtatacgcttatacacgtatacacgtgtatgtacacgtacgtagacacgtgtatgtacacgtacgtagacacgtgtatgtacacgtacgtagacacgtgtatgtacacgtacgtagacacgtgtatgtacacgtacgtagacacgtgtatgtacacgtacgtagacacgtgtatgtacacgtacgtagacacgtgtatgtacacgtacgtagacacgtgtatgtacacgtacgtagacacgtgtatgtacacgtgtatatatgtgtgtatatatatatgtgtgtgtgtgtgtatatatatatatatatatatttttttttttcagggtcttactcctgtcacccaggctggagtgcagtggtatgatctcggctcactgcagccttgactttctgggctcaggtgattgtcccgcctcagcctcctaagtagctgggacaacaggcacgtgctacaatactcagctattttattttattttatttttatttttagtaggacaagatttcgctatgttgcccaggctgctcttgaactcctgggctcaagcaatccgcccaacttggcctctcaaagtgctaggattacaggtaagagccactgtgctcagcctacccactgtttaattgccaaaagaagcctgtgacacgagctttactattctctttttacagtgaggctcagagaggccaagcaaactctctcaaagtcacacagctaagaaatgcgagtgggattcaaacccagaacatctgactccggaatccataccctttccaccacccctaggtttgtaagtatgtggaaaggaaagacatgttcagaaaccattaagaacagatggttctgggttgatctgattttccccgttgatggaattatttggtcggggataggagtgccgcaactcctcatgtctggacttcagcaaggcacacagcacaatctctcctgacatcctgcagacatggggtgatgtgtgggcgaaatggctcaacggctggaagaatttctaattaaatgagaggctgcttctaaaggcaatccatgactgaaagcgggagatggcggctttgcaccacagggctctgtcctttgtcctactctgttgaacttttttttccctatcctcccccccatatttatttctaattatcgaaataatatatgtctgctgtagaaaaatataaactatagctaagccaaaagaaagaaaaagcatcctaatcctcaccagcaccacttgctgaacagcctttttcaatttgctgtaactctgaacatttttagaatacaatgttaggacccgaattcccgcaacaaaagataactccactgttcacactgagggcgcatcctgccagtctctttattgcaaacaatagcaagaaaatgtagcacgttatggggtgcttacattgagctggcaacagtcctgagcttctgacagccattatttcattcaatcctcctaaccctttacgggcacttttatgacctatttttcacagatgacaaaaccaaagctcagagatgaaatgatttgctcacaccacagagactgggtgaacaattgacacagggtttgaagcaggttttgtcggattctggagtggggctttgagcaaccatgggacacctccctccaaaggtgcctgcgtgttcacctagaaccatcccccactgcctgcccttccaccccaccctctactagtaaagggggcagtttgtgcaggacggtctgaatctgcctgttgcttctcttctgcttgcacagtagcatccggggacacaaatgttatgtgcgggaaatgcgcgagggaagaaaagacacacccacgatacctttaagggtaaacaacctttatcccatgtaaatggcaatgtagatataataagcaaatgatataataataagcagattgatataataagcaaattgcaatgggaaggggagaagggaaaagatattcatactcaccagactatggaggattcaccaccagactgggaagcaacagcctgggtcggctccagagtcggccacttgtccgtgcacagacaaggaagaggtctcatgaagctttggcacaatctaggaccctagctcttttgtaacgagttgtttggcatgaggtccaggcacgaaggcccttcgtgaccaggctcaaggaacacaaaaaggtcaacttgtttttgcgattgtctgttgtttttcttatatacttatttatttattttttgagacggagtcgtgctttgtcacccaggctggagtgcagaggcacgatcttggctcactgcaatctctgccttcccggttcaagtgattctcctgcctcagcctcccaaacagctgggattacaggtggccgccaccatgcctggctaatttttgtatttttagtagagacggggtttcaccaagttggccaggctgatctcgaactcctggacttcaggtgatccacccaccttggcctcccaaagtgctgggattacagacgtgagcaaccacgcccagctttgtttttcagtaacgtataggaatagattgaaatagagatttctccaaaacagcgctggatgaatgcctcaaggggctcacacagccccttctggtacttggtgaccattgtttgtgtccatgttcaattgagttcagatttaatatttaacttttcctccacaacgacctaggatgtgatcccacaccaggcacaaaccccagagactctcctgatctgtcagtagccacccatgggtgcttacagtaggagggtggcttgcctaggaagccaggaatttatctttaagtgacaaacactttttaaaaacttactttcaggttctgttctaagcactttagaaataactttttttttttaaatgacttttttggcagagtgctgtggcccacatctgtaatccagcactttgggaggctgaagcaggaggatcacttgaggccaggagtttgagaccagcctgggcaacatagtgagatcgtgtctcaacaaaaataggctgggtgcggtggctcacgcctgtaatcccggcactttgggaggctgaggcgggcggatcacgaggtcaagaggtcaagaccatcctggccaacatggtgaaacaccgtctctactaaaaatacaaaaattaggtgggcttggtggcacgcctgtagtcccagctacctgggaggctgaggcaggagaatcgcttgaactcaggaggcggaggttgcggtgaaccgagatcacgccactgcaccccagcctagcgacagagtgagactctgtctcaaaaaaacaaaacaaaaccaaaaataaatactaatacaaattagccgggtatagtggtgcatgcctgtttgcctagcaactaggaaggctgaggtgggaagatcgtttgagctcacgagttcaaggttacagtgagctatgactgtgccactgcattccagcctcggtgattgagatcctgtctcaaaaaaaaaaatgttttttaaagtaacataaagttggccgggtgtggcggctcacgcctgtaatcccagtgctttgggaggctgaggcaggcagatcacctgaggtcaggagtttgagaccagcctggcccaacatggtgaaatcccatctctactaaaaaaaatacaaaattagcccggcgtggtgacacacagctgtagtcctagctattcaggaggctaagacaggagattacttgaacctgggaggtggaggttgcagcaggccaagatcacgccactgcactccagcctgggtgacaaaatgagactccctctctcaataaataaataaataaataaataaataaataaataaaataaaataaaataaataaataactaaagtaacataaaataaaattgaccattttgttggtgtacagctttatgagctttaacacatgtatagattcctagacccaataatggtgtctgaacaataaacattcatacacaaaaaagagaatttcaaccgaaacctcataccttatacaaaaattagctcaaaagggaaagcaatgtaaaataataaaactttagagaaaagtaggggaaaatcttcatgacctcagtttaggcaaatagttcttagactggacacccaaaagaatgagtcacaaaagagaacaattgataaattggacttcatcataaataaaaacttttgttctatgaaagacagggttaagaaaacgaaaaaaccagctacggactgaaagaaaatagttgcaaatcacatattcagcaaaagacttgtatccagaatatataaagaacccttcaaactcaacaataagaaaaccaacaacccacttaaaaaaaaaaaaaccacatgaacagacactgcaccaaggaggatataaagatggcagataagcacatgaatagatgtttgacatcattagacaacagaaagatgcaatttttttttttttttttgagacagagccttgctctgtcacccaggctggagtgtggtggcatgatcttggctcactgcaacctacacctcccaggttcaagtgattctcttgcctcagcctactgagtagctgggattacagacttgtgtcaccatgcccggccaatttttatatttttagtagagatggggtttcaccatactggccaggctggtcttgaactcaggatctcacgtgatctgcccaccttggcctcccaaagtgctgggattacaggtgtgagccaccacgcttggccggaaaatgcaagttaaaaccatgatgagctgcactatccacacattagaatgggtaatataaaaaatattgacaatccgaagtgccgagagggtgcagagcaattagaactcttgtccattgatggtgggaatgcaaaatggtacagccatcctggaaaacattttgcactttttctaaaattaagcacacaattacatatgacccagaaaactctcttcagggtatttatcctagagagatgaatatgcccacatgaatgtttatagccgctttattcatagttgatccaaaatggaaacagccctaatgtctttcaatgggtaactgagtaaacaaaccacattaatatattggcatatttactattcagcaagaaaaaggaatggactattgatacacagaacaaattggagtcatctcaagggcattaggagtggacaaagcctgtctcaataagtcacatactgtattattccagttgtgtgatattccctaaaagatagaactatagtgatggtagtgggtgcaaacattagggctgagaggcctgaccacacagggatagtactagggggtccttcggagtgatacagtccttctgtgtcctgactatgctggcggttctaggagtcctttctccattcagttgtctttgcactttggtcaaaaatcaatttgccatatttgcatgggtctatttctgtactgtctattctgttccattgacctagctatctgtcatttcacctgtactacactcactgtcttttttttttttttagacagggtctccttctgtcgtttaggctggagtgcaatggtgcaatctcagctcactgcaacctctgcctcctggattcaagcaattcccatgcctcagcctcttgagtagctgggattacaggcatgtgccaccacgcccaggaatttttgtatttttagtagagatggggttttttcatgttgcccaggctgatcttgaactcctggcctcaaatgatcctccagcctcagccactcaaagtgctgggattacaggcatgagccaccttccccagctttttttttttttttttttttttttaagagacagggtcttgtttttttatccaggcagagtacagtggtgtgatcatggctcacggtaacctcacactcctgggtttaagcgattcccccacttcagcctccccagtagctgagactacaggcaccaccatgcccaacaaattaaaaaaacttttggctgggcgtggtggctcatgtctgtattcccagcactttgggaggccgtggcagatgtatcatgaggtcaggagttcaagaccatcctggacaatatggtgaaatcccatctctactaaaaatacaaaaaattagccgggtgcggtggcgggcacctataatcccagctactcgggaggctgaggcagagaattgcttgaacccaggaggcagaggttgcagtgagctgagatggcgccactgcactccagtctgggtgacagagcgagactccatctcaaaaaaaaaaaagttttttttgtagagacagggtcttactatgttgcccaggctggtcttgaactcctggcttcaagcaatacctacctcttgacttagcctcccaaggcattggaattataggcgtgagatacccagcctggcctaagagtattgttttttaattgtgagtggattttgaatttttgtcaaatggtttttctttatcaatcaatatgagcatttgctttttttttttttttttttgagacagagtcttgctctatcacccaggctggagtgcagtagtgagatcttggcttactgcaacctctgctcctgggttcaagcgattcttctgcctcagcctctggagtagctgggattacaggtgcccgccaccacggcccagctaatttttgtatttttagtagagacagggtttcaccatgttgattaggctggtctagaactcctgacctcaagtgatccacccgcctcggcctcccaaagtgctgggattacaggtgtgagccactgcacctggccaagtgattgatttttgaatattgaaccagccttgcattgtcaggataaatcccacctgattgtaacatatacatttttttttgttatatattcctgagttcagttgtctaatatttttttctttttgagatgcagtcacaccctatcgcccagactggagtgcagtggcacgatcttggctcactgcagcctctgcctcccaggttcaaggcattttcctgtctcagccacctgagtagctgggactacaggcgcatgcccccatgcctggctaatttttatatttttagtagagacagggtttcaccatattggtcaagctgatctcaaactcctgacctcaggcgatccacccgccttggcctcccaaagtgctgggattacaggcttgagccactgagctcggcttatttatttatttagagatggagtcacactctgctgcccaggctggagtgcagtggcacaatcttggctcactgcaacgtctgcctcctgggttcaagcaattctcctgcctcagcctcccgagtagctgggaccacaggtgcacactaccacacctggctaatttttgtatttttagtagagacagagtttcaccacattggccaggctgctctcgaactcctgacctcaagtgatccatctgcctcagtctcccaaaatgctgggattgtaggcatgagccaccgcgcctggccagctaatattttgttgaagatttttacatatatgtccatgagagatattgatctgtagtttttttttcttacaatatctttgtttcattttggtctcagggtaatgttgccctcataaaatgaacgaaggagtattttctcttgttctattttctggaagagattgtgtaaaatcagtgttatttcttctttagttatcccgctctactgcacacttcctatgattgtgtccgtgttcagggccaggtggcaggaggacacagagagaagaaagctataggggttctccttcttgggactacaactgtttttaaaaataaacacacacacatacacgcccaggctggtgtcttactcctgcccgcaagtgatccacctcggcctcccatagtgctgggattacagacatgatccacagcccctggcccacaactcttgatcggagagggaaagatttggttgtctgtggaccctgcagccactgatactactgtcaccactgctactcccatggaattgtctcggggctggggcacgggagaatgaagaagagaaaaatggagttccttttctctctctcagtgctagaccttccctttccactcctcgaggcagaacgagcatttctcctgttgatccctctcgtagccccagtgcccattctggatttggcgctgtcttgtatcgaggctggggaatatcagaggaaaaatgagaaactcatttcagctcagtggaacgttgaattctggctttcttcccccgtttccccgctgtgtttactttcacactcttcagagagctgccccgtgcgtgtctgtccatgtttcacagcagcattcagcaggagagacagggtggaggctgcttactccatctcatctggaacctaatagctttttaaaccatcacaaccatatgaagtagatgctattgttatatacatgtggccgatgacaaaactgaggcccttagaggttaagtaattttcctaagatcacacagctagtcagtggccaacccagtcatcctagccccagagtttgtggtctgagctgcaagttccacagcttcagagggagttgaatgtgacagctctgtggggtgaggtatggggctcgcctgctgtggacaggccctgatatctcactccctctaacctgcacagtgtgtgaagggagagtgcatagtgtttagggaattgctttcttcttcttcttctttttttagacagagtctcactctgtcatccaggctggagtgcagtggtgtgatctcagctcattgcagcctccgcctcccaggttctggtgattctcctgcctcagcctcccgagtagctgggattataggcacgtgccaccacgcccagctaatttttgtatttttagtagagacagattttcaccatgttggccaggctggtctcgaactccagacctcaggtgatccacccaccttggcctcccaaagtgctaggattagaggtgtgagccaccgcgtctggccttttgctttcttctttgatgaagatctggactgtggtgggataggaatagccttctgtcttcaagacatatgcatgtatgtgcatgtgtgtgtatgtgtgtatacatgcttatgtatgtgcctgtgtgtaaaccatgcagccatggacagtgaggatgtggatccattcattcagcaagtgtacttgagccaccaccatgtatcacacattattctagtcactggggatatatcagtgaagaaacagacaaaaacctctgctctcatggagcctccattctagtagtcagacaacaagcatacaaataagtcaattacatagaatgctagaaagtgctaagtgctggggaataaacagggcagataaggaggattgggagtgttggggtaaagggcaggatatagttattaacacgaaacgatgtctgccatgtactcttgaatgcactgcctaaactgcgatttcatatgacttccttgtattccagaggaaactcattcaggcaagttcagccctttatgaggaattcccctgtggtcacattccaattcctggacctgctgccaccctcagaactgcatgctccttcttcagactttctaagaatgactcaggtcattggtggagtgaagtcaagatttccaactcagtcacctgaagagatggagataccattcatggagctggaggtccctggagatttgggaattcagataacaagctaagataagggtgagctactgacttgacctctctctgtgtcagtttcatattctgtaaaaccaggctaatgatggtacattatgtgttgtgaagactaaaataatatgtgagacgtacctggcatagtacttggcacagtgtaggcacttaagaaagattgatttattatttttgctatttaggctacattgactttaagctgactgagagatatccatggggatatgtctagaaacagtggactatgtggatagggaactcggcagaggagcaaattacagggattttgggggtgattaaaatcttgggggtagatgacaaccctacagtgaagaagaaaaaagaaaagagagccaagcatctcatcttggggagcaccaatgtaaataggcagaaacaggaaatgccaggaaaaaatcattttttgttttgtacttacaatggctagaaaaaaatataattttacttgtttctctctcttttttttttttttttttttttttttttgtgagatggattctcactctgttgcccaggctggagtgtggtggcatgatctcggctcactgaaacctccgcctcccgggttcaaggaattttcctgtctcaaccttccaagtagctgggattacaggcacacaccaccatgcctggcaactttgtattttgggtacagacggggtttcaccatgttggccaggctggtctcgaactcctgacctcaagtgatccgcctgccttggcctcccaaagtgctgagattacaggtgtgagtcaccatgcctggccaaatatatacaatttttttttttttttgatacggagtctcactccgtcgcccaggctggagtgcaatggcatgatctcggctcactgcaacctctgcttcctgggttcaaatgattctgctgtctccgcctcctgagtagctgggattataggcacctgccaccatgctcagctaatttttgtatttttagtagagatggggtttcaccatgttggccatgctggtcttgaactcctgacctcaagtgatccaccctcctcggcttcccaaagtgctgggattacaggtgtgagccactatgcctggccatatatacaatttttatttgtccattattccagaataaacctggaagaaaaaaaaagagaaaagaaaaggaaagaaaaaaaagactagtctggatgctaaggatgttcattgctattggtttcaacattgtttctagcccttttctgtaaacagagatttccaaatcaaagtcaggactgacgggtgtttatttaacctcttctatatgacatctgtgtcctctttcttccacattgtaaattcttgttctcaaggacacaggagatggtagcattaaaaatcccatttattttagaatagcatttgtttgatctatattacacagacgtctcagaataaatacggactggcaccaccagttattacggaaaacagttgattttttttttcttttgagacggactttcactcttgttgcccagactggagtgcaatggcacaatctcggcccaccgtaaactccgcctcccgggttcaagcgattctcctgcctcagcctcctgagtagctgggattacagctaattttcaagcgattctcctgcctcatcctctcaagtagctgggattacaggcatgcgccaccatgcctggctaattttgtatttttagtagagacggggtttctccatgttggtcaggctggtctcaaactcccgacctcaggtgatccgcctgccttggcctcccaaagtgctggggttacaggcgtcagccaccgcatccagccagcattagttctacataactgaacttaatgctcatcaccaggccttatgtcaatgtttttctagtcattttggttgtctgaagtttattctctagtagattcctcaggaaaagcttatgggcataatattccctgagatcttgcatgctgataatagtttgattatgcatttgaaggacagaatagctgggaggtagaggtgagaggattgctttagcccaagaaatttagaccagcctgggcaacatattgagactctatttctacaaaaataaaagaataaaacactattaaaattagctagatgtggtggtatgcacctgtagtcccagctgctcaggaggctgattgcaccattgcactccagcccggatggcagagcaagaccctgtcccctcacactgccccaaaaaaaagaaagaaagaaaaatgatggtaatataacataactttctttatagagacagggtctctctctgtcaccaggctggagtgcagtggcacgttcacagctcactgcagccttgatctcggctcaagcaatcctcccaccacagccttctaagtagtgggactaaaagtgcatgccatcatattcagctattttttgtatttttttcctattttgaccatccatatcagaatttttttttttgtatttttggtagaaatagggtctctttatgttgcccagtctagtctcgaactcctgggctcaagcgatccacccacctcggcttcccaaagtgttgggggattacaggcgtgagccactgcacctggtcagggttatttttctctttttctttcttttctctctgttctctcttttctttctttctctttctttctttctttctttctttctttctttctttctttctttctttctttcttttccttccttccttccttccttcccttccttctcttccttctttctttctttttttttttttttgagatggagtttcactctgctgcccaggctggagtgcaatggcatgatctcagctcgctgtaacctccgcctcctgggttcaagtgattctcctgtctcagcctcctgagtagctgggattacaggtgtgtgctaccacgcctggataatttttgtatttttagtagagacgaggtttcaccatgttggccagagtagtctagaactcctgacttcaagtgatccgcctgcctcagcctcccaaagtgctgggattacagggatgagccaccgtgcccagctcagggctatttttctcataatagttttgtatgggatttgagcttaatacttttacattgctaatttttatgtgaaactaattttcctgaattttcagaaggaggcttcaccagagagtttttctaacttcacaaatctcttccttttattgttttcacgtaatgtgaaaatgacggtggctttggtctgagctttttctggctctgttcctctctcccctttttatctggatctctttctcccccttttcttgtctctgtgctgcttaattttgatcctgctcttagtggcttatctgtgggttcagtaccataagggagccctggcgggtcagtgctgagagctcaggggacaagaacttctccaggccctttagacttgaacgagggcattggtgcccttgccctcgcctgctactgtgatggctgtttcagcagctgtgtgccgccccccaaaaaatgcccattgcactttccaggtaacacctgttgactacatctcaagtcatacaaatcagaggcaaactgaagtgtttatgcccctaaattcatcagtcattggttaaacccgcccctggggaatggggaagccccaggcacttccaacgtgatgcaggcaaattggtcccggcagtctgagggcacccctgtgactaaaagattccttcattcacgtggtcaagaatgctcattttttgtacagcatggtgactatagttaatagttaataatactgtactatagagtgtagatcttaagcattctcacataagaaaaagtaacaatgtgaggtgatggatgtgttaatttggttgcagtaatcattttacaatgtatacatatatcaaatcatcacattgtacactttaagtatatacaattttattggttaatgatacctcaataaagctggaaaatggctcatttttacatttccatttggcattgcattaagggtcatggaaggggggaaatagaggagtgagagggtacccccattccttctaatagcacattttgagagtggcacacatcactcttgctcacatccattggccggaacttagtcacaagaagtcacttggctgcaagggagactgggaaatgtagtgattagctgggaagccatatactcagctaaactctattgtaagagaagaaggggaaaataggtactggggaacaatttatggtctctttcctaagactgatgggaaagagtgaaaggaaaagatgcgtgaggtagggtgacaggctcccacttccaggcaggggattgagggaggaggaggatgcatgctgaggtgaaggccactttcaatgtggtaagagatagctgagtttggaggcagagaagacagaaattgggctggcatgagggttggggaaaatggaataaaacaggccgggcacggtggctcacgcctataatctcagcactttgggaggctgaggtcaggagttcaagaccagcctggccaacatgggggaaaccctgtctctactaaaaatacaaaacttagccgggtgtggtggcgcactcctgtaatcccagctactcgggaggctgaggcacaagaatcacttgaacccaggaggcggaggttgcagtgagctgagattgcgccactgcactccagcttgggtgacagagcgagactccatctcaaaaaaagtaaaaagaaaaagaaaatggagcaaaacagagccaagggccttctagctaggcatggccacgtgactaagttctggccaatgggacaggagcacaggaagcaatgcagcttcctcatcatactctttatttccaacttttaaattgaggggtacatgtacaggatgtgcaggtttgttacataggtaaatatgtgccatggtggtttgctgcacaaatcatcccatcacctaggtattaagcccagcagccattagctattcttcctgatactttccctcctccccgactttgcttttttggtttgcttgtttgtttttttttttgagatggggttttgctctgttgcccaggctggagtgcagtggagcaatcacaactcactgcagctctgactcctcaggctcaagcgatcctcccacctcagcctcccaagtagctgtgactacaggcatgcaccaccataccaggctaatttattttttattgtttgggtagagacaggatcctgttatgttgcccaggctggtctcaaattcctgggctcaagtgtcctcctgcctcagcctcccaaagtgctgagattacaggtgtgggccaggaacctgacctctaccataccaaactcttaacttccttgtttctcatcccggtggcctggaatgtgaatgtggggtaatgaacaccgttttttttttttttgcgacggagtcttactctatcacccaggttggagtgcagtggcatgatctcagctcactgcaatccccgcctcctgggttcaagcaattctgctgcctcagtctcctgagtagctgggattacaggcacccgccaccatgcctgactaatttttttgtatttttggtagagacggggtttcaccatgttggccaggctggtctccaactcctgacctcggtgatccaccaccttggcctcccaaagtgctgggattacaggcgtgagccactgcgtctggcctaatgaatattgtttttttttttttttttttttttgagacaaagtctcactctcgtccctcgggctggagtgcctcagttcattgcaacctccgcctcccagttcaagtgattctcctgcctcggcccacctgagtagctgggattacaggcacctgccaccatgcctggctaatttttgcatttttagtagagatggggtttcaccatgttggccaggctggtctagaactcctgatctcaggtgacccacccgccttggcctcccaaagtgctgggattacaggtgtgagctaccgcgcccggccaaacattcttaaaccatgtagatgggtgcataacttggagtaacaagatagatggtgtttgggctccttgtagatcagaggcaccctatcccctggctaccagcttggtttcttatacaagagagaaataaacatctatgatatttaagctaccgctatttggtatctattaagggggggtgcatgaatatcttagctaatatgttcacatgttgactgactgattcaataacctaggagcacacacatgccagtatcacatcagatgccaggagccacaaagacacaagtccataagggcctggtgaatcagggagctgactgtgtctgacctaggtcagaactgtttctccctgaatccatacctctttcaggacttgagtttctgcacctgcagcacaggcctcttgagactgttgggcccttaaaaaagttttggattcaaacaggagcattcatgtggaggggatgtgcgcagaactcacaggggctggcgcccagggaccctcacagtatctaatttcaggcttcgcaacacacaccagcattttatttttatttttattttttttcttttttgagacgtagtctcgctctgtcacccaggctggagcgctgtggagcgatcttggctcattacaatctccgcctcccaggttcaagtgattctcctgcctcagtctcgcaagtagctgggattataggcatgcatcaccatacccagctaatttttgtatttttagtacagacagggtttcgacatggccaggctggtctcaaactcctggcttcaggtgatccgcccgccttggtctcccaaagtgtggggattacaggcatgagccactgcacccagcctatttttattggtttttaaaaattctttggttgttatttaagccattaaatagaaataccctttaaacattcaaactatattggaaatatataaagtactagagaagcccttgttttgatataaacaggtctgagtcattgaccagtgttttgaaaaagtcagcttaaatgggcaatcataaagacacatacaggtcttagtcactttgttttgatttcaaacacaaaattcacattgaggcacgaatttttctttgggtgtcttgactcaaattaccctttgactttcttgcataaatcacacccacaatcctataatttgtcacctgttatttccagtttctttaaacttaaagacacttgtgaagcaatctgatgtagcacacttctagatttttaggattttcccttaatggtttatctttcacatctaattcaacatgtcagcaaatctctttgtgtattacttccaaagcatttaacgtagtttgcaaggaaacaattctttatgcactcatatttcatcagtttatataatatttaattcaattatatgattacaatgacaaatacacctggcataaacaggctagggacacatccaaccaaaaggcaactcaacccagaggtagctgaattcttgcttttctagaccaggggtcagcaaactacggccctgtgggcctgtttttgtacattctatgggttaaaatgccttttaggggccgggtgtggtggctcacactcgtaatcccagcactttgggaggccaaggcaggcggatcacttgaggctgggagttcgagaccagcctggccaacatggtgaaaccccatctctactaaaaatacaaaaattagccaggcgtggtggcatgtgcctgtaattccagctacttgggaggttgaggcaggagaatctcttgaaggaaggcagaggttgcagtgagctgagatcatgctgctgcactccagcctgggtgacacagtaagactccgtctcaaaaaaaaaaaaaatgccttttaggtcaggcacagtgactcacacctataatctcagcattttgggtggctgaggccgaaggatcccttgagctcaataataataaaaagaatggcttttaaagtggttgaatctgtaaacagttgaaataaactaaaaaaattttatgacatgaaaattatataaaattcaaactttaatgtctgtaagtaaagatttactgaagcactaccatgcccattcttttttttttttttttttttttggtgtattcagtggctgctttcaagctacggtggatgaacctaacggtgtcaacagaaactctatggaccacaaagcctaaaatatttactatctgctcctttacagagtttgcctacctctgtcctagagcgaagcctgagccttgggcgcgcagcacaccacaagtatctgttactgtgttttgcagaagcttcaggtaagagggagagctcctaggagagctcctaccataaaaagtgaaaatcccttacttcttggcatcgctgtttcctaaacccaccccctgctcttctcaaggtagcttcatggtttgcttcctcacttccttcctgggctcaagtgagcgatcctccaacgtggtctcccagcgcactgggaaagacatgagccactacacccggctctgatttttctctatagcacttatcagacatattccatgcttatttatttatttatgtatttattcatttatttgagacagattctcactctgtcaccaaggctggagtgcagtggcaccatctcggctcactgcaacctctgcctcctggattcaagtgattctcatgccatagcctcctaagtagctggattacaggcgcccgccactgcgcttggctaatttttgtagttttagtagagacggggtttcaccatgttgaccaggctggtcttgaactcctggcctcagatgatccacctgccttggcctcccaaagtgctgggattacaggcgtgagccaccgcacccagcctccatgcttatttatttattttctatttcctgtcactagaatgtgagctctataagggcaaggattttgcctgtttgttcactactctatcccagtgcctagatcagtgcctggcacacagcagggacttaagtgcttgttgaatgaggattgaattacttttttttttttttttttttggagacagtttcactctgtcgctcaggctggagtacagtggcgcgatcttggctcactgcaacctctgcctcctggattcaagcaattttcctgcttcagcctccagagtagctgggactacaggcatgcgccacgacgcttggctaatttttgtatttgtagtacagatggggtttcaccatgttggccaggctggtcttgaactcctgacctcgtgatccactcaccttggcctcccaaagtgctgggattacaggcgtgagcaccacgcctggcctgaattacacttgctgtatgacaacctgctatctctaggaccctgggcatgaggaaatgcctgagggtggaaagcagtggagcagtgccacacagtgcatggtgatcaaagtgaggccttgtgtgtggggagtgggtacaggcaggtgggtgatggggtacagaattctaagcctctggggatgaatggcagaggccacaccatcttgatgagtggcccttgagcccactggacaaggagaattgttggctggggtccaggtccatggtctccctgacttggggtggccttgccaggtgctctcagaatggggaccattctgattctgtcccctcccctttgattctgtcccccacccttcaaggacaaaccggaggcaggtcctggtctcacttctacaaaaacaattgtttctgaagtttcccccctcacaccctagacatgtctcatggccactgagtcatgcagcaatgatgggtgtgggtgtgtggatcggggggtggctgagcccattgatcgagggctgagacattttccccgctaatcaacaagttaataagctcttcgatgaggaggcggtgattaatgaaccaatcagcttgccctgtaattggggagtgagattggagggtgggggtatgagggatagagagggtttgcggggatgtgcggctggctcctggtccacactgagaccacctaggggcccatttactttggctataaatgaggaagtgacttcttcagaggttgtagcccgaattcaggccaccccatgccctctagcttctacagtgtctctcctctcttcccatctgtccttggactccacattccccaagacatgacagggttccagggatgtcagattccccatggccatctcacagtttccttcgtctctgtccagaatcggtgcactagaaatcccctaccagcaccatggttagtgccgccgcagggtcagaagagcaaatagccccctactctctggtatccttgcccccgttagcctgcagggtccttctctaggccctgatccctgggatcacagatgtcctaaccagcccccactgctccctccatcctagggtgagcacctgtcttttgtctttccatggaggaatggaattatttgatttctgctgtctcccctccaaacaggacaaaggctgtctctgtctctctgtatctgttctgggaaccgctcatactggggctcccctatgacatggccatatctctcctttgagactggggttcttgaagggcaggggtgtgtcttgccccctggatgagggctccctaagaagaatgatttttctcctccctccaagggcaggatctatgtccccttgtcctggtgtcctcttccacccccatgctcagcagggcaccctggtgtttcctgggatgtggagtcccatggggcctgactggctgataaggagccatttccggagaatgcaggtgattgaacccataaaatggtgacagagagccctgaactccccatctcaggagagctctaaaaatagcgcccacagccatctgtcctggggctggaggggctggctcagaaccaagggcctggacaagttggccccatcagtccctatgggccgatgggacatctggaagtactggaggtctggcgaggccagggagaggaagctggaagggctttatggggagaccttcccacagccctttctcctcctgggcaggtgggtttgagggggttggcagtctgaaggtccttcccctactccgcctctcagagtgggtgtgggccctagacttagtcttcgggtccctgctcccaggcctgcctctggcgccccaatggctactccaggtgctgagcctttctgcccctcacaattgagaggtcctcttcctgggttctgcctcaccctgcttttcctgtttgaattgtgggtgagcttggctgctccatcacctcccagggcttcagtttcctcatctggaaaatggagataaactcagctcatcgtcttgtgatgcccgaaattatgcactacctagtgcatagtaggtgcttaataaacacgagtcctttccttcaaaggatctgggcttagagcccagtggagactgccatgggctggggacagtggcatgtgcctgggaagccttggcatcactcaggcccagaagacaccagtgctctgaatgacacctgcataggggtggagacactctgccttgggagggggctctataccacacatggctggactggggtctgtgtgtgccagtctggatacacaggtggccgactcagctgcttctggcggggagattggtttctgcctcctcctgcctcttttccaactctttaatagagagaggacataatggagtgttcagagaggcctctccccaagacaccataaactgcaggtcaggagccaaggtcaggtgctcccaccctgcctccaggagaaagactttccccaaaaggtcctgtcattcctcagcccttctccaaggtattactgaacagaggctgaaaagggttgtcttttggaaagagtggtcacacatcccacggactggagggaatgtgtccaccctcccacccccaactcccatccacggacaggctagggaagacagaatctcaaccctggtcctaggggctgccccaggagtctagatccaaccgcttcacttcctcaggaggctagacctgccactggggggctgtggggtgaacatggggttcaggctgggtaccccatccagtgagaccacgaatctgagcatggcaactgccccctcagctcctgcgaggtggagacatcacgcactggctgggtataagctcagcgatctggcgagggtggaaggagggaggaagaagggcccaccccctgctggctccccctccccctgggactccccctccctttccaggcggggatataagccccacaaggaaagcgctgagcagaggaggcctcagcttgacctgcggcagtgcagcccttgggacttccctcgccttccacctcctgctcgtctgcttcacaagctatcgctgtgagtggctgggggctcaagcctggggaaacccaggctgttttgtggggaaactgaggctgggatggtggaagctgggggtgagtggtaggaaactggattggagggggccatcggaggtgggaaggaggccagcagcgggggtgggggtggggaggcaggcagggcttatgctcctctgacatgaggaaactgagtcaggagacggtgcagtgcccaagaacacacagcaagcccggtggctgagccttggtccggtaccagccccagggagagcgtcggagcgcggccccgacggcagccgcagcctcccgccgtgtagggtcgaggcttggaatgacccacgtcccaatgtcgccttcccagatggtgttcgtgcgcaggccgtggcccgccttgaccacagtgcttctggccctgctcgtctgcctaggggcgctggtcgacgcctaccccatcaaacccgaggctccccgcgaagacgcctcgccggaggagctgaaccgctactacgcctccctgcgccactacctcaacctggtcacccggcagcggtgagcgcaggcgcggagcgggacccctggggctctcaccctgcggccccgctccacctgggggcgtggccagatctgaccacgctcttcccttccccgcccccaggtatgggaaaagagacggcccggacacgcttctttccaaaacgttcttccccgacggcgaggaccgccccgtcaggtcgcggtaaaagcgcccgttaccacacatcctgcatccgagagcgcggcctggccctaccctggcaacatcacttaacgacgtctcccaggctcgcctccccagatccaattccttccccttcgcttccgcaggtcggagggcccagacctgtggtgaggacccctgaggcctcctgggagatctgccaaccacgcccacgtcatttgcatacgcactcccgaccccagaaacccggattctgcctcccgacggcggcgtctgggcagggttcgggtgcggccctccgcccgcgtctcggtgcccccgccccctgggctggagggctgtgtgtggtccttccctggtcccaaaataaagagcaaattccac

SEQ ID NO: 626 - DNA, 5622 bp, Homo sapiens
gcttggggagcctaggggccgtctcggagaaatggggtggtccccgccaggcggcggcggggcgggccctgggcgccgaaggggttaaggcacctgggccaccgcccctgccggcccctcctcccgcggccgggaagaggaaagtcgcggcgggggcgcggcccggtctccgtccccacccgcccgccgtcccgccggcccgagccgtggcgcccagagctgcgagccgctcgcccctccgccgctccggcccgggccgccatgtcgctgtggtgagtggggctgggggccgtcgggggcctgggcgggggcgtgggcccggggctccccctcctccgtggccacagacgggcgccgggactcccgggataggagatgcccccgcgcgcgccgcgccggcctcagtttcccgggggcggatgggcgggcgggcgcggcggcggcggcgggagatgttcgcggtacgcggccccggacccgtgggggacgtcgaggggtctcggggcgccgcgctcagctccccggccccgcggccctggacaccgctccaggaccctggcggctgggaccccaggtcttgccggcagctgggtcccctctcccttccagacccctgagggccccctgcgtccgggccactctcctcctctcggggcttccttccgcgggacctcggaccgccgcccgcccggcccctctccgcccctcccgggctttccctacgaatggagcggacccggcaggtggagcgcccgcagcccagggcctcgccgccttcccggtgcaccccccgacctcccccgtcccggcctcggtgggcggcttccctggaacccctagggctggcagggccggatccggagccctccgtttcctccccggagagctggaccttgggtcacaccccccagcctgcacctaaggtgcccctgtcttcctccaaccacatgccccagcaacctggggaccctatggggaaaatgtcgctctatggggctcagcctgcattcaccctggggcctggacctgcaaccggaccagccctcagggcaacccaggcgtctccacgggctgcctgtctctcctggcaccctgctcctcccccttggaggtcagcgccatctctctgctaggctggccctggaaggccactctgctgtccccagagctctcagcccccaggtctccactggggagggtggggcaggtgtcctggcagcccccggagggtgagatgaagagaggaggtccttcaggacaggggctcaggccccagggcttgggacgaccagcactcctggcagagagctctaatttctgcttccgaaatgggtgtggaccggggttggggtgggggggtctctgggcaagaagggtccctcaagggctggagctgcaaatgtgccccctcccagggagtagagctgtagcctcatgtcttctaatggggtgttatgagctggggatgttaaggtaggggtgaggggcagtgccatgctagaggtgctcactgcatccttgggcctccatcaaccatgagggctgctctttgttgggtgagacagactggagaagggggaggagggccagtcttcctcaggtcccaagctcgagccactctccaatgtgccccacatgtgatggagctcccgggcggcacagaggatcagagggtgccctctcaatgactctggctctgagtcacctaatgataccgatacctactgctgtgggtaggtacaccgcagggaaatgaaaggcattggggttccaggcgtggggaacagggcagaggtttccacctgaggccctcctgttaaggtgacagcattcccctaactgtgcacccgctgcctggtactttatatagcactccaatcctgtgttttagccccatttgggggaagaagaaatcgtggctcagagtggttgtaaaccactcattcagcttgtaagcgtcagggcctgattccacagtgctccttgaggagagggcagggtgggagaaagaaagggcagggtgggagaggaagcgggaccctaccctgacagcttagggactccgggactgagcctgtgcccaggtccacttgcccgtctgggaccacccagcctcccaaggggggcgccaggagagccctgggctcatcttttctctctcctctgtactgtccgctctcccccacaggaagaaaaccgtctaccggagtctgtgcctggccctggccctgctcgtggccgtgacggtgttccaacgcagtctcacccctggtcagtttctgcaggagcctccgccacccaccctggagccacagaaggcccagaagccaaatggacagctggtgaaccccaacaacttctggaagaacccgaaagatgtggctgcgcccacgcccatggcctctcaggggccccaggcctgggacgtgaccaccactaactgctcagccaatatcaacttgacccaccagccctggttccaggtcctggagccgcagttccggcagtttctcttctaccgccactgccgctacttccccatgctgctgaaccacccggagaagtgcaggggcgatgtctacctgctggtggttgtcaagtcggtcatcacgcagcacgaccgccgcgaggccatccgccagacctggggccgcgagcggcagtccgcgggtgggggccgaggcgccgtgcgcaccctcttcctgctgggcacggcctccaagcaggaggagcgcacgcactaccagcagctgctggcctacgaagaccgcctctacggcgacatcctgcagtggggctttctcgacaccttcttcaacctgaccctcaaggagatccacttcctcaagtggctggacatctactgcccccacgtccccttcattttcaaaggcgacgatgacgtcttcgtcaaccccaccaacctgctagaatttctggctgaccggcagccacaggaaaacctgttcgtgggcgatgtcctgcagcacgctcggcccattcgcaggaaagacaacaaatactacatcccgggggccctgtacggcaaggccagctatccgccgtatgcaggcggcggtggcttcctcatggccggcagcctggcccggcgcctgcaccatgcctgcgacaccctggagctctacccgatcgacgacgtctttctgggcatgtgcctggaggtgctgggcgtgcagcccacggcccacgagggcttcaagactttcggcatctcccggaaccgcaacagccgcatgaacaaggagccgtgctttttccgcgccatgctcgtggtgcacaagctgctgccccctgagctgctcgccatgtgggggctggtgcacagcaatctcacctgctcccgcaagctccaggtgctctgaccccagccgggctactaggacaggccagggcacttgctcctgagcccccatggtattggggctggagccacagtgcccaggcctagcctttggtccccaaggggaggtggagggttgaggcctacgtgccactgggtgtggtggggtgcaggtagccagaaagggacctccctgtgtggataattctaggaaactgaggcccaggaacggttggagctgcccagtctggaggccctctctgaggagcgaggcgccaggccctggcagccctcctgacctgggtccgttgctggccccctcagatgtggtgggaggtcctggtgacctctggaggaacgctgtgctcaggtacctgggctaggcctggcctgatgggtctgtggccgcccctcgtcttcacagggaagagtcttctgtgaaatgcctcagtctccccagaggccgggcggccctggcaggagaaactcaaccctgtgcgggctcacaggcaccccccagtccacaccctggtctcctgggagagagggcccagccggctctccgcagccccaggcctgcctggagacgggccgcctctgccacagggcctccactcctggctgtgtcctgtaaggtctggaagggcgaccgctctgactacctcagcgcccctcagaatctccctggggctgcagccctaccccaccccgacacagggcagaagagcagcgctcctggccccccgaagtcccagagctgctgacccccaccccaggcaagtctctcccgcagcccccacacccccaggcctggctccctggctggaaagcagccggtttggccctggaagtggacattcctctattactgtgaagttttatttatgaagaatttggagggagaaggctccaggcttcaggagggggtggtgtcctccctggccctcctcccttccctcccctcattccagctgcctgccctcagcacccccaggcccctcacagcccagccccctccagagccctgccccaccgcaccctgcttctccagggcctagcagaccagcatctgccccggtgaagggatggatcagctgtgggggtgggtgcagaaggttgccacctcctacctcagcgggagtcacctaggaaagatggagggattgacactattttctcaataaaatgggacttttttttttttttttttttttttttggtgtgaaacttcctgttcccagctgcatcagagagcctgtctggggccaaggttgccagagatttctgaagacacagcttgttccttgttcttggctggtgggtgcacaaggacttctggaagggatttagacggggctgagtgctaggattaaagtggggatgggagtacggcaacagaaaaacctgggagctagcaatgcacccagcccttgactgtgccctggtggacagccgagctgtggctctagcgtgagccagtgccttcctgtccctgccaagggtgaggccagagttggccccgaggctaatgtttcagtgggtgagattaggtcggccgtacagaggccggtgggctccctgacatcccttccaggcaacctgaaagcactgaaatagcttatggccctgtgccagggaccttggcccaagctgctgacctccagggtggggagggagctacccccaggagaagagtcactcagacagcagtatgagcaagccagccagcagctccgtgcctgcacccagctcaggggaatcccagggggttcagatgcccaggaaggaaaaggggacagcgctactgctatggaatgagaccaccacttctcctgttgtccttcccagcttctccccaacctccccttttccctagtttataagacaggagaaaagggagaaagcaaaaagctggaaagaaacagaagtaagataaatagctagacgaccttggcgccaccacctggccctggtggttaaaatgataataatattaacccctgaccaaaacgactggtgttatctgtaaatcccagacattgtgtgagaaagcaccgtaaaactttttgtcctattagctgatgtgtgtagcccccagtcacgttcctcacgcttacttgatctattatgaccctttcacgtggaccccttagagttgtaagctcttaaaagggctaggaatttctttttcggggagctcggctcttaagacgcgagtctgccgacgctcccggccgaataaaaacctcttccttctttaa

SEQ ID NO: 627 - DNA, 18124 bp, Homo sapiens
ggctacttagagtcgtcggcgcggcggtgggaaagcagagccgagccgggactgtccagtgggagcaggcgccccggccagcgcagacctggaggcgcacgggcgccgcaccgcacgattcggctcggggtagagcggagccgcagccccacgcgcagcccaggacccactcgccaccgccgcttcctcagcacccatggggaccaggagactttaaaggagtttggggtttcgggagcagggaaatcacgggtagggagaagcggctttctttgccttggaaacggtttttcttcatccgattgtttggatcctgtgctgggtaggagggagaggggtctttgggctaaaagtgaacctctctacacacacacgctcccacccacacccacacacatacactgcactggctttctccatccttcccctgcctctttgttaggttattttagacagagcagcctcgccctggcgcagtcccattggccctgatggggacaaggcaagagaagtaaggggcagagtgcacctgcctgtgagggcaggtgtgcccgggtgcttgggcgtacgtgcaacggcgagcgtgcaagcgtggagctgaaattgtgtacgaatgtgtggggtctaagtgtgccagtgtgtcgtcgcgaaggtttgtcattgtgggtgtatgtgacatacaccagtataccaggctgccagtgtctggactcccaagtgtccaaaatgttgctggtgtcaagtgaatgcctgagaatgtgtctgattgtcattgtgcgagccgctgtaaggggaggaaggcaacctagtgcaaaactgggaggtgggctggagagggtggggacagaaatgggagcttgctcccagctcactggccttaggctcccttctccctttcagcccacccctcggtccttcctgggtgtccgtctcccacactgccacagccagcactctcctccccaccgggaccccgcaagctctccagccagcctgggtgttttcttctgggagttggaccgagttcccggaaggggtcggaggctgtgtggtggcgtctgctctcgcctgacctgtggcggcttctccgcccctcgtacccctggggaggcacggaggactcggctggaaagggtgactccggtgagggcacgtaagctagccggcaggtcccaggggcactgcacgtcttggggagggacaccgaaaggggcagcccggactctgacggtgtctctgcctctctgtgcctccgcagatccccgctcctggccctcgcctcgccacctcattgatgggcaaccaactggaccgcatcacccacctcaactacagcgagttgcccacaggggacccgtcggggattgaaaaggacgaactgcgggtcggggttgcctacttcttctcggatgatgaggaagacctggacgaacgcgggcagcccgacaagtttggcgtgaaggcccccccgggttgcaccccctgcccggagagccccagccgccaccaccaccacctgctgcaccagctggtcctcaacgagactcagttttccgcctttcggggccaggaatgcatcttttccaaagtgagcggtggccctcagggcgccgacctaagcgtctacgcggtcaccgcgctgccagcgctctgcgaacccggcgacctgctggagctgctgtggctgcagcccgcgccggagccgcccgcgcccgccccgcactgggccgtctacgtgggcggcgggcagatcatccacctgcaccaaggcgagatccgccaggacagcctgtatgaggcgggcgcggccaacgtgggccgggtggtgaatagctggtaccgctaccgcccgctggtggccgagctggtggtgcagaacgcctgcggccacctgggcctcaagagcgaggagatctgctggacgaactcggagagcttcgccgcctggtgccgctttggcaagcgggagttcaaggcgggaggggaggtgccggcaggcacgcagcccccgcagcagcagtactatctcaaggtgcacctgggagagaacaaggtccacaccgccaggtttcacagcctggaagacctcatccgcgagaagcgccgtatcgacgccagcggccgcctgcgagtgctccaggagctcgccgacctcgtggacgacaaggagtagccgcctaggggctgccggcccctctgcctcccccgcacctcgctcccttcccttccccgcacccggacttcgcagtcagcggttctcaacctctgccccgccccgccacgcgcgtccgccgccggtggcccgggcccgggctgcacccccgcatccccaagccagcggcaggaagtctcaggaactgccccagggccgaaagggcgccgctgcgagcgcctggctgacagccacagcggtggtgacggtgctgggagaccccgcgtgcgctttccccttgagatgtaaaccgggaacggggaaggggctgaggggagaaaggacatggccttccccgcgagtccatggccagtgactgtggcccgactcgaaaacaaccctcttctcaaaagggaccatcaccgccccgagcgtgcgcacacagaccggtcggaggcgagaactggtctctacagggcacagttcagctcctctgtggatgcgtccccagatcgcaggatttccaagaaatcgagcctgtcccttgtgcacttgggaataattccccaagacagcacttcgggattccgggttatcctgaggctgcccgggacttttccagctctccagccccaggtctcctgacattgtgttccaggctgcgggctaagccagacagtgtttgcctccggttctttccaccgtgggaagcgaacgccacccccacccgcctttgcctgcgagtctccctcgctggcagaagggaagccggcccggtcccgggaggaagatggcgctgcgaattcggtgaggacagccggccccgcccccgacaaggagctcgctcgttcacctggtgtctgggaacttgaatgtgtgaagggcgcttattgttctgaacccttgattgctccctcctcgggctgcatttcaaaaatagtcatatttttaaaggagttggaggagagggagggggaggacatggcaccattccagaaaccagcattgttacaacaccatagccagtatatttagtttggcttttcctaacatagaaatcttcaaagctggggaagtggaaataaagttttaaaaatgagagagcagttttccaactatgtcaacaaagcctatcgtgttgatgtttttattgaccattttagcaacaggctaataaaatttcaaattgaaatttttattttcatggctttaatccatgatagtttaaatactgggggccattaagagtggatgtagctaagagcttagctaacattgccttttcactctatttttctcagatattgtaagcattctgtttttcaatattgtagttaattttttggctttcaacagcagccctagtaatggtggagttgttaattaatgtgtatattgtactgaatttctgtcagttaaggggttcactgctttggtggaaattggtggaaattgctagcaggttccacgatgtttatttttttctccatgttgtatatcattaccatttcacatacgcgtttctatttttcttcctctcctcctgatctccttaaaaatgaatctagagttggtggctttttccccctcctctttggccagttccacagttcagttcttcctgaaaacagggatgatgaacttgtaggatcaggacaaatgtgtgtttttcaaaaacttaaggctgggtgtgaaacaccttctgtggacaaggatttgtaaacttctctcctccctccagctgcggccccagcctaactgatagttacttgattcagtgtgctagacacttaaatagcatctatgtctctttcaagggaatttgtcaaataatgctgtttagctaattgttgcaagcaattgcatattaacagctgtgattttgttggacagcaagtattatggccaaagccagtttcttggcatttcaaaaataatgcaataaaaactagttgaggttagctgaggctggaaatgcctttttcatggtaaatgattcacttctatatttttctttctttttctttttttttctttggttttcatcctggattcatcccctgatcttaaatcaaaacgtcagatcaatgaactatgaactaaagtatttttcttaagcctattgagtgatttattttttaaaaaatgtttaaatgcatatgcttttctttcagcacaaacaacagcaaaaacttttgtaataactaacttacctttgcatgtatgaagaactgagtcatttatttccctaacttactcctctttcaagtaacaggtggcagatcataaaatgaattctttattgtatctacacactccacattctttactgtgtcctactactgtatcttggctccctgctgtattaaacaccatcttaagcacttgttcctgcaggactccttcttgacattttgtctcccccttcaaagtcactcaaagagtgggacttcatcaaaagaaatgaattagtctctatcacaccgaatactaagatttatttcctctgatggtacatagatttctctctcactaagagggtcactctcatagaggaatgtcttgtcagttttatacttgctgaggctagactgacaataaaaatgagctgggcagttaaattagcatttgttactatattggcctataaaggatcaggttgatgataatacctctaaaaatatgcaataataaaacaatagttatgaaagaaacttgaaaggtttgcaaggtttctcctatccctgttaaaattatcatttattatctctttgtcagtgttagtaaggtaacccatgacagaataatttgagtgatagttcatcatgcagaggatatgatcaagatattacctaatggttttatcctgaaaaaggtgtatacttttagggcactgttaacaatgcgagtgaaaccaagatggtgcaagttccctttgcagatggcgtgggcacacttgatttttattatgagtgaatgtaatctttctgtattttaccagagttacagcaattacctgaaaagtttcctaacattttaataatgttagggatttcgttttggttttagttgtcctcaagagacaacaggttcacagtaatttccatgatgttgggtgtggctaagctggggattggttctgttccccctgctcccgtgtagagaaaagctatatttatactgcattctttctcaactttcaggtaaaacaaactatgatttaaaaaaagaaaaaagaaaagacaggtacttttacttcaaagagtgctttgctacatttttatttaaaccaaaaatcaaataaaataaggaggggggctgggtatactttaaacaaaaccagtcctgaaatgctgttattctcaaagtacattccaaaaaaaaaaaaaaaaaaaaactatagaatttacgtatgttacatttttaagtatgagttaaattgatataaagtgttcctcaatatttaataatgtaagctgttgtcatgacagtattttttaaaaataataacgtatattatagttacgaaacacttgtgccagattagaacatcaagcacagaagcagctgtatgatttacctgtttttttgaaactttaatgtttaccttcccctatgtttaatttttctgtggtgaacacttttgttagaacatggcttttttatttttcttggaaaaatatgctattagtatttacaaaataattaattacctgaataagcagtatatactaaaagtcttcaaacattactttattgattacttatgttttgtggtgcgctttcaacatccctaagagttaaatgtcttagtcatctaatacatggaacagggtcaaacttcaatgaaattaatacttattgcacaatcataatatagcaacctaattttcttttatttataggcatatctttaaagctttcttctcttttttgaacaaatgaagagaatccagttagtttttgcctttcagaggtgatttgccacgtgcacaaagggtctgtaggtgaaaagacaggcttttgggtttcttgaaacatcaaaaactgaatttagagaatggttatctaacactcaagtcaatgttttttttgaaattactagctattggtataatatacatatatgtacatgtatacatatacatacacacatatgtacatttacacatatgtaagtatacactcatatacatatatacacatgtatatatacttgtgtacacatacatttttgcctatagctagcaattatttcattcagatacacacacacacacacacacacacaggctacttaaaatagagagtgacttgagatatacaaaaacaggaagaaaagccctggaggtcatatagctaatgtataactgcacagcaagcagctatgtctaaagctaacaataaaaagaaaatgtgggagttgtgcaattagttttattctcattttttggaagaatatgttcctggtttctctaactaaaaggaaaaaattcaaaggaaagttgtaaatattaggaagtaactgaaaaataagaagcaagataaagtggggaggctatgagatcatataatgagctaataaacttttcaacaggggacacctgttctcccttctaactgaagacactaaagagaagctaagatcctatctttcaatcatttagtaattcataaaatcccattatttcataactcaaagtttacctttgaggttgtatgtttacctcatttgaactcgaaatagaagaggtttaagtatttgaataagttgggaaaaaaaggaaaaatagtcttccctgcccttgtcactgatggtgacactacttgtaattactgtattttttggcagaacactcagatgaacagattcctatgctgtggacttttatcattctttttgatggctgatagtagaaagcacacagtaggtactccataaatgtaagactatggcagctgtctagtacaagtgcttctcactgattcttggttaccaggaaaaccagaaagcccgtcacttgccttgcctgcaaaggcgagcctaaagaaatttctctaaccaaaattggcaggttctttccaccacaaaaggctcttggaaatataacttatggggcttaaggctaatttgagttgaagggtatttgtaatatttgatttgcttttagcagagaaaacaataaaagaatccaggaaaagtagaaaatgttctcttgtcatttggtcagaaagggaaaagcgaagggaaaagcaaaatagttccaactgtaactttcacaacttcatctctcattcacctcaaggagagatttttctcgcatgaaatcacaagattattccttcagaaggaagcttattgtagctcttgctaaaaattttctttggtatatgggaatagatttactagatgtacacttaactctgggaaaattagatttgatggagtttggtcatgggtgtttttctaaatacacattactcatttatatattaaaataattgctatgcctcttggcttttataatccagttcttaatatgaacatgagttctgaactttattttgtccaaaggatagatacttatgaaatactaggtatgaatagagtcagtgtcctaaatttcaagcacaaaatgaatgcttcaaaagttactttgagcatcatttaatgtttcaaaaaattgaaaaagatcatataaggctattgcttatatgtatcctaaggaaattcttgccatcaatgggtgatacagacattaatgttctatttgagagcttctttattataagtacactgacatttactttagcaaataagttattattctaaattcagttattttccctgtgacagccctgtgacataccagctctttgctcacttccaagtccactgtagatttcagattctgcaagggggtgagcagatctagggagatcatacccatgatgactttgtaaaacatctctcaactcccaacagcacacgcactttatttcttcccacctttcacttctcagtgcaagtgtctgcccagggggtctgagctagagggaggcaaggctcagaggtaggattaccagatttagcaaataaaaatacaggatgctcagttacatttgaatttcagataaattattgttgattttaggattatagttttaggataaatatgttccctgcaatatttaggttgtttgtactaaaacttatctgtttatctgaaattcaaatgtaagtgcatgtccagtatattatctgtcaacccttctcaaggataattttatcaactctaagaagcaatagagccccctgactttttggagctggcgaactaaggacacaccccctacccacaacattgaggtcctgtgagattttccatgtgtcttttaaggccagagtcaaattcagtcccaggaatgagcacatagtgcaggagaagcctcagaagagttcacagcccccatggtcgttgagagagagttggttgtgtgtatgtgtaggtgcgggtgggtaggtgtttcttgtactctcttgattctattttataacagacaccatcctttacctggggatatgacgaatactttcctaggtatagtcaggaatactgtatactactgttttttatcccacctatttatcccaatctggattgtcactttacacctggctatttctatagcttcctcacctgtctctacccctctagctcctctatccaaacacctgtgcctatagtgatgtatctaaccacagaatcatcactcccaagtaaagcctgagctccttagtggggcagtcagcatattccatggtctggcccctatcttcaccgacttgcatttccttcaactctcagcttatacttgggtcgcacaggactttttgtagaacacgtagttttcattcatacttccatggctttctatgttgtccccttaacctgattaccattctaaattccagaacagcaaactcttattcatctatgctttatgccgagctccatgctagcccctcaggtggctttagtcattttcttttgtagctcccattgtagtttgttagcacccccagactctctcttcaactacaaataccaatttatgtctgtctcttcctaggtctactggggaaggctctgtgacttgctcttttttgctgctggaaagtctaacacttgcagtaggtgctaaattagagtctattcactcaatggaggaactggggaaggtatgtgaggaataccgcccagcatctatctaggaggtaaaccacggtaggaatgggctaacggtgtgtatcaacttatacgagattctccttaagaatcatacagtagaaatttagtttctgtttagaaaataagctggaatgatgtgaaccttcactgtggtatattatactgcaagtgatgggagattagctatacagagtttaaaaggtttctctgtcctgggtataatggtacaaacatttcttcttgaatgaactttatgagtttcattactatggaaatatagatttttctcctcttggtcatttaatttctgcccaggtgaggtagttgtgggtgttgcaaatttcaaaggcacctgaggtttgatttgcaagaattaaagatgagactagacatttcttgaatagaccactgtagtgaatgggctgtagactgcccgagatgttcagtcagcggagaaagagtctactgaaaacctaagtattgtttaccttttggaaagtaaaatctctcccaatcttactaagcaaattcatctacattcacctacagcatgtatggggtcggggggtgggggcagaaaatcaccttgcctgaccttccagtagggggagcagaagaaaaacagcctcctttgattgacggttggacctccaggctggttgaacagctagaataatttgaaatgcaattgagcactgagaatgtaactagattaatgtcttatgaaatatatatgcttttatattgatgtgttccttggaactcctaggaggagcaccccttacttttatagggacttattattctcttagcacctctggacatttaatttagtttaatctggttctggacatggttaaggttgcctgtatctaagacaagctactttaatttgggattttaaaccacaatatcctgttgagaaaaaaagtgtcaaaattctagagagcttctttagagtgaaatattattactaatttgggattcgaaatccaggtaaatagaggttctggtaaaatattgcttatgccctgagagcaatttccagagtagacagtggaggagatttttcattatgcagcctcactattctgatttcagaaatcagtgccccttgcatgtgtctgctttatttgtgtataattttataagacaggatctatgaaagaaaatgagaggagaggtagttactccatcctttataggccaacaaaacaaaggctctaaatccagattaattctgcgtatgttacttccttacagcctttaaggactttccataactcataagataaaacccagactccctggcagcacgcaagctctgctccagtctgtccggtactcccctcctccaacctcaacacccagcctctgaagcttcatcccctgatcttcacagtgcattctcactgggagccatctgtactggaccacctacctttccccaaaagcctagtagttgtatgcctttgctcaagctgtttcacttgtgtggagcattcttctcctctacttggcacatgtaaaagtcctcctcatccagagtcctggtgagaatgctgttcacttaccagctgttctgtgaagcttctccttttcctacaacaccccctacaaaaacagctaaaactggccaaattcatcctctcccatttgaacttctggtgtagcactttctccaaacatttaatgatcatgccgtccatttaatattacagttttcagcccctaaactatgtcaaacatagtctgtttaagttaatgagaacctgattgccttctgaaataagtttgaggaaggtgtcttggcactttgatctttgattggttagtaactagtatctggtctatagtaggtcctcgatcaatactgacttaattctctgaatctaatttaattcaaaaacaactattctacagcaagaacagtaagttgtattttgaaattaatgtcctagtgggagataaactccttaaacatgtgttgggtccctaataaaggcaagcattttttttttaatttcacgtggatacaaagcatagtctagatttcaagaacgagacaggacaaaggagacaggcccactattagctataatccattatagcctggaatataggtaattacccaggtataattttttaaaaaataccataggagttcaaaggaagaatcacttgaaggtatacatcagcttcaaaaaacagtcattgactggcatggcatatttggatgatgtttctgagataattacacatttttgttaattttttattattaggtagaaatatagataaatatactttcttgttatttaaatataatagactatcttctgtcattgtatattaaatactattttagagtgagtttggtcttatgaagtctgtagaagtacagtttaaatgtgtttaagcgaagtccttttgatgttgaactaccaagatcagcagattattagcattagatttaacaattaattcacctcccagtgtatacttgtagacatggtctttgattgatagattgattggatgcctaagattcagttcacagggttgggacaggttctttaatcggtaactgtgaaaatgcaagagcttcttggagtggggctggacccaaagccgtgatgacctgagaggatagtctcacccaaggagagaggccgagctgatagacaggaagacaggttcataggccagtgctgaggagctaggggagctataaagagaaagaacaagcaggatgttggagctatgaggacaactatcagatgcagtgtgcagaatgttgcaggaccaagacccttttccaaagtagaaataataattgaggtgcaacagttgctaaaagggaattaacaactctaaaaaaatggtattggctcacaatctatataaatatttcaattttaaagcatattgtgtttaatttaaaatggccttctgaaggaaaaagcaaaacagaaaacctgttaactttgacagtattctttcaatataaataattgaatttctttgaagaaaaacaaatctgagcctcttgtccaaagaaatcttgaatttgctcatgtgtttccaatggcctttggcacatagcattggctttctaaatgcctctaataactacagtaaatgtctctatgaaattcagcacatcatacaaatgaaatgttccttcttgtgtgcaattcccatttactttaagaaggagaaattccagattatatacaaagattgataagtttgccaaaatatccaggtatataaccatcagcttctggactgcaattccttaatgttaatgaattccaaagaaaaacagctgactttatgcatttattttaataaggctgtgaaaacagtccatttacagtgtaaaaaccccttgtcttttaaaaatgctagacggaatcttttaataaattaaatttatctgcctgtcaaattgacaagaaccttcaaggagtattgctgatgttgtagttctacttttccaataggattacatctggaatttaataagggctgcttagaggaagaatctatccatcagggtaattttaagtaacaaatatttatataatatcttaagtctccaaccttatagggccacaatgattttgtttcctttgaaaaaaccttttattacttacaatagtgtcctgaatatcatatttgcttataaagatgaaataacgcaaggaggcaactaagtctacaacatcagaagaataattattgacatttgctcagaaatgtatagcttacatagtcaattgtcctcatgaccaaccttgtgtctgtcaggtcttactgttccctgcatacaaatagggacactgaggcttggaaggggaaaacacccaactcagtatcacttatcttgcatttagtacacccagcactttaactcaggggttctgatccaaaacgttaacatctgtctgtcctttgtaagattttcctggaataatcaaatgtctccctccacctttttcttatagaacaaaacccatttaatgttttcagtgaatgcctggggtatttatatcaaagttctagtagtggccagttaatgaagatgagctcttaatttttcacaatgatctaccttagagaggtaggtatcagggtattcaaaaaggcaaatccattcaaactctggaccaattgtataacacacactaaccacctatacttgatgtccaacctcctggaatgaaagtctcaagtacatgtccaaatgtcaaaatggaatcaagcctcaattttcagattcttttgtttttcatcctcaactttagaaacagaggtgcatctgttggataatagtcaaggcgtctgtgtcggtaaccaggggtccaaggtaattctcaaaggacttttcatttattcatcaataaatactatgctattgatcatgtgttgggaaaaatgtctttcaaaaataagttgaacaagaacaaacgtcaatgcatagcatgcttttaataagaagttaaatattctggataaaaagtgtatttgcaattttaatcaaaatttttccagcaacaacctgcaatagttgtacaaaataataactgtttagtgactggccaggcctaacagcagggtaatgacatgagacaggccaggcactaatctggatgaaggacctatttacacatgtaaagatccctatttaacttagctggaagagcattaccatgagatgctgcagtaaaacaagttacccatgaccattctcattaaaacatatctggtatccatttctaaattagattagttattcctcatgaaccatgaactcactggagatcaaaatagacccaaataaatgaaacccactcagtaaatagtctcagagaaagatggtatatgggaaaggacattggacttgaaaaacacgtggctacacatccaactctttgcttcttggacaagtcactgccctgagcctctatccctcagccttttaacaggagactatgaaccctaactcacaatgttaggatgaagctgactaaatgtctataaatctgtccacccacaatcctttgtacataaaaggcaatcagcagacattagctgaattaagttaaaatactaagtgaattttcttttatcactgagattgcaggtttcccaatttttgaatgtgttttatttgtctttataggtgataaatctttggagagaatgggtcttctcttacttattttttaacccccttagctgaatttcagacatgaagtagttcaaacacttcttgataaaagtcaaagggcaactaaaattttatccaaatagaggtgctctgaggacaatgaaaatgggtgtttcttagaatgaatatatgaactacttgctgtggactcaataattttaccctccccaaatccatatgttgaaatcctaacccccaaagtgatgatattaggagatggggcccttgggaggtgttaggtcatgagggtggacccctcatgaattggaatagtacccctataaaaagacacttaagaccttgctttttctctctattagccatgtgaggatacaatgagaatatagcaatctgtaactattaaaagggccctcaccagaacttgatcatgctgacactgtgatctcagattttcagcctccagaactgtgaggataagtcactcagttcatggtattttaacccaaatggactatgacactattctattaaaggaagtacaaatacttcctcctaatattttattcaatgactgcatctaagctgcactgaaagtctaaaaatagtacccacagctgtgttcccatggccagaggattctccaggcattatcctcctacccttcactgagaactattgcactctcgtctatgttcactgcttttaaggacttcccaatgcttacagttaacttctctgccctttcaactgaaaactctattgcaaggtttatctctgttgtatattggaggaaggtcttacacgcatgattctttattataaaagttatgtttttatttgtgtctttactcagacttttaaaagtgagaggaaaattgtataaatattgtatccctcagtctgtagaggcatcagttcctcatagactctgtctcccctttggagcctctgcctattttattagcacagcagttctcaaccttcttggtcttagggcctttaaattactggggaggccatagagtttttttctatggaaattatatttgtcaacatttgccacgatagaaataatactagattttaaaatattaacactttttaaaattccaaatcacaaaactattacctgtcacatagtgatgctttttgtaaaaggaactatatattccaaagagaagagtgagaagagtggcattgtttcacacttttgcaaattttttaaatgactgttttaatagaagacaactggattcttatgtctgcctttgcattcaaactgttctcatataacacatcctgtaacctttgtcaaacccctgtaaacacttgtataagaattagaggagaaaagccaaaatggtagaattgtgaaaatggttttgagcttgtgcatcctgtaaaagagtctccgggatcccacaggattcaggaccacactttgagaaccactgcaatgagatcttgcctagctttccaagtagcttccaactagcttctcctggtgttcatactcaggacgtccatctgccaaatcaccacatcagtgaaatacacatgtaactggcatgaagtaatacaatcaaaactatcctgtttttttgaatcccacatttattcatgaaggtagtttctcccctgtcactgggtaaagtcaggccagttcattaatgtttctcttctctcttaggtaacagaaagttctatggtgctccaagttgcagaaacaaaatctcaagtggagcttgaaaagcctatacccttcaaagagtcaatttacaacttcattaaaagtcctgggacttgcctctctcccagtgggaacagctttgcctgtcttttactttttgacctatgttgataactctagaccccactcctctagagcatgagcatgtgtaggggttgggggaggggggatgtggagaggatggtggaggaaggctagtaaagcagtcaggaaatatatgacttcattggcacttttattaaataaaaacattgtgtttttcttgtgcctagcagaattttagagttggatctttgtctcatggatgctcttaggagacccaccaaccaccaactccttgtattgcaactggaccccctcgacctgggtgaatgtactcttttcagcaaccatatcctccctcctgttgccaggtaaggtgagaagcaattcctctgcctagaagctctgccgggtgaaatatcaggagatcccacccaagctttctcttgcgtgtagcctatatccagcacgggagcataggctaatcctgcagttggccagcctcttgtcctctggatatcctgggatggaatcctaatgaaggaaactccagtggtttactgaagccctttgtgctaggcctgaggtgagatagaattgctccatcctatgcccaggaggcctgcgtggactcacagtgcaccaccatcctcagaaatcctctctccctgtaggctgtggtctgaatctttgtgtcttcccaaaattcatatgttgaaatcctaacgccccaggtgatgatattagaagatggggcctttcaggagttgactaaaacttcagggaaaagccctcacaaatgggattagttcccttataaaataggtccaaggaaacttgctcacttctaacaccatgtgaggacacagtgagaaggcaccatctataagccagaaagcagtccctcaccagacatagatctgctggcaccttgatcttggacttctcaccctccagaactgggagaaataagtgtatattgtttataagctacacagtttatgatattatagcagcccaaacagacattgtatttcctcaatgttggtttaagagttgtctgaaccagtttcttgttatcatactgtggatgtttctagctctcactgtagcattccacctcttttctgtctcagtgacttagtcaaagcatctagttgaacactctgttatttaaagaaaccagcattcactggctgttcccagctccaggaactcaggtggattcataatttgttctgtttccttgctcttaggaaaagtactgacagctcataattggttgtatttcttaggatatttgcatttaaactagaagcaatgctttcttttcttggtataatttgtcttacatttttgaaagtaatagctattcattaaattacatttgaaaatgcaggaagaaagaaaaaattgtctataattctactactcatataaaaccactattcacatatgtgtactttcctctattaacctttcaaagcatgcctcaattttaattgtattcacacaaatacaattttatgccatacattttacttattaatatgctattagcatcaccaatgtcaatataaactccttgtaaacatcaatttaatggttgcaaagtattacatcaactggatatgccatggcttatttaatcactgtatttattgttaaatatttgcattgtttacattgtttagtattgaaaaccacgctgcaataaatatctttgg

SEQ ID NO: 628 - DNA, 5269 bp, Homo sapiens
cctccacagcaacttccttgatccctgccacgcacgactgaacacagacagcagccgcctcgccatgaagctgctgatggtcctcatgctggcggccctcctcctgcactgctatgcaggtgagttctgggcagagagggctgcttctgggctaggaattgtcacctgggcccctgtagaagaactcccaacctctaatccccagcacagacgagccccagtgtgaagggcctgggtgcgataggccttaggatccccatgagttcctgacaatcaagcatgcagtgtcctcatgggctgtcccctgcattggagctgcacacagtgtatcatggcactcagcgtctcaccatggtcacggtgaccatagaaaccaggatgagtctcaggattaaatattgaaatgaactatttcagtggggcaagggagagatggcatctacacctagaaatcaggaaataatcatgggtctccttgaatatggaacgaaataggaaacctcccaggacagaaggcccaggctgcagagtgtgacccagtgtctctcaccctgtgtggctcactctgtgttctcagagttgatctgggtccttctgggatgcccttaccctcccagttgcttcaggctcaaggcagacaggtgagaactcacaacccctggagtctccttccagcactaaagattcagtgggaggaaaaagccccggctgctggaatcagcgctaatatttccataggtagcctgccttgtgcagttcacaaaggtggattccaaaccctaccgtattggcatccaaggtaggtgcagatgtgtagaagggtgacaagctcacagtcaactaactggaaaatcacaaagtccagagcacaaccagctcacatgaagccacgtcctgagctcgttcctctcccttacagtgggaggtgacctcagatcccctcatgaacaagctctatttcacattcatgtgtgtgtgtgtgtgtgtgtgtgtgtgtgtgtgtgtgtgtgtttgagacagggtcttgctctgtcacccaggctgggactgggactggtgtgcaatggcacagtctcagctcactgcaacctcttcctcgaaggctcaagtaatgctcctgcctcagcctcccgagtagctgggactacaggtggacaccactatgcctggctaatttttaaattttttgtagagatgaggtctccctgtgttgtccaggctggtcttaaactcctgagctcaagcaattcgcctgccttggcctccctaagtgctgggattacaggcgtgagccaccatacctggccacacattcccttttattgcagtagagtcaacagaactaatggacaatgtcctagacccattcatctgaaatccttggaaaccctacctgatgctgggcatgataacagggaagcattgcatgactttgaaccaagaaagtccaagtagtgtttgctatgtccccccagtcagaacacctcatttctcgagggtcctcttcaccaagaatacacagggttgggcttctctgggtttggaaggtcagagagaatttgcagagcctgagtttacactcccagaattgagaactctgcatactgcaccaaaatctttctgaacctcggtctgtccctggaggtacgaagatagccagcttcccaattcatctgtagaatgaatcacacctctagtaatggcccatgttcttgtgtcttttttttttttttttttttttccagattctggctgcaaactcctggaggacatggttgaaaagaccatcaattccgacatatctatacctgaatacaaagagcttcttcaagagttcatagacagtgatgccgctgcagaggctatggggaaattcaagcagtgtttcctcaaccagtcacatagaactctgaaaaactttggactgatgatggtaatttgggtttcttcttatgtaccctttgaaaatcactgatcagaaccagcgggctctaaatttggcaccaagaatgccaagcaactggtgaacaaactttctttatatatcaattcattaaactttgtctccaggctgctttgccacttcacattgagaatctttagggagtgataaatggaaaaggcaaaaaggagaaaagaaagccttagagatcacccgtctacctctgacctcaccagtcccttctcacacagacacagacacacataagcacacaagtatagacacacacagacacacggggacaggcatcggcatttttttttttttttttgagacggagtttcgctctgtcactcaggctggagtgtagtggcgtgaatctcggctcactgcaacctccacctcccgggttcaagagatttgcctgcctccacctcccgagtagttgggattacaggtgtgcgccaccacgccgggctaatttttgtattttaactagagaaggagtttcaccatgttggccaggctggtctcaaactcctaacctcaagtgatctgcctcccttggcctcccagagttctgagattacaggtctgagcccccgcacccagccagaacatgcacatttttatcaagagaaaatatctggttctcaagagatcacacacttgtaggagcaatctactaagaaatttcctactttcacaaaaacaaatattcaaaacattcttatttttttttatctagctcagaaaatacaatttgtgcaaattctgcattttctaaaataaagaaaaaaatttttttgagatggagtttcactctgttgcccaggctggagtgcagtggcatgatcttcgttcactgcaacctctgcctcctgggatcaagcaattcttgtgcctcagactctcaggtagctgggactacaggcatgtaccaccatgcccagctaatttttgtatttttagtagagatgagattttaccatgttggccaggctggtcttgaactcctgacctcaggtgatctgcccgcctcggcctcccaaagtgctgggattacaggtgtgagccactgctcccggcctaaaataaagaatttaaaatgcaagtccaagcaaccaagatttgttagcatacatgactggaagtcatgcaccacttaattaagtgcctcatgaagtgggaagtgcagattatgggtatgaaacagcacgagtgctagaattgtttaaaacaaaagtcagtggttataacaaggagtatttctgtctgtttataaagatgtgttggttacgagttttgttttttgtttttcgtttttttcgagatggagtttagctcttgttgctcaggctggagtgcaatggcacgatctcggctcactacaatctccggctcctgagttcaagtgattctcctgcctcagtcttcggagtagctggaattactggcacacaacaccacagcctgctaatttttgtattttaagtagagatggggtttcaccatgttggccaggctggtctcaaactcctgacctcaggtgatctgcccgcttcagcctcccaaagtgctgggattacattttttttttaagaatttatttaataccctaaaattttatttaaaacattccataataaaaaatgtaaagatatatcaaatgctcaaggataaaaataaatattaactgcaatttgggatggttgaatcatttttttctttaaaaactcagattagccaggtgcatccctcatacctgtaatcccagcactttaggaggccaaggcgggcagatcacttgaggtcaggagttcaagaccagcctggccaacatgctgaaaccctgtctctactaaaaatacaaaaattagctaggcgtggtggcgcacacctgtaattccagctgcttgggtggctgaggcagaagaattacttgaagccaggaggcagagattgcagtgagccaagatagtgccaccgcactccagcctgggcaacagagtaagactccatctcaaaaacaaacaaacaaacaaaaatcctaaacaaaccaaaaaaacccctcagattaatcattcatattgtaaaactccagtgtttcttgtttccgtttttttgtctttgtttttgtttttgagacagagtcttgctcttttgcccaggctggaatgcagtggtacaatcacagctcactgcagcctccatctcctgggctcaagtgatcctcccgcttcagcctcctgagtagctgcgactacaggtgcacactaacacacctggcatatatatacatatatatacacacacacatatatacacacatatgtacacacatatgtacacatatgtacacatatatgtgcacatatacatgcatatatgtacacatatatgcacatatatacatatatacacacatatatacatatatacacatatatacacatatatacatatatacacatatatacacatatatatatatatatttttttttttgtagagatggcattttgtcatattgtccaggctggtttaaactcctggggtcaagcaatctgccctccttggcttcccaaagtgctgggattacaggcatgagccatcccacccagcccagctccaatatttcataggcctcaaaggtaatggtgaagagtctcagactgttacaacatttctaccttttatgcctgtgcagcaactcaaaaccatcacattcttgtatctgagctgagattttttaataattctgtgttgtaaaagtggtatcagaaacagtccaaatgatcaggtcttcaacaaatagtatatgcagcatatttattggataagttatttcaaaggatagaatttttggagaaaaaaagtattacatggatcactggtagggaagagatcctacaaccctggcccctgtttggcattatgaagtgtctcctagataacagaataaatggagaggggatgctggctttgcttccactgcaaatcctcctgagagttagctgtttgtggacaaatgcaagaaaacaagaagacaagttttaatatttgatttaataagtgaaatttgcaaacctaagtgacctgcttttgttttccagcatacagtgtacgacagcatttggtgtaatatgaagagtaattaactttacccaaggcgtttggctcagagggctacagactatggccagaactcatctgttgattgctagaaaccacttttctttcttgtgttgtctttttatgtggaaactgctagacaactgttgaaacctcaaattcatttccatttcaataaactaactgcaaatc

SEQ ID NO: 629 - DNA, 79876 bp, Homo sapiens
aagttttacttctccctagagcaggggtgtttgccagcagcctgcactctcagaaatcagacttgagtggccggaacccttgagaccagaggcttaccatgctgctccctaggagggccaggaactgctgacgtgaccactggacagttattcgtgtctcttacaattaccaaacagaatggacaagcttaataaaataaccgtccccgccagtcagaagttgaggtaagattttccccacccaatacccttcttcatctcctttttttccccccagtgctcttatggcatctcagaaatactgaaatcctggaatgctttgctagtttccagtgggtggcacttactatagggaagtggactgagcttttagggaaagcattgggtggcacttgctatagggaagtgaactgagttcttaaagaaatgtgtaggaacaagagagacttgctttagctgcctcttacaataaagtgtaaagctctggaaagataataaaacaaatgccaagggcttagattctactgaaggtcaacttttagaatctgaatgcaaccaacttttctaaggaagggtttctctaaactgagtcctcacccattttattgcaggttactatttaattttaaggatagctgtaatcatttgttattcattgttttattgtctcatttattttgtgggtgtatatgacaagtgtgtttggggggattagatctgtctttccaatgccctcatgtcaatgtaacaatatccataacaagcctctcaaaaagaataaaccagaagcggccccatgggcgtgagtcaaggagctatggaaaagacaacttccccaaattttgcttttgaaggtcttctttttgtctcattgtaatggcatcatggctttcagagactggaacttttaaagttctgggagtgcagtttttttttcacattttttaacagttttttttttttattatacttttaagttctggggtacatgtgcagaaggtgcaggtttgttacataggtatacacatcccatggtggtttgctgcacccatcgacctgtcatctacattaggtatttctcctaattctctccctcccctagtcccccaccttgacaggccccggtgtgtgatgttcccctctgttcagggagtgttttctattctgactacatattagaacttagccaaatgttcagggggtgatgtgacacatgtagcagacaagtaatcacagataacaatgagccagagaattgaagcttttgagacaatatttaagagaaagtctggattggcagagggacaacccttcacagtagaatacaggtcttatgcctaggaggtgcttggtaaaaggtaatgtgaaatgcatcaatgatctgggatcagtaggcaacatcagctgtgttcaaccatttcaagaacatgctgttgagtgctgctgtgtgatcagcactgacgggacaagaaggcacctcattcttgcccttggtctcaaatagctacaccctcatgaggggcgggggtgatacaatggaagctgtaagcgacagaaggaatgtaagaagagacttagagtagcaggaggaggtttcatagagaagatacttttaagaggtaggctttgagaggtgggtaaaattataaaatactggagaattggaggaaacatgttatgtgctgggagggaggaaatacagaggctgtcactcaaagcttaacacaagtacggtccatttgtgggatagtgaggagagttttctgtccagcagaaactaaagagtagggaatgtgggacctgaaggtcctggtatgattggacaaataaggtgggtccaggttgcaaaggatggtgagtgccctgaccatagggagttggagaacaggttatgctgttagctgttagcaatgtcatgacagtaggcttaaaggagcctggtaggatgcgttggagtgggagggacactggaggcagggatctggtgggagggaggagcgcttaagtaacccaagcatccagggttgtaggcctggacttgggacatggcagtgagaaggaagagggaaagagagggcagaaagacatggcaaagaaactaactaggcaccttcctctgaatgaacaggaggattccaaatgtttttttttttttgttttcagacatattccataatgtagaactatacagaaatgcattctctttcagggaatccaggtgggaatttaagtaaaggtgctagaacttaaatcattttatgattcctccctttgggacaaagtccagcttgatcacagagtagttgatgggcaatatacaaccatagattatgggatagaaaaccaaaattataccatggataatcatacactacactcatctgcttacataaaagtaactttttttccacttgattactcagttgtctttatagaatcatcctgttgtggtaaaatgtactgttgacgtggaacttttcaaagaaatgaaattgtaaactcaatgggctcgaagcaccatcttaactcttttccataattagatagataggatggtgaggagtcaatagatgaaatacttgcctcctgtgatttgtgtcctctgtcctgactggttgacatcaattctgaaggttgattaaccatgtaattatttggcaccagatgaccataaaagtggacagttatgtttatactcttaggcttaggtgagaatttgctcaaattcttagccacaaaaatagaaggacagtgagtgtccatccaaaggactgaaaggaatgaccttgatccagggagtatattcccaggactgaaaagagagtggagcagaaggaattactaggaggagaggggaagcagagtcatccaaggaaaggagggcatgcaggattggaaggagacaaggaattctcaaaatgaagaagaaagggaatgttctggatgaacccagtggggatgggtcatcaccttgagagtttctgctgtataagaatagagataggtgagatggctaagttgcttgtgaccacagagaggtgtgagcacagattctcatgtctttgctcccaccgaggcctgctaaagtaggcttctctgtcagtaggagtccatagacacttagggtcttttagttgattcctagccatgattttcccttaattgtataaggtaaagttatgatcagaaacctggctagagctgggtttcaatcgttccacagtaaacattcctatgatcataaaaatttcacctttctaggggaacatttcaaaatttacaatcctgaatcactttgcaaatatcccttttcaaattagtaaaactaacttgaaaatgaaatgtttagtttttaataacctcccaattgattcatcatctgtgcttgtgtatttttctttgtagcataaacaaacacatacctgctcatttttacaactagaaaaggtctttgacacaagtgtggtcaaatcgggtctccccagttatcttattgattaaagagtatggcatttttccattagaaaaatcaagatttgtgtgattttaggcaagattgcctaatctccttggtttcctcacctgtaagataaagataataataacagtaccaatgttgtagggctattgtaaggtttaaataaatttttctgtgaagcaactggcacatagtgattataggactttcaaaatagtagctattaatatcattactgttgttattctaattctatagttgtgtaattgattttctgaaaataaacagggactttccattgatccctgataagtttcatgttggttccttttcttctttctgactattttgactattttgtctattgattctgacatctgtgacacttggctttgcatggactgcagatgtgacaaacattccttctctgcgttcatctaagtgactaataatgttaagcatgacagaaccctgctgtgggtgtctgggtcttcctggtaggggtctcactgagaccttttctaatggattctgagacatgccttctcttctcagggtttggagttttcaactggagtttttacttccttgatttttctggttcagttcttcagaaacaaattcaccttcttttcacctttccacaactagctgtctctcagatcctccctgttttggtcgatggtatcctcgtcagccctcacactgactcacctttccctcttcacctcagctgacacccactcacctaccacaccctgcaggttttctttatggctcttctcttccatatatggcttttctttccttttcttccacaacatcccggataggttattagctcccccatgtcccctatgtttgtttggttcaaactacaaaatgagaacatttcccaaagtccctctcagctctgatgctgtgatcctttaagcacagagaccacatttgacatatgttacattctcaaaggctaccattttatctcaggactctcaggaaatatttcttgatatatttagaaggaccatgccattggggcccaacagggctgattctaatggccagttactagctgaagccattcagtttctctacacctcagttttcccagctgccaaacgaagctagagatgccttcctcacaggcttgtgtgaagaccaagtgagacaacatggactgaagttcccagaagagtatttgccacttagtcagtataccaagtcaataaaaagcaaacacaaccaccagtacctcaaaccacccaagctgagtggcatttgctgtctctcttgctcttcatatttgtggttccaactccttttaactggggtggcaaacttcaggggagctgcaggcaggaggcacagcatctagtggtggagattagatccacttcctggaccgtctggtttcccatcccctcacactgcctacctgcatcccactggatgagaagccacttaactggaccatcttgcggcacaccaatggatggactacccagagcagctgagaagggttctttctccctgtgggcaagtcacatgggagccacgttatcagaaactggcttagtgcgagtggacttcagagtcatcagccaagaaaactcaaggcaacttcctcacccactctgggcatggctgtgctaggaaaaccctaaaccagagtccacatgtccgaggaacctctcttctggacccagtgattgtgtaccatggctgaacaacaccttcctcttcacacaacatgtttccaaatggactatgatacaattgattaggtttccaaggaccaaatcacagttattttccagccctgcctcctagattactggattgaaaagaactgggctggtgccaaactcttcaggcatgtatttacagacgatctcttgttttctccctacaggtgatttaaccccatctgttcttgggagaatttatcagcttggttcattttcaaagaaggtcttacatgagcaagaaaaaaagggagagaaaaattaaaggatagcttgttctagggaaattaaaacacttcgctttctttggcttcttaatagattccacagaaacatccttccccagcctcccgcaagacatagctggatcatttcaatcaatggttctccatcaggggcaattttgtccccaagggaacatttggttgtcacaactggggagtgttacagacactagtagttagtccccaaggatgctgctaaacatcctacattgtacagggcagtctccacaacaaagaatcatctggcccaaaatgtccctattgccactgttgagaaaccctgattcagactaagtgacatgttctcttcagaacaataagcaaatattcatttctatttgcttatagtgacaacgtgtatttaaagttcagaataggcaatacatatctttgccattgttgtggtctttgctcagatcacactgggtttccggtctgggatggtttggatgagggattgcctagaggaggggcaataaatccttaggcctgcatttcaatttgatgttcctttttaaaagttgtgtcaaacaaaactagatcccatgaactatatgcaccattgagctataagttgctctctcctgggtagaaaagtgagagcaggaaaagatttccagacataaggtcatcttgtaataaatagtctgtttctacttcttcaagtagactgagcaaatcttgagtggaaattcttaatgttgaggtaaaaagcatattatgtcataacacagccattaagaagttcaagggcttgtgagtctgatccaatggccaaattctggctgggtgtagagagtcattcctgcaatcccagcactttgggaggctgaggcaggaggattgtttggagccagaagttcaagaccagccgggtcaacataatgagacacccatctctacaaaaataaataaataaataaataaataaataaataaataaataagtctggtgtggtggcatgcgtctgcagtcccagctacttaggaggctgaaatgggaggatcgcccaggaggttgaggctgcaacgagccaagatcatgccactgcactccagcctggtgaaagaatgagaccatgtctcaaaaataataataataataaggccaaattctggacagaggtgcacacactgtgcttatcctagagcagaatatgttgcctaaggacattggataaaagacaaagcagctggtggaggagagatgaaatgcgtttgcttgtccatcctttaatcttcttggttatatatgaaaattctgtggcagtgtccaagaggcatgtatttggaataatccttccatgagctgggagagtttctggagcaggattcaccctgtcttgtctggtctccctgtggccagtgtgtatatatttttttgaaaccgatgggtaggctttaagggttcaatctttttcattaaagacttttttccagctctattaagcatttctatgtctccccgcccccctccaaaataactctttaaattggtttcgattgaatctggatctcaggaaacgctttgtgtgattgttctgcatattaggaatgatgagaggaggtctatgtgaaggacccagggtcctgtgctcagaagagcgctgtctcttgtaatgtcagatgctcaaggctcttgggtaatcctgcccccaggcttgcagggctgtggtgctcttgcccactgtagacagagcctcactaaggaggccttttaagtccacctaaccaagactccgtctctgcagattggaggtcagagaggtaccgctactgcctcccattggacaccctgtgtctctggattggtgattacattccatcaggtcccccttaaatctcacagacttggggccattctgcttcttgagggtgaccttgcttctctgtgtttgctctgtcagatgttgaggtttaagcgctcaaaggcagccttagttttttcattccacgtttatgctgggtttcctaggcccctaggaaccatgcacattattaggaatttagagtatgtttcacctgttgctccagaaatgggcctcacctgctgatggggtggaattccagcccctacccaagtccctgctccagatcaagggagcagagaaccctgaagtgtgatgctggctgccgtcctctaggtcccacatgacctcggggttccccagcacagctgtagggaagcagcttttgtgttgggctgacactggacactggggttggctgctgcggtggaaaccctctctcaggaggttgctcctcttcactgtgtgttaagcctcctcattactggcgtatttgtctccatccagcaatgagcaagaaagtctgacttcacctccttcctccctgtgctttgttccaaaaagaaaagagccctccccacaagcccctcctcctccttatttcaccaccttttcctacctgtcctgccttcacctcccttctgaaagggagtccaccagaagctacacctgaagccttattttttaacctaatgttttcacaacccttttgcagcactgtggtctaggcctccaaacagaccatttccctcagcccagcatggctatttcaatgcttatttcaaaagcaagacaaagaagccagcttgagggacatgtggtgactgtttgctgagccacacttctctgttggccagtttcctaaggaaggctctcattaccccaggagcatccctgcctcccatgctggctgggggccccagacctactccagattcccttccttcacacattgtagggaacacgcagcacaggtccctagcttcctgggcgtgtggccatacagtcgcacagggtcctgtgctcggagcttgtgcctggtttaatgctctgctgttgcagtcctgaaattcttaacaatttcgaccaaggggccctgcattttcattttacattgggccccagaaattatgcagccagtgctggtcgggggttccatgaggactcgggccttgcctgcttctacaatgtgcagagacacaggcttccatggagaagcacagagattcgccttgcgaggactgaaaggacacctctccagcccctttattccacaggtgagaaaggtgaggcccagagaggccaggtcacctgttcaagctctagacgacccctccatgtctgcctgtgtaatttactggccaatgtaacattcaggctttgttcttcacttttcatagacgtttgttttaaaattaaaaaagcagtcacttactagtcagaaagccttctgaggattcctgctgtcagtatttcagacaattgtgtgttccaggcccaaacttgaattccacactgactcaggtgtgtctggtatcctactgctatatattttgcaaagaatgctcccacaatcgttcatgtaatctgagagtgagttataattatgaagagcagagctggtcttatatacagaccaagcacacagcaccaacgtggtattttaagaggtgcccttggaaggtgtttttgtcttactgaaaagaaagaatcaggcagatgtggatttgaacatttgctctgcacttaccagcttgtggtctttgagaagatcacttaatcccttttagcctcaggtttttcatctgaaaaatgggaataataatatctcaataatatataacataaagcaggggtattagaacagtacctctgtataccggagagtaagagctcaatgaatgcccccttcctcctggtctgtgcttccctggtgccctggattgtgttgttagagaggcatctacttgggatatggcagtgtctcaatgttctggttcaaaattaaacatcattaagtgtaataggttcaggcactgagtcatctgtcactagcacccacgcaggactcatttatctgataaccaactcagaccaagggggcagagagctctcctacccactcacagaggtggttcaatcaacagcctagctggataaatggatcattgttcaggaacatggtgataaggagggaaaggccagaggtgggagaccacacctaagtaaacgggagttccccagagggaggctatgaccaagggtgcttggagtagaagacaagaaagtctgagctcgtacctagagtgaaatgacccccagccccattccattttttaccccttcattttacaatcttacttggttcaaagtataaaaacttcattatgaaaaataattttttaagcataaaaagtgtattaatgtccctactcaatattgaacatactaggaagagtatttcattgcactgcaaataactatgagaatcacatacaaacatgagaactataatttcaaaaaagaaaatggcaaatgtaatataaaatcattgaaaaaaatgaactctgtacatatatatgattgttttggcttttagatgatctttacagcctgttcaaggtcagagttctcttttttaccatggcaggacttcagatttcacatcatcttcatactcgaagatcatcacagttgccaaaccgatcttagatgattgggcttaatatacccgatgctacctattagggtaaattctattaacaacctcttagcatgatgaaaacaaaagctattcatgaaaatacctcaaaagtaaattattttgaaaatctgctttaaaattgccaatgactgcttcatgggtctggggttttatttaggggtgatgaaaatattctggaactaggcagtggtggtgattgcacaatattgtgaatttactaaatgccactgagttgtacaatttgaaatgggtgaaatggtgaattttacattatgtatgttttaccacaatttaaaaattgataattaaacaatttcctatatttaccataaatgagtgtattttggggacccacgattatatatttttttgacccactagatattgttggccaggcacagtagctcatacctgtaatcccagtactttgggaggccgacgtggacaaagcccttgagctcaggagtttgagaccagtctgggcaacatggcgaaaccctgtctctacaaaaaatacaaaaaattagctgggcatgatggcacatgcctgtagttccagctactcaggaggctgaggtgggaggatcacttgagccagggaggttgaggctttagtgagccgagataacgccactataccccagcctgggtgacagagtgagaccctgtctcaaaaaaaaaaaaagatattgcttcaaaatttttatttaaatgtattattgacaaacatttgtagatgcttttaatgaattacaatgcttcctttcacccctacccctacatacaagacattcccaatatctttgttttctcagagctaagaagaatttaactgggtcaaactttttcaatatatgagttcttgaatgccatccctcaaaatcactctttacttcctgaaaatatctttgcttttacctgcagaaatggatgccaggacaagtagatgacaatactatatatatatcatgccatgtagatatagccaaagttcctttttcccccattaagttaatttttaaaagaacatattcaaattcttaagacacttttattttctggaattatgtagaattgcattttcagaaacatgactagaactacttctcagtcgcttggttttacaaacctattggcagctggttcgatttaagagacgtcagttttgcatttttatgctggtagaggacagacagtgaacacatgcacggtgcagctgtcagcacctcatcagaacaatgagcacatcagagtcagacacagtgaagggactaaatgacatgacctcttagtgttcttccaaacccaagagtctgtgtcatctatgaacacaggagtctcccttaacttttttggtttttgcaatctgcttttatgtagttttgtgaggaagttttcctttattcaagacctctgccaggtgggtggtgagagcagagtccagcaagcattccaatgtgctaaaggaaagagaagtgttgtattcctggaggccccaaggaccactggcccctaaagtcagagaggggaagggccatgccaatttcagctgtcaaatcaagtgacaaaacttctaagaacttcttaaggcaggtatagcatcatttccttgccatctcatcagtctcagggtggtgtgcctgatgcataactgcctctgatagggtaagtcctaccagggtttttgaaggacacagggtattagtagaatcatccctactcctgcttgtgccaagtcagcccaatttctgactgcttataaccaagctcagccgttcagacatgccaaagactaccacaaaatatttgcagatctcagtaggaaaaaaaagaaacaagcaaaaaaaaaaaaaaaaaaaaaaaggtagggtgtgaactgtttggagaaacttataaattactttatacggttaataagtggatagtaagaaacagccctggcagcaagatgcttgtgtgtaagggaacacagcccctccactccaggaccctcagggggcctttctgcctcgggtgttgagaaaggatgcatggattatggtggcgtccttccagctgctctgttcagccaccctacttctgagcatattccagaccccagagggccgctaccgcattccctcctgcctcccatgtgccttaccccctctccttcccatttcccctgccatctgtcctttcctctttttactctccctcttcctcccaaagtctgaaacaggcccttaagagctgacgctcccctctagcaaaatgtctaaccttggggaccaatagcaaggcaggggtgggggcacatgtgtcacagtaaagattactgggttggtagagggaatgggtgctgtctccagggacagagaggaaggtatccaaagaggcaacgtaggtgctgaagccagtcgcctgccctggtgaggggccaagttgaaacaagttagcctgtatcatccagagtgggttgagagcataggctccggaatcagacctgattttgaattccagctctatcacttatttgctgtaggatctgggcaaattatttaacctctctgagtcaaattttctcatctataaaaacagggataactacaactatgtgaatatattaatgctattgaactggatacttaaaaatggttaagatggtaaattttttgttatgtgttttttatcataatataaacatggggataataggacctccctcacagggtagttgtgagggttaatgagataatgcacacaaagtacctagcacgtagtacatgctcaataaatgctggcttttaccgttattgattttccaagtctgatcactggcatgcatgatgcttctctcagcaatggcttactgggcttgtactataatcacagctctgaactatggcataagaaggtgggggttacctctggccatggaggtaccccccaccttctctagcagggggctcaagccttatgtggaaggggaaggaacaggtatgactaaaagagttggaggagtcctcaactaaattaatctcagggcaatcacaaaatttccctggaatttaatttcctcccttggcataagaggaggttgacccaggatattcccaaagtctctctcacttccaaatttctgtgactaccttaattgtaggcaaaattcggagtcagctgtatagtctgagacactcatgatctctgatctctttgggcttcagtatctgcatctgtgaaatggaggagaaggccactaactcgaccttgaggggcttgttcacattatcacaccatggaagggactgccaaagctgtcaaaactctgccagctccaccatgagctcactccccagaaggaagcagcctgcagtgctgaattcgcaaatctaaatataattcctgttatttcatagcaaggccaggctggaggaagtgagcattaggaagccggtgccagaaatgacaaggctttagaaagagtggagggggagaagttgtcataggagtcctgcagcatgcaagtaacaggatagtcactaaaaagtatcatgctgcttcaaaacgatgggttggtggctgaaaacttcagctttaagacaggagtgacctgagaggaggatgttttgtgtgaatcagagaattctccggtctgcctatatctgtcccctggcttcacataggccagaaggtttctgtcatgtgataaggtggtgaaaggagcccctttcctgcattacaagagggtcgggtttgtgttcaggttagctctgtggcctgcatgtgccatgcccagtgtgcacacactgaatatttgtggaataaaacaaaacgagtcatgtataaaacagcaaagcatgacattaaattttaaggggtaaccctcattaataaattgatacaaatagtatttaatataatattttaaaaatcaaaatgaatgcccagaaatccatgatgaagaaactactggaattttagatgaagacagaatcagtcctgctgatttactttgtctcaggccccagtatggccaacatggcactttgtctcagtaatgtcctctttgagagttgttggtcctttcgcacagctgaggcccacagggcactcctagtgttattccattgcctttggtaccacgctgtcacgagctcgaggcttgggcctggcacagttgcctccatactggtgtcccagccaccactgtcccaggccgagatcctcctccattcttccaccctcatcatgacacaccccgaggaaaggtctccaagggcttccagcaggaagcctgtaaccccccatctccttggcctaacaggtcccttgactatctgtctctgctcccagcggtctcatccttgtcttgtaaacatcctctcaacacctactttcctgacactctcagctgctcactggacccgaaacatctcagacagtttcacctctgagcctttgcacttgctgttcctgatacctggctgctgttcctgatacctggctgctgttcctcacccttttgatgtgactagagatgtgagatgaagagtcaaagagagagagaaagggttaaagaacattcagaagtttcaagcctgaagatccaaggatgccagcttataaattccatttgcttcttcttctgctgctttttttttttttttttttgagatggagtctcactctgtcgcccaggctggagtgcagtggtgcaatcttgtctcactgcaacctctgcctcccgggttcaagtgattctcaggcctcagcctcccaagtagctgggattacaggcacacgccaccactgccagccgatttttctatttttagtagagcaaaggtttcaccatgttggccaggctggtcttgaactcctgacctcaagtgatccaccctccttggcttcccaaagtgctgggattacaggcatgagccaccatacccggccctttttctttttcttattgtcagttttcaattttctatcatatagctgttttaaaatttagtaacaaaaataaaatatactatattagtagcatcttaaaaagaaacccagagtcaattacattaaacacctaaaaaaggaggaagtcaactagagaatcagcagacctaatgatgaacattaatttttttatttttaaattaaatgcatttaaatgtatttaaattttaagtttaaaaaagtgtttttaaaaatccattcatagtaaaaagtattcatggatgcatttttgtttctatatatgccaaggaaaacattacagagatttctactccaaattgattttagaaacatataaattggagataccaggtcaattgcaccagcacagatgttctaaggatacccaagtatacgtggataaagcaaagggctgagccagcagcccccaggggttcttgcagtacttgaactcctgacctcaagtgatccaccctcctcagcctcccaaagtgctgggattacaggcatgaaccaccacgcctggcccttttcctttttcttattggcagtgttcaattttctatcatcgagctgttttaaaatttagtaacaaaaataaaatttctatatgggcatggagctcagggtgagactgagtgactgagccatgacaaaaagctcaggcttgattcagtagataccggggagctgctgcactcttgaggaaggagtgatcgttgaaatccaggttttagaaacatttgctgaaagaggccctaacaagccctcacagcatggatgggagggccctgctgccagctgctgcattttcctgttgtaaaggggaaagtgtaggcttagatcttggctcagagaggaggaccagcctatgaacactgaaaggatgaaactcaagaactggacctgaggttaagatgcgggggatgaagaaggaaggatttatttattctgtttgtttacaaagagtcactttcacctgagacactctttaatccattcctacatgcagattaaacagggattttctctgattagcaatactttgcattccaccctttctgaaagacaaatgaaaaaaaaaaaatcctgaaacctgcctatcattgtcctctgtgacagcactaaagagctacaaggaaaacaagatgttttatgatcttatttctactaaactttttaaaaaagtacttcttacagataatatcatctgttaaatcatctcctgtatttaataaaaattattggaaaagtgtttttgtcaaatatgtaatttcttggacacctctggtgatctggccgaaatatctgcatgcagctgccctccccgtgccctcttggccctggaagagctcgctgtccttaaactccatccttcctgaacttgtttatccttctatgtgcctggggctgttctcagtctgcagatacccttctgtggattctcactatggattcctctccttgtgctctcttggccagacgaacttccctggggtatgtacaaagttctcctatcctgagaacactgtcagtggttcttaaccttggctgcacattggatcccctgagagtcaatgactctggtttaaatggtcgggggcaaggcctgggtgtcaagattattaaaagtcccctaagtgattctaatgtgcagccaaagtcaagacgatttctttaacctaccttttcatccaagaaggagatgtagaaagactgccaattgatgtaaggtctaaacttcaattcataaaagactcattgaagggccaggtgtggtggctcatgcctgtaatcccagcaatttgggaggccgaggtgggcggattacctgaggtcagaagttcgagaccagcctggccaacatggtgaaaccccgtctctactaaaaatacaaaagttagccaggcgtggtggcaggcgcctgtaatcccagctactcgggaggctgaggtaggagaatcacttgaacctgggaggcggaggttgcagtgagctgagatcgtgctattgcactccagcctgggggacaagagcgagacttcatctcaaaaaaacaaaacaaaacaaaaaaaaaactcattgaagaaggctgagctgtacacagtcagctcctcgggttagagtccctgctctgacaccaggctgcctgggaagagaaggcaggcaggctggaagcatcactgtgcccgacttgtattaatctgagtccaggtaaaggtgaatgcctggccattggcaaccacagccgattccttctgctgtcttccccttgttgaaagcagacatcataccattgactaaaattccattgccagtgtctttcctttcctggggagaatgcctgggtaagcctttggccactcattatggagaaaatagtaagatttgctgttaaagctattccaggctatggtggatgggggaagatactctggaggttgggaagtcgtctcttttgctctttccatttaaacttagcctagaaggggataaacctggcctaatccttttttttttccttttttttatttttttaattttttttattttttttgagacagagtcttgctctgtcgcccaggctggagtgcagtggcacgatctcggctcactgcaagctccacctcctgggtccatgccattctcctgtctcagcctcccgagtagctgggactacaggcgcccgccaccatgcccggctaattttttttttttgtatttttagtagagatggggtttcaccgtgttagccaagatggtctcgatctcctgacctcatgatcggcccgccttggcctcccaaagtgctgggattacaggcgtgagccatcgcacccagcctggcctaatcctttaaaaatggctgtcaaccttctgtgtgcataagagtcaccaggcctagaaaatttgttaaaaagcagattgctgggctctatctggaatttttattctattgatatggtttagggtccagtgatctgaatttctaataaataaatacaggcaatctttagaccttactctagaaaacactgtttcagagggtgatctggaagagaggctgggtttgaagaaacaagagggaacctgagattgtcccctccctctctgcccctgaggtccaagcctcttgatcccaggctcccagaagcaaggcattcggcacttattctcacacagcctttgcttctcctggtctcagattgccatgtggtctggtcatctctctgctccctcaagctgaggggtcctgattcactgcttcttgtcacgcctacttggatcagagtttcagctatttaaaagcccctcagatagcagaggaaagaaagatgcagataaagcctaaggatggtgctcacttatgaaaatattcacaatatagtaagtggaacacacagatttcaaaatgtcaagagtgatcttagttgtgtaaaatctgtacatcttatgcatgggtagtaaaaattggaaggctattcaatgggaatccttctagaagattcctctattcaacctgcagcacagggaccaacaaccaggaggccccgggaagacaggaaacatcacagtaccaagcctgaggcctgcctgccacatcctcattttcttacatcctttttctaggttggagtctttgcaggatgagtgacagcaaagacagcctatcccccaccaacagggatgaggtcgagtcttagtgccaccgccactgcattctgttagtcacttagagcaccatattataatagcaatggcaaaatggtcccgaccatggcactctgctccaagaagggccagtcccttttccattgtcacgcaaggagaggggcatgttctgcctgcagtcacttcatctccattctacagttttgcaaactgtggctcaagaagaaagtacatgactataaaataaattaaaatatataagcagaggttagtctgaattcatacagagaaaagtcaacagtcctgcaaagaagctacagactgaaaagcgcacacccaaattatgcttccaattgaccacccaatttatttgtctgaaactttgcacttgagttaatgagaacttagtttttcccccaaacaggtatttgctttacttgggcacaactaaaaggcccacaatagaaaaaggcatgatctatcatagacatgcacaaaggatggtctcccaactggtagcatcagcaccacctgggaatttgttagaaatgcaggagctgggcatggtggctcatgcctgtaatcccagcactttgggagcccggggcaggcagatcacgaggtcaggagttcaagaccagcctggccaacataatgaaaccctgtctctactaaaaatacaaaaaattagcccggcatggtggcaggtgcctgtattctcagctactcgggaggctgaggcaggagaatcgcttgaatctgggaggcagaggttgcagtgagccgagatcacgccattgcaccccagcctgggcaacaagagtgagactccgtctcaaaataataataataataaaaataaaaacataaatgcagattttctgacgcaccacagacaacccaatgagaatctccaggggtgaggcccagccagttgtggtccaatagccctcttgagatctatcggattctaaagtaaggcactttaaagggaagaaactgctgtaactttcaaatggtgacttttctactctcagtgcttcctggaatttaaatctctcgagattcagacttacccagggtcacactactacagtgtgactaagttacgtgtcttaattcaaaagcttgaaaattaaaaacaaaagagagaatataaaatttgatttggtttacacaagtattataattatttatatgacctgctcaccatttttaaataccaaaatgccatactgcttaaaattacaatacttatatattttaaaacatgtattagataagctttgttcttcattttattttgttacatgagcatggctctctctctatgactttagaagattaggacattgtgaccttattatccatctccccaccatggaaggatatctctgaatgagataatcaaagtgaagctgttttatgccttacctatctttacctacacacaactcatctcagtaaaaggattgctgtttgaatccagaacaacccctcctggaacagaccagttgtgcattcttttgctatggcatgtgctataagttgtaataaggagcaaaaagcacttcaaaatgaaatggccaatactagagagcagcagagctgtgcatcaccagatgcgtggacagttgacataatgagctaacagcatcacagcaaatcttggttttgggtcactatgtcttcccagatcacagaagtttggcagttgtaacaaagcagtctatagacatcagaatttgtgtgaacgagatacagagagagaagaaaactttaaaatataaaaagtgtaatttatctagggtgactatagttaactataatttattgtatatttcaaaatagctagacgaaaagatttggaatgtgttcagcacaaagaaatgataaatgtttgaggtgaggtgatgggtttcccaattacccttatttgatcattacacattgtttgcatgtatcaaaatatcacatgcatccataaatatctactgctattatgcatcaactttaaaaagtatagtttatgcaacacttcagtaacttactgtaattatatagttacatagtataattgttattgttataataatacacaataaaaagtaattaggaaatgccaagcaagcaccaaatgccaaattgagcaaatgacaaaattgcatccaattcttttgcaacattttgcatctgtttatttacatccacagcaaaatcacttatgcaaattggcccctggttccctattactctgcctgtgtcccatttttgacacatttctgataggattcttcactgctgcctcattttgctcctcaacctggttaagcattaacttagcctaaagatactccattcagttacagtcagcttacaacgagctgccctctgccctccatatgaaattattgaatttccttgcaatcaatccacttcaacctctctctctctctctctttctctcttcctctctctctctctctctctccccctctctctctgtctgtctctcaatctctctccccactgccagaccccttattttcattttcttctttcctctatctcgaagattctctatagttcctcaggaaaaggagaaaagggtttggcatagagtatatgtgaacaaattctagaaaactgtagagttctgaggcaactcaagggcccatctgagggaccctctgtgtgtctctcaaccatccttttctctttgctactgagcccataatatgtgcctggctctttcctgagctcttacacttgtatcatcagtgtgcccggcctccctagctagggagtataaaatatggtctcatttcctttgttacccaaattacaatgacttggcaccagacccctgacacatacatttgaacgtgggtccctcagtgggtacctcacttacgtagataattctccaaaatgcagccatacggctgtcccaaaagaagtttctcctatccttctacttcacactccagcctgtcctccctccacccttccatgccagtggaacactctcttccccaaggcccagctgaggccgggctgcagctactacaagatcttactgaagattcagggacagcagagagggattatgtggttgaaaatagctagcgatggctctggctatggcttttctcagagcagaggcccagacccagcctcagattcagggctaccaccccctgccatcgcccaaacccccaccactgaaaatccctcaggtttgtctgcgctcttcagcactctagcgcctaacagccattagccctagaaggagagagatctccccaaaatctgcagcctaagttcccattttacgtttgagcaatctcccttttcccaattccctatcctgtaaatttcactccactccctaagggctagagggcctgccctcaatagagcagacccagcagagcaccagcatggctgcattgtttagctttaaattaacacttggtagaggacacccacaggcctgcccaggcagagttcttctgagaagctgtcctcttaccctctaaactgctccactgctgcaccaaaaagtaacccttccaccgcacgggcattctaaattcacaaagggccaaggagtatttctcccagatgtcctcaaccaacagtttcctagacctatgctaaactatttctattacctaacccaaggcctagctcccagagtcagagaaatctgctttcaggattgtggggaaatcaccatttcctacaagaacaatagctgtgtacagttcattatctaaagggtccagtcaaatagttttctcagaacaaaggaagcatttacctgaaaggtgaattaaaacgtcctactctttcagggaagaaccacgtgaaattttattatacattttttaagtcagaaaattattatgaggaaaacataacatggccctatcctcccattataatatttttctccatatttgtgtataacacagataatacaaatgatatctacacatgctataaaaattcaaatattttaaaacatcataaagtaataatcccctttttagaaagtagaagtttcaggcaacaatatagatgtatattcctcttttttttaggggtctgtggcattccattgcatggatctatcataatttatttaactagttcccttttaatgattaatgagcattgggttgttttcagagttatggttgtggggagggcagaagaagcagggagaagattagagagttcttacacatcacgctgcaataaacatgcttatatgtatatactgatatcattttgtgaccattttcataagacaaattcttagcagtccaattgctgggtcaaaagtcatggacgttttaaatcttgacagatttgattgtaacaatttactttctcaacactggatattatcacacttgttatgttttgccagtctgataggcgaaaagacatctcactgttgtttagatttagatttgtttaaatataagtgatgttcaatatcttttcattggtctattgaccacttgtatttgttttctgttagctgtgtgttcatatcttttgctcatttttctattgaactatttctctttttcttactgagttgtaagatttctttgtaaatcgagaaaggctggtgcaaaaataatcgtagtttttgccattacttccagtggcaaaaaccgtgattacttttgcagcaaactaatatgtagttcttattattattactatatgttgcaaatatttctttcagcatgtcatttatcttttgattttgtacatattcttaccagtggagggtcttgatacatattgttaccagtggagggtcttgactatgagtcttccaggttcttggccttttgaacacagaattggacaaaatgcacaaagtaacagaagaatgaaacaatgaaagcatagatttactgaaatgaaagtacactccacagagtaggaatgggcttgaccaagtggctcaagagcactggttacagaattttccttctaggggtttcccattggttacttggttacatcctatgtaaatgaaggagtggcccacgaccagtctgattggttgcagaaggtgatcaatcagacgctgaagttaaggtacaaagttacacaggaagacttggcctgggaccagtctgattggttacaggaggggatcaatcagaggcactttccatttctcatctataacgcagtgcaaaggtagtagcctctgatccttttgttacttgtgcatggagaggtggggttttccatttgattcagttctaggaagtcagtgcaaattggccttaggttccctgactccagaccctattctcctgcctcaatattactttttgttctacagaagtttcaaatatcagccagatttaatagtcattttctttatgactcctaggtaggagtaacttttaaatggaagttttaatagatgctacctactaccatttaataaaaaagaaccttgggcctgattgaagcctctgctatgtccacagagtagcatctatcttcgtaacgtagatgctctaagacaatgagcaaggaatcagaatatctttcttcacagcctgagactggtccagacatcccaacggaaggggacacagcccagtgaccatattccttatagaatcagtcatgcttctccttcgctaaagtagcagatggtcaatttaattaaatacaatataattcatcctatttggaggttgttttggtagagttttttccccttttttgtattcgagaagagtaggagactttttttaaaaagtcagactggttattaatatcttatgtttaattttgttttttacaggcagcttcaaaagatggtccatgatattaaaaacaatgaaggtggaataatgaataaaatcaaaaagtaagttcgcctctatttaaatacttaattatataaaataagtcaacatgtgctacatggaagaaaacaaatttctctgttacctggatgagaagtttctacctctttagcacgtaacccttctttactattggctggaatccatggtggccaggtctacattctggaacaggacaagtgagtgcagttgtactcagtggactttgattttccttctcactgcagggaaggtgagctatgcccattcaaggtgcctaacaaatgtcaaagcaggaaaatcatttctataaccatttagctaagggctatgaaaacatgtatggagaaatccaaatgaaaagttacaaaacacagccctagcttcttcaagatgccatgtgagttttcctttttttggggttttgtttttgattttgtttttttgtttttttgagatggagtttcgctcttgttgcccaggctggagtgcaatggcacaatatcagctcaccgcaacctctgcctcctgggttcaagcgattctcctgcctcggcccagcgaatagctgggattacaggcacgtgccagcatacctggctaattttgtatttttagtagagacagggtttcttcatgttggtcaggctggtcttgaactcctgacctcaggtgatccgcccgcctcagcctcccaaagtgctgggattacagacaagagccactgcgctcagccagttttccatattttgatttctgcttttcgaattattacctgaaaatgaacttttcaattggcacttggagagggaaagcctagcatctcaaaactccttgtacatcaaaaactcttaagcttttttttttaaagagaataaaaattgtacatatctgcatttgccactcaaaatctaaggtagacgtaccttagtaggtcttatataccttagtaggtaagtctctttcaagagaaaatgggaaatggtattctgttaagtctttaaattttttaaataaaactaatacagattcaccagggaaaaaaaatcaaagaggccagaattgtatgatgtcaaaatctcccatttccttatatctccatcttaacccactccccagaaagggacattgtcatggtaagttcaatgtgtgtatatatatgtatgtatgtgtgtataagtatgtatatatgtatgtatgtgtgtgcttaaacacatacatacatacactgacattgtacatactatacacatacattttcgtcataaatggtatcatagtgcatgcgccattctaccaacttgctttgttggttttacttaagctatttcatggacatctttatttgttagtaagtaaaaattaaccatattcttttctgaacagatgatttaatagtctaccttaaatatattataattcaattaactagctatatattggtggccatctttaaggggggatttgaatttaaaccggtacaacatttttggatagcaatttgataatagcaatcaaaattctctggttgtttcttccaatttaaatgtcatgaataatactttaataaatgttcattgcagaccttgaatataccagtaggctaaattcctaaaatgaaatttccaaatggaagaagttgtgcccttaaagttttaattgctattaccaaatttttctccccaaattttggaccaaaaaatagtttatagaagttcatttctctatgcattcaaaagagcatccttattcgttttaatctatgctaaaattaaaaataagaaatcacttttggtggtatttccagactatgaaatgtaaatgagtctctatgcataagtgatcatcatcaaacataaatggccttctgcttgtgaggtggtggtcatcttacagaggaggagaatttggcttcatgttctgtctgatgagtgggagaggtgtgtgatgatttttgcttattatttctgctacagatagaatctcattctttatgagacagtccttgttacaatcactagcaattctaattgccagttttacagttcaccagttctcaataacatgaagcctctgcataaaatgtttctctattccatggcccccagttgccagttttacaatacaccagttctcaataacatgaagcctctgcataaaatgtctctctattccatagccagtcatatttacagcagctgtggagctcaagttttttataacagcctctgtttcatacattctgcccattggatgaccaaagcacttttacatgacaaaccatgtttcttctcagcctggaaattatggccaccatagtcattaccccgggtgacgtcaggggccctttagctcaaagtgacttgcagttacacttttacttgaagccaggccacaggtgctaccctgaacggaggaagcacgcttgaacacgctggttccctaacacaagactgtgacagagttttcactggtctatggccgcatgagaaaataaggagcatgaagtgttgggggttgtgcacagcagccagctacagagcaaagttcaactacgccttttattcctagtgttgagtggccaacagtcctttagtgagtttttcctttattctgagattatttgggggtagtaaaatacccttccttttcttttatgaaatgatagtaataatggataacaggtggtttgtgcttttggaaattttactattccttgaaccaacctgggcaccagacccagttttgtttttgtttttcttccttgcaacaccttggatgatctctgtctctatacctcatcatgggactaatgatagtatcttcccagcccaccctgctggcttgtgaggagaattgaatgaaataatagatattgagagcctatgagaaaaagaaaaccagaatttctatgtaaatatacatattgttatttttgcaaattacaattttggtttgtaaactgtttttgtgtgcattttttaatcaaacacaaatttctatgctttttttttcaaaacatgaaagtttgtatataatagcagttatactgcttctatagaaggatatgatattttagtaaataaaggctactggatataagttttatttatgtatattttaaatttcattaagcaaataattcttagttaaaatgggtaataattattaaaaataattgactataaaccttactcatttcaagtagtggaaagggaggtatcagaacttacaaaacttggaatagttttctaaaatgtaatttcaattttcttcttttattgaatgaagaaggattgtgactagcacatttcatatgtgcataaaggtactaaagcacctttactttagtaaagttttgagagtgcttaaaacaagttgaatactaaatatgctaagtctcataatctccaatcctgagacactcactgttcacttgttcggctttttttcctttttaaagacagtgtctcgctctgtcgcccaagctggagtacaggggcgtgatcatggctcactgcagctttgacctctggggcccaagtgatcctcccaccttagcccctcaagtagctgggaccacaggtgcatgccaccatggctggctcattttgtttatttttttgtagagatggagtctcactatgttacccaggctggttttgaactcctaggcacaagtgatcctcctgccttggcctcccaaagtgctgggattacagaaatgagccagtgtgtctggcttatttgcgtttttaaaatggtgcaaacataattttagcccaacctacaaccaaaacgcttattgtagctgattttttcctgttaaacatttgtaagtcattaaaatatagtccatcttatcttaccttcttatcaacacttaccttaccaaccaatcaacatttatcttccttgaacctctgaactcagtgcttattactatcatattctgacctctctgagcccttctccacctgacttcacctttgccaagtcatagccacattgtgcatgcactggggagatggggagaggtggaaaacccctgactaatggcttcactacatttacaatacatcaaatctgtccattgattggtccaagagaagccattatgctattagttgtctatctattctgtctatatcagcttctagcatcggctttgaccatcattgttctgctcactgaccttttgtctcatggttgttatttccaggctaaaagtcaaagcacctccaagtgttcctcgaagggactacgcttcaggtaaggtatttctcagatactttaactgactcttgactaatttaatgttcatatttacatttaggcttatggaaagggaaatacgctatcctcatttgaaaacaaaaggtatcttttctaatttcaagaatgactaaatctattaggcattttgactacagtggagatgtagtttttttatccatccatccacccacctatttattggtcacttattaaacatcttccatgtgccaggcacacacagatctgaggcaggaatacagtgctaaaagttaaagatagactatacatttgaggaatttatagtccagaagggaagatagattattgtattagtctgttttcacactgctgataaagatatacctgagactgggtaatttataaagaaaaagaggtttaatggactcacagttccacatggctggggggacctcacaatcatagtggaaggcaaaaggcatgtcttacatggcggcaggcaaggtagaatgcgagccaagagaaaggggaaaccctggataaaatcatcagattttgtgagacttattcactgccaccagaacggtacgggggaaactgcactcatgattcaattatctcctacaaggtccctcccacagcatgtgggaattatgggagctacaatgcaagatgagatttgggggggtacacagaaaaaccatatcaattatgttaaaagtaattataggcccaggtgcagtggctcacacctgcaatcctagcattttgggaggctgaggaaggcagattgcttgagcccaggagtttgagatcagcctgggcaacatggcaaaaccctgtctctacaaaaaatgcaaattatccaggtgtggtggcatgcacctgtagtcccagctactcaggaggctgaggtgggaggatcactgaggtcaaggctgcagtgagatgtgatcatgctactgcaatccagccagggcaacagagtgagaccctgtctcaaaaaaaaaaaaaagaaagaaaagaaaagtaattacaattcagtgataggggaagcacaaagttgggtggaattccacagcagcactaatgaatctaatctgtggctgggagtgtggggtaagtggggaagagactacttcctccatcaaaagctgtttaaattgatatttgaggattgttgaaggggtgggggtaataaattattgctggcacattgctgactctcagtcctctccaagtttagcctgcaacctcattccaactaggatcaactttggcaggaaagaagggttagttttgagatttgtagtgtttctggcagtggtgagccaagtgaaatattcaatacacatttctttattagaacaaatacgttggaagatagttttaaaatctctttctatagcattaattataaagatttcctgaatatccctcagtgaaaaccacagagctacagacatcattgatgattctcaacagggcaacagcctaaaaccaaaccataaccttaaatgatgcttactattttattttattttttcggccactgatcaagatagcaataagtcagatagtgcagttcctcctaagggaatcttatcacactgagaaatgctgaccaacctgcccaagtctggttacaggcctgttggaccactcactaattcacagagtagttattggcatcaccctgccaatcagtcagcaagtttagacagttggtcaggggatgccagtacagtctggcactaaaagagggaccctgttctgggctttaatatctacctaatcaataagtcaaggaagcttcctagttatatgagaacaaacacattcttccttccaagttctaaataaagaaaagaaaccaaagcagactcaacctgttaaagaactaaataagtttgatggacaaattataaaatcatggagtcttgggtttaaaaggaaccccagaggtcgtgtagaccaatatctgatccagggcttaacccctatcccaccaccattcacctccacacacaaggcccagcttctgcttggacactttctgtgatggtttcccatggtctagcaagggacaggcagccctggctggatatagatacaatcaatttccttgtgacttcctatgtctatcctgatggccacacagttcaagcctttaaatatgaagaaaagtagagccaggcacaggggctcacacctgttatcccagcactttgggaggccaagatgggaggattgcttgaggccaggagtttaagaccagcttggtcaatatagcgagatcccatctcttaaaatataagaaaaaaatattaagaaaaataaaaatagagttgtcctgtgcaacttcaaaggagagaattaagaagttaggccatctgagtggtttcttctctgggataaacatctccaggtgcttcagctgtttcgcacattttctgattcattcaacacgtgtttcatgagtgtgtcctgtgtgactgtcactgtgctagatctggagtggggaacaacatacaacccctgaccttacagtgctgaatgactagtggggagtcagataagaaacaagaaagcaaacaggtaaatataaattagcaaacatggtacctgctgtgagggaagatggaagagtgcaatggtggggaatcagtgtggggtaggagaagagcttaggtggtgtgggaagatctgtctgagaaggtgacatttaatttgaggattcggggacaaatgtgcaggaatatttgccacttttagatgaaccaacagcatcagagatgctggacacagattccaggagttcagagtcaattgttggaaacctaagtggactgacatatctgatttcagggtggacctccctcctgattgtcccctcacactcacctgtctgcctgctgatccacccacccaggccctctcctttccctctatttctgcgtggggaaaagggaggtagcatccatctattattcatccttttgcctaacccacacacttgggatcaaccttgatgcctccttttccctcaccttctacaaaaattaatctccaaatctcattgatttgctcttaaatgcctcttaaatattttttccctctctattcccattgctacagctaaggccttcatcatctcttgcttgtcctagggtagaaggctctaagtaatctgcttaattcctgattgcatgtggtcctctcaacttccaccagaaaattgttctgaaataaaattctctttaaatcttttcatggctctacattgctaacaagaggaactgcaaaccactgagcccacatacaaggtctttcagcttagccactaactggctgtgtaatcttgggcatctcatgctcctttcctcatctatattatgcaggcctgaactagaagatctgtcaggtcccctctaatactaattattctgcactcctgcagaaacacagatctctggggctcagggcccagtgataaagtgagcctctcctaacattccctggctttaggcattcacatcttccaatatccctgatgctctgaagtgttctcttttttgtcctcagacacctgctccctttcctggaacccttccaaatagtcttgatgtcagaacatttaatctctcctggaatgcagaagtgtggcccaacaggatcttctaagcctttgcaacacaaagtttgattcccagcaagatagcatcaacctcatctggagcttgttagaaatgcagaatcttggccccaccctagaactactggatcagaatttacattttagcaagatctccaggggatctgaatgtaaatcatatttaagaaaccctgctataaaccaccatctctgtccctattgcctttcctgaactgaaagacacgtagattttattccctcaatccctgacccctgcaaatccattgatgttccagggtctcggaaatgcatcttattgctttgccagatgactggggccttgcccagtttcccctgctcttacactcaatccccggaaatggtccaaaaccaccatcaccacctgcagttagcatcctcccttgccgttctctcccccaccccagttcacatcccaggagcatttccagctgcttcccctgagccttgaggtttctgcacagctgcacgtccagggcctcagaaatcagccctgagagctcctcctgaacctggggagtctttaggatcttggaaactgtagtgtgtggaggccagagcccaccagacctcctgagcctgggaggccaatcacgtgccctgtggagcacttgatccaccaaaggctcctgaaatgctccagccattttccccccacacattggatttatgtcctctttccagttctggaaacaaatggcttcccaaaaccctctaagccaagagtgtgttgaccttggtgatgctgaccttcagagagcagaggatagaaaggaccagcaactgccccacaggaggtcagtaaaagagtcaccataccctcttccctagttagagtacagaaggacaaagcttgaattacacaaagaatggagagctgggtctcctccagggatgcaggtcaggccagtgtggagcctgctgccttcagttcagacccagcaatcccagttcagtctttccctgaggaggaaacatcgcccctaaggaactgctggcccactgggcagaatgcattgccccaagcagctggcattgctgtgggaagggaagatatccaaaatctgttgagtattgactctgttctgggcattaagctaagctcttcacagacatatctcatttaatcttctcattagcaccgttatatagaaattacgatctcggttttgcagatgaggaaaatgtgtctcaaggacattaagtatcctgtccaaggtgactgcagccactaagaggaaaacccatcccagactcccattttgcagctccttgctttgacccaagctcaagtgttcatgcttttgggggaacttttttcttattctgaaggcactagagctcctgacattaatgcaagaactcgcttcccagttcctgagctttcacagttgaacagccttcggtatctttgaagtctgaggtctggctggggatggaggtcagggagagaccagtcatggtgcccgagagtctgctgggatcactgcagatgccccattggttaccccacaagtccttgaggagtcagaactgaacagagcccctctcttgcactcttgggctctgatgtccagggctctgatggggtggcatccctgggaggtccacgtgtgactcctctggctctgctatcatgcagggaggagatcagagcaaatatagggtggaggggtggcaaactcacttacatggaaaaaaataaaaatccagagcaaagaaggcacttggacagggattcttgggtaaatgcccacacagaagtatggggtatgcataacaatcctttgtccactaaagaagtgagatttaacattgcttttgtcatgggcctggtgctcctagtggagccagcatttacctggttttctgtctccctgtccatattcccctggaggtactggtcttacgctgacatgggagagctatatccaacatcagtcctgccatagggaactaagaatagaggaatgacacttgggctcaaaggtattttaaagcttagaaattcctgaaggattgcccaacccaagcttctcattttaggaataactggagaccagagaggcaaagtgactcctgaggtcatgcagtgaggtgatggctgagccaggactatgtcccccattgctgtacccccacccctctgttaatgatcctgtgaagggatgagtagacatacagacaaagggagtttctacgatgataagtatttcttttttctttttttgagacggggtctcgccctgtcacccaggctggggtccaggggtacaatcatggctcactgcagcctcaacctcctgggctcaagtgatcctcctgcttcagcctcctgagtagctgggaccacaggcatgtgccaccatgcctggctaattttctaaaatcttttttgtagagacaatgtctcactatgttgtccagggtgttctcaaattcccggcctccagtgatcctcctgccctggcctcccaaagtgctgggattacaggtgtgagcccaccatgcctggcctaagatgttaagtatttagactcagaacacctctctcagccagcctgaatctgggtcttgtcctcagttccccacattaaatcatgtccctttctcctcttagggcggcactggtgggactggccacccaccgcctcccctgcagcctctgtagttctgctttctgttccttttcggtgtctgtccccaccaccacaactggcccaccctccctctttccttccttctgtgtcctgctgcggtcttcccactggctccctgcatgccaccacctgctctgttgggggagagatgggcagggtctggcggccgggtagcctccagagcaggatcagggctgcagctgaggcagaatgtcagacatgctgtgatgccaccagcatctgccccaggggctctggtgctcctattgactcagaactgagaggctggattcatactccctttgccccagccaccaccacagagtcctgtactgtccttccagccatcccttcccattcccagaccccctggtctggatcagctttcgtctttccatgcctgagttcctaaacaccaacctcatcagctccccatctcagcttgtcactggagcctgcggtgtccactatggctggagcccccactggccggcagcacatcagatttgtgtgagcgctcagcagaatctcctgtccctctccagcccagcgcattcattctgcacacatctgcctctaagccctgcttctggggctgacacataagcccctctctcagatgatggaggaagacacactccttcatccttattctctcacccaaatcctgctcatccttcaaggccccattcggccccacctcgggcacatggcctcatgcaagtttttggctgtcactgggcacacctttctctgaactttccccgctcctggcaatgattccaggtgtggggacatttctcagaaaactacatggccctgagttttcccagtctcatgtggtcattcttctggcccttagtctttatttgtattatgaagtgtggcttggtgagaagaccttggactctgaggtcctttaggcctgggttggaatcctggctttgctccctaagcactgtgtgaacttggaacagttttgtaatttgagtgagcctccaatttctgacctggggataagaatacctatcctttagattgttctgagaattgcagagactgtaaattcattgtaatagctaacattcattgagccctttactctatgtcagatactcttctaagcacgattaataatgtccattttagcaaaggggaagctgaggcccagaggtgaagcaattcagctaagatctcactcctagaaaatggcagaataaggattctaagttaggcagtctgaccccagagcttaagcccaaatgtgggccgctgtggccattctcacatctccttgtgtctggtgctgtgcccacaggctggggagggctacatgaatcttaaaacctgggtcaggcaaagggaggagtccctctattgtgtggcatgggattatgacatggtaaatggagcataagccccaaaccaggtaaaccacaccataggaaaggctttaactgacaagagggcccgcccaggatctcagcttcctggcagagaccatggaatcacacaaacaaaatcaatccacctggcccacatgaagcttgaacttctcccccaaattttactcactacaatagaggctttcttggatccatgcctttgtggtagccatagtgtgtgattgacgtgggagtaaattagaatcagtggtgttttgagtgttaattgaggcattctttgcaatgctcaagatgacggtaacattactaaagcattactgtgtgccaggctttgctaagagcttcagatgtattttattatttgattctcacaaaaatatgatacaggcactgttcttatccttgctttacgggtgaggaaatgaagctttaaacaatattaaattattggtccaagaccaagcagcttgtaaaggtcagagccaggatttgaacctagaaagcctggctctaaactaccacctgtgcactttgggaagctccctgagatactggaaaactgactactgttttggacctaatacctcggactcccatgctttttagtcttggcaattgcctgcaagactgtaactttatgaatatgatgctgtgagttgcacttgggacctgaagtagatagtctagctaggaatcgatggggcaccaacaaacaacctctatcccatactgtatgatgcttttctctcttttctgtctccatgtgccaagatgtctggattgggtcattctcgtttcaccaaggttttatctaagtgctcagcagagggctaagtggctcagatgagatttcagctgcaggagccaacacagcctggcttccaacccagctcccaaactcactagccaagtagcctcaggcaggttttacaacctctttcaaaaccaagtttctccactgtaaaatagagataaaaataacacctaccacatagtgctgttataagaatacacttttataacacttagcctggcacccagcacataggaagtgttcagtaaatggaatctattgttgctatcctaatgttcctttgtttgagtcatttattagttcacacatttattaatacattaattacaaatgcaaaattctgtccagatgcaaagataaattagataggccttattttcagtacagagagacatgaacaacttaatcacagcacaggacagaacgaagtacatgtgacatcacggtgccaccagcttccaagagggcccagaaaaagaagtgattgattatgacaagagactgtggtagactttgtggaggaggagtgatagggatttccatggaagaaagaagatgggctgcaggaacggcacgagcagagcagagaatcagcaaagtgcacaacgggaggaggaagctgtctggtgttactgttagtgagcgtgggagcctgccgcaagaagtcggtggtgggacagaaggcagaggcattggaatgtgttgccacagaacctctacttgattccatagggagtcactgatgactcttaaggaaaggaacagcataatccaaactttattttaataaaataactacaaacggtaggatggatggattggagaagaaagataatggagacagggacactagttagatggctaatgcactactttcaccagtgactgatcataaaataggcccccactcactgagaaagggtggagcaaatgcagttatccaggcagggaagtgggtttcataaaggcattttataagggtttctatttaaatggttgttacaaaaactcttgccatcttaagtgttgatcttcagtgatccccagacttaaggtattagaaacacattgaccagatgcagtggcttatgcctgtaatcccagcacttttgaaggcagaggcaggtgagtcatttgaacccaggagttcaagaccagcctgggcaacatggcaaaaccccatctctacaaaaaatacaaaagttagctgggcatggtggcacgtgccagttactcaggaggctgaggtagcaggatcgcttgcaccaaggaggttgaggctgcagtaagccatgattgtgccactgcactcccacctgggcaacacagtgagactctgtctcaaaaaaaaaaaaaaagactagaaaagaaaaagaaacatactcccccattgtgccaggtaatcatattgggaagaggatttattcacccaatcttctagagtttcttggccaaccccagtgattgcagtacactctaattcagcattagtcaacccaaagaataatgtaagaattcttttctgttcacgtcaaagtgtgacccatgtttggcttgtagagtgaggctctttcttagcacctatcatgtttttcccaaaagagggtgctgctgccgccattgcttaaaatgtggccactccgatcccacagtatccttcctgaccccatttcacctctgcaattccttgctggtgcctctggagaccccaaatgtttgactctctggagtccggtggtctgctgtggcaggggtagaaatagcaaaaacataaaaataaaactagaaaatgttctgttgaggttctgggaaatttaggaacatccactgggtcctctgtggcagtggctactcagcggggaatagcaaaaacataaaaataaaactagaaaaggttctgttgaggttctgggaaatttaggaacatccactggatcctctgtggcagtggctgctcagcggggcaggagggagctgggaccctctgtggtgctgtcatggagccactctgccacatgggcctgtgtctgcttgattcctacacagcagagtgaatcccatttaacctctaaggtcagtttatgtgataggctagatgctaagtttctcatactctaaatgtgttttggagggaaaggggtcaaatattcgcctgggctgtcataattcagacttattttattctacaagctcataaactacttaagggccacaacctgtcatatccatttttctatgcccatgcagagcccaggacggcacctcctgcccctggagcgaggcagcaccatgtgggggctcagcgcatgcccgtggaaggcaacctgtagggttcaactcctggctctgccatttattacactatctgaccttgggcatgtgacttatctgctctaggcctcagtttcctcacaaggtttaggtgatttttttttttttttttttttttgagacagggtcttactctgtcatcccagctagagtgcaatggcacaatcacagctcactgcagcctcgaccccctgggctcaagcaatcctcccatctcagcctgctaagtagctggaactacagatatggaccaccacacccagctaattattttattttttgtagagatggggccttgccatgttgtccagactggtcttgaactcctgggctcaagcaaccctcctgccttggcctctcaaagtgctgggactacagtgctgggattacaggcataagccccaacgcccagcccctcacagcgtctttgagagggctaaaagacggcaaagctctgataatattgcctggcacatactaagacattggataatttttttttaacaagaaaagtcaaagttagagccagagatgatcacagaaatgatcccctcattgtatagatctggaaaccgaggctcagagatgttagaggtcttgcccacactccaacgcattcggaacagagcctggataagaacttaggtctgtctgattccctgtcctgtgctgttcctactacgccatcctctgaagtccttagaagccacatagtatgaattgtaggtctctactgggggacccagaaatgtcccttaacaaagcccacacatggatcagacgcacattgctctgcccagtgggacttctctctatgctttgagaattaatattttttaaaaagtcaaaagcaagtgaacatatgattgtagtaactaacccaaggtcaagtatatggcaccagaaagcccaaagggaagggaaggcaggtgcgaaatgtgtgtggatgggctggggctggccagctgaggctcacacttgtgccttctgcttctcccctgctgttgcagagagccctgctgacgaagaggagcagtggtccgatgactttgtaagtatttgctcctgggaccaggagggcatcagggtcccatgggaggccttttgaagatcttatttctgaattacatgctggtggtcagccgcacgtcccaagagggaagacttggaaaggtcacctacaggcaaggcatactgcataccagctgacttgactggcactcagtgtgcgcctggctaagagctttccacacataacctcatttaaacctttgaggtaggtgttcttatgcccaacttcagtgctggtgttcagagtactcaccagcacatccaaaacaggtgtaaaaatgtttaaatgtttccatatcagttagcaaatgcctctgccctaaactccccagtgcccatcactgcctgacccctgcccaggagccctaaacgaaccaacaactaaagaataagtgtctggcacatcagggggcctccaggaccaaggtctagaaagtttcagtcacttgcagttccacaattcagacccaggccctcagatctcaggaccaggctctttgccaccaaggtgcttgctgtgatcaagagaacattagcagagctccggagccacagagagagggacctggccatgatgacactggggatgttgtatcagaattatctctttgaggtagctctgaaatgtgcaaggcctgacatcctaaaaacttttcttcacaataattattcctcacttatatcaaattcatccagaatgttagcctgctccaacctgtgagttttagatctggaagggatccaagaagccttccatacaaccacatacccatttcacagataagaaaactgaggccaagagaatgaaaatcacccagttcagtggaatgagaacccaggactcagacctccagtcctgtgcccagccctgggctgtgcacactacctggagtttatacagagtctcagaagacaggagttcctccttcttcaactgcagaaaaagaaaagaaaaatgaggggaaggggtgacttttctgcccatctcttggtcatggagctcctcctggggcccagcagccgcagctccctgagatgcactgcagctgcgccccctgctggctgcgcacgcgcgtgcacacacgaacacacacacacacacacacacacacacacacagccacatgtaaagcaaagaaattgcttggtccacatgcagaggtaagagaagaaaactgagcaagctggctggatgaaaaagagcacacaagggaacttagaaagcacaaaataaaatcagcctggagaggaaggaattacttgccccaaaatcagacaaccaaaatgaagataccagctgtactaaagactgagtaagcattcactcacagctcttttgacttcagtagatggatccccactgcacgcagaatgaaatccaggcttgttaataaagcctccagaatttcttgattttaaacaaaaatcctgctatatgttctcattcatttgtaggagctaaaaattaaaacacttgaactcataaagacggacagtagaatgatgtttaccagaggctgggaagggtggtcgagggggcagcaggtggggggagggaaacagggacagttaatgggtgcaaaaatatagttaggatgaataagacctagtgtttgacaacagggtaactacagtcaacaataatttattgtgcatttaaaaataactaaaagaatataattggaatgtttataacacacacaaaaaatgaatgcttgagtgatggataccccatttacccagatgttattactacacgttgtatgcctgtttcaaaatatctcatataccccatatatatatatacctactatgtacccctacaattctttttttttaaagaccaacaggaaaaaaaatcctgctatataaaattgcttatgaaaggcgacaggccaaagagcaagtggaaagtcatgtacagatcatgcaatgtgataggcagagtgtgagggcggtggacacagaggccagaggacctcttatgtcctgagtcaaatatttcctccacatgaatatatgtacaaacggtatatacataaactacctctgaaaaacatgcacaagaaacctagtgactctttctgcctctgcggtgagaagcagagaggctgagaaggagactgcactttatatccttctaagccatttggacttcagaccgtgacaatgtattttcagtgtggacttaaatgaaatgtggattttaaaaaaacaggccaggcgcagtggctcatgcctgtaatctcagcgctttgggaggccgaggctggcagatcacctgaggtcaggagtttgagaccagcctggccaacatggtgaaaccccagctttactaaaaatacaaaaattagctgggcgtggtggtgcaatttgtaatcccagctactccagagactgagacaggagaataacttgaacccaggaagtagaggttgcagtgagctgagatcctgccactgcactctagcctgggcgacaaagcaagactcggtttcaaaaaaaaattagccaggcacggtggtgcatgcctgtaatcccagctacttgggagactagggcaggagaatcgctggaacccaggaggcagaggctgcagtgagctgagattgcgccactgcactccagtctgggcaacagagtgagactccatctcaaaaacaggaaaaaaaaaaaaagaaaaaaaagagagcaaaccctgagtccatttgaagccttgaccctgcagcttaccaattctgcttgaaatttttaaaaaatctcatctgaaagatatctagctggccctgtgtgtctcctcaccctcttcgtattaaacctattttctcttcagtgatcagcattcataatagataaaacccattggttattctattttattgggccattttcctatcttttaaaaatatgttttattatctcctcttgttatttgttgtggatctacagagtgtcagctcccattagcgttaagtagttcctgtgtcccccaaggacagtgcagtggtggagacgataaactttggaggcagaaaggcctgcttcaaaccccagctttgcctcttatcggctgcctagccttttgaagtcaacctctccaagccttgtctcctgtcactgctctggcctcccaaggcaggaatggtcctgacggccaggcagcacagacggggatgctgagcacagtgtctgcatctgcacttgcaggacagcgactatgaaaatccagatgagcactcggactcagagatgtacgtgatgcccgccgaggagaacgctgatgacagctacgagccgcctccagtagagcaggaaaccaggccggttcacccagccctgcccttcgccagaggcgagtatataggtgaggtcccccgcagacctgggcactcggccttccaggcccatggggaggtgggggtgtccaagattgcggggtggggacaaacctggctgctgcttgagggcctctgccagccgcccgctcccgccacctccaagcaggggatctgggctccgaggtaaaggatcccaagctgtagggctttcccattccaggggaagaggcgtctttcctagattgggaacattgaaagcaggcataaacaaacaaacaaacaaacaaacaaacaacaaacccagcataccctgatggttgtgctccctcccaacactccaagggaaagcaaccctgagattagtcccacttttagggcttcgtgtgctcaaggttctgggatttctcttaagaagtctgtacaaaacaatgaccttcgaggatcccagtgtctgcctcaccttcctcccatgcctagtccagactatgcggttttaccaggggatacaggtgctcaggagccccaagcctggaataagcctcatgggttaaatggacacagcttgggtctgtttttttttttgttttgttttgtttttttgcgacagagtctcactctgtcacccaggctggagtgcagtggcatgaactcgcttcactgcaacctctgcctcctgggtccagcctcctgcctcagcctcccgagtagctgggtccacaggcacccaccaccacgcctggctaacttttgtatttttagtagagacaggatttcctcatgttggccaggctggtctcaaactcctgacctcaagtgatacaaccgcctcggcctcccaaagtgctgggattacaggcataagccactgcgcctggccccaagtatgcattttaatgcccatctttgttccagtcttggcaggtgactaagttccccaaaggttcagagagcaagtatgtctgtgatggtcatggcgatgccagcatttgtatggaccggctctacatgtaatatctcactgccattaaccccctccttacagtgtaccaggcactgctccttgcttcactgaatgaaagtaaagtgaaggccagctgggcttactgggttgccacagttgatcttttgagcacctgccatgcaccagaactatgctaagcactgagcattcagctgcactcaagatgcacatactcccagagatcttctaatttacagtttagtgctttcccctgggggtctacttaacctcctcgataatcctgaaagaggtcagaggagtgaactgactgggccaagatcctctaagtgatggagctgggatacaagccagggctctcagcttccgaagcccagctcatcacaactcggctctgtgcaccacccaccatacttggtgaatgatctttttcaatcatcacagcaaccctggggaggaaagggctactgcaattcagggtggttaagtggctcactcaagaacacactcttggccaagcgcggtggctcacacctgtaatcccagcactttgggaggccacagtggatggatcacctgacgtcaggagttcaagaccagcctggccaacatggcagaaccccgtctctattaaaaatacaaaaaaattagccgggcatggtggtgcatgccagtaatcccagctactagggaggctgaggcagtagaatcacttgaacccgggaggcggaggttgcagtgagccaagatcgcaccactgcactccagcctgggcaacaagagtgaaactctgtctcaaaaaaaaaaaaaaaaatcacactcttcaaagcctgtctcctgtgttttgctacttctgatgggcttaaatattacattaaatatttgtttactcagaaatctgagtaaactccaggagctgcaaataaaactgacaagagttataggcacagaaggaaggatgccctcatgcctgagtacagccacaccaccagaaagaggcttctgaggaggcagcggaggtgaagttaaccacataccttcaacaaggagtgagggctgagggcaggggcaggcaccaggagcatagaggcgagggcctaacaggcaaggacagctgcaccgggcgaggtggggctgtcacaggaagcagcagcaagaggccagtgatgcaatccagaggccagtgctagcacctgtgctgttcccagtatgaagaacatgccaggttattcctatgccaagattttcctaaaacacatcagtctgaatctatgctcagctcactgaatcactgggtagacttgaggccgcctaacgcctctctcacatggcacaggtgatataagttctacttattaggcagacacactgtacctactgccttcactgcaatcttcctaatcccctcaagatctctaaggtcgatattacgatcctcattttaaaaatgaagaatgttggccaggcgtggtggctcatgcctgtaatcctaacacttcaggaggctgaggtgggtgaatcacttggggtcaggagttcaaaaccagcctggccaacatggtaaaaccccatctctactaaaaatacaaaaattagccaggcatggtggtgggtgcctgtaatcccagctacttcagaggctgaggcaggagaatcacttgaacctgggaggcggaggttgcagtaaccagagatcatgccactgcactccagcctgggcaacagagcaagactttgtctcaaaaaaataaaaaattaaaaaattaaaaataacaatgaagaatgtgagtcccagagaggttgaataaccagccccaaagagcacagctagtgagtggcagagcaagggacagaactcagatccagttggccttagagcctgactccttttctgatacctgatgagaaggacagtcctggaccaaagggatcccacagattccctgtgaatggagcgaaatcactgagggaaggagcatggaagttgatccacgtgagtaatcaccacctggatacactttagcataacctggggaacttttccaacctgtaatgccaggctcctcccgaggagttcaaacgttgccaggctggggtggagcctaggccttggcatttttaaaagccaggagcacctcacccccaccctgtgccctccagtgctgcttccatcccctctgtgtggccaagtgttgggttgttggttctcctgaacctctgggtgtccatcactgccccggaaggatgtttttaatgaggacgttcttccagtttttgtcgtttaagtcaataagcagttgaaattttgggcctaacatttcactttactctttcaaggaatgccccgtggatcatttgtggctacatagacacccgtggttttatactttctggatctcaatggcttccacccaggaaatgatccagagcctcttttatgttatgttttttgtttgttcctttcaagacaatcgatcaagccagaggcattccccacccttcagcaagacacttcccagtaagcccagctggccttcagagaaagcaaggctcacctccaccctgccggccctgactgctttgcagaaacctcaagtcccacccaaacccaaaggcctccttgaggatgaggtaaagtaaatctgtgccaaaggcttcccaggacacagaggggggtggggcaagcgaccaggacagcctgcccgctggctgtcctccttctttacaacctgctattgactgccccctctaactctccactattataccaaagggacttggttttctccaaaatggcttattgtaaatatgtcagtttactagaggtgtatggtaaaatatcaatactgagtctgtgcccctcatattatcccctccttcttccctggggtttcctgtgaatctcttctttccttcctaagatgttcttcctctctctttattctcctttgcttctctgtcctgttgttactgacagcaaatccatatgggtctgcagcaacctcaattcttgcctcctgggcgtaaggcagaaggagagaccaaggcaagtttcagagcaggaatgaaaagaagtcaagtacacttagaagagggccaagcggacgacttgagagatccagtgcgctgtttgacctttgagttggggttttatacactagcacacttccggggtcttttgtcccttctcccctgattcttcctttgtgtgggctgtccgcttgtgcagtgccctgctagcatttgggaggtgagcatgcgcagtgtgcttaccggagttgtacgcacgatcccttgaagcattcttgccttaccagctgaatgtttctagaaggtcaagtaccagttaaacgctgccattttgcctcttaatgcgcatgcttgagcccacttgcccaactcctgagatcttatcggaaactgctcatcaccagtttcaggttttttctatctattgggagactgcttttccctggcgctggctgtaaccaattattattttagagagacaattaacagccacctgacaatcacctgatggtctcctgacattcctggggcaggggagccctctcctgccctgctcatgcctgactagctattatacccactgtaacactgtcgccaccttgctttctttcctccaccttcttttctctctgctcctccacttccctcttctcagatgcagagggtgacatgggccaggatgtacaatggagatagctagtctgtaaggtaccccgcacaacctgtggaggagctaatccctcacttccctttgacagctcttgcttctcacttcctccctccccacagctgccctgccccagcaggtgtccagagacccaccttttcagatggcccagcatccaactctgggtttacctcctcaatcttccctgtctcagcacctagccctttgtgttgttttccctatgaaatagctcctatttgaaaatgaataggtaaactcatccaagctgtcgtagtaactgataaagcctaatgtgttatggctcccagaggtccctgcattttaaataaggacagagaccagcctgcagcttctctaagaaataacttgcctgtagaggataaaacttatggcttacacacatgttgtgaaatgaccttcattccgcctttataaaatttgcagcccagcaggagatggaaaagatggacttttaaataaaaatagatgcagcatctaggcccaaattcctgctttggcccttctaggtgtatgatttggggcaagctagacaacttctatgagtctgtttttcatctctgttattttgagaatttaataaaagaacatatgtacagcactaaatacagtgcctcacacacagaggggtttaatatatgtcggattcctttctaccatattctagagccttgacaaaatccagttttctagtttcttctgaaaactgaagatctagcaacaccaggccagccatggcctcaaagcaactgggccccagggcatccccctctctctcagctgtgaatcctggtctcttttttgatttgtcatagctcccacaatgcatacagtgcatgtacacaccctcaccctgcacacactccttcttactattacctacccatctgagaggcgatgttgtcctttcaagggtgggaatagggtggcaaagagaagctgagcaggggaggggacaggatggggagaccagctgttaggatctcactgtaaattatttcagcatttggcaattccacatgaagacacaaattcagatatagaatgcagatgaatactgtgggttatgtaaggctcttcatttctgtaaataactgagaatggaccccagggagtcagggcagaggtttgctaatagcagccttgtggaggtggctcaggcaagtctgcaccagtgggaaaaagagaagtatgaaggcgggggcgttctggaatgggcagatagagagccaatataagaaagaggtgtaaaaacaaataaacaaacaaacagaagccaacattaagatatggctgaaccattagttgggaaaagaagaagtcaagtacaagcataaataaaagtgtttaaccctgctctgcaggttataggcaaaatacagagatacaggctaaacagagagctggaggtggggcaaagacatttaggaggaaggagcatctgtgctataatgagagaggctaacacttggagaatgttgtgtatccactggtgttctgagcactttgtatgcattatctcattaaatcctcacactaaccctatgaagtctatcatcagccccactttacagatgaggaaacaaaggtgtaaaggggctaagaaacttacccaaggtcacagagggaatatatttagagggtatttttataagaattcaataaaataatgtatggaaagcttttaaatgcttatatgagtggtaatgaggatgcagcccatgtgggcatttaatagctaatcaaaatgactccggctaagtaatagggtatgagccgatgggaaagtgaaaataagataaattcacgctactcctatttttcaaatctgtagtcctagggggaggcaaacatgtaaacaattatgacaagtgtcttattaatactgaaacatctaaacattggagttgatctaagatgatttttaatctatttttaattttgaatcatgtcattgtaataattgaagaaggatttctaatacctgtaggtcatggtagtataataatctacctggcttcaaaagaccaatcactgattcactgaagtcaagtttttgtgttttgttcatgaaagaagggggttggtattaaaacactgcagcaatgtcaaagtggtcaataagaccacattatgtcctaataaaggacataaaatgtgatggttcttggtcatttacttatttcagcaataacaacgttaaagcattgaattgcaatgctgggaatatacattttacattccttctcctaaaaccctataaagatgagaaagttgggcagacactacaaacagaatttgttgagactggatcgagtcttttttcctatcagtcttctttgggaatacaaatgtctccattccagaaatatcattgaagtggcatcgttgtctggggtaaatacctggggttcgtcgtctcgcactgacaagattaatgacatggacacgtgtgggtgggttaaggagcagaaagtttaatagacagaagaaaggagagaggagagcatctctctctctcttgcaagacagtggaatctgaagggaaaaccaagcctgaggtggaccacagcagattttagaggcaggcttcaggaggtgatatctgatttatacagggtccacagattggtttgatcaggagtgacatttacatggtgcagaagaggctggtcgccccaccctaatcttattatacaaatgggttttctacttggccagtgccatcttgtctgctccttactgtacaggtggctggcaaagagaggggaagacagagccaccattttgatcatgcctagtcacaggtagcgttttcctattggcacaactgccagcattcacccatgcaagcttccagcttgcttgtctatatcagcagcttgattttacaggctactctttgttagaaaagaaaatgattttggggctgctttttattaaaaggaaaaccttaccaaggacatcttaccctcactatctgcctaagtaattttttcttaactcctatatcatcatgactctaaacagctcagattctaaacactgcagataaaaacattttctgtaatcaagcactgcagaacaaaacaagtacaaaattaagaatacagaggaaagaatacattttgaagtggtcaagtaggactgggttagggcctggagcttccaacttccctatatccattcaggcatcattgccaagtgtcaataccaatattctgtgttcagacataagatattgaaggattttgttgactacagggtttaagagggtggcatgcctcctgggggctcagcctctccttttataggaactaacgcctagaagagaagttgggttcttataaagcatgtcactctggctactaatgaatccgaaaaggtgaacccatagaaccaaaaaggtcctgcagggatccgcagccactcaacatcccattattcaaagctgctaagtcagcccatcccagccttggctattgggttaggcaatttcaattcaattcagtgaggcattcgactggccaggtactggaaacacaaacacagagaaggagaaggccctgcccttcgggagttcatagtttgacactgtggggccagagacgaagcagagatgaggaccaggttccctgtgccacagaggagcaagtgcccacctctgaatggcagaatccaggagaacttccgatgattcagcaattaactcccccacaggtcatacatctagaaaagacccaagcacagatttcctcccaggtctgtatgattccaaagcctcatctccctcagccagatcatctctaaatataactgcagattgagatgtgtgagtagaactctctggtgcctctcggccagcttcagaggtgaagaaagagataagaaatagcaattaaataaagagaggatagataagacagaaagaggagggggaggatggaaggtactagaatgtggtggataaaagtatgggtgctaaattattgaactgcttgagttcaaatcctggatctaccactttttttttttttttttggagacaaggtctcattctgttgccaagcgcaatcacaactcactgcagcctcagcttcctgggctcaagcaaccttcccacctcagcctctggagtagctgggactacaggtgcataccaatatgtttggctaatttttctatattttttgtagagacagggtttcaccatgttgcccaggctggttttgaactcctggactcttatctatccacctgcctcagcctcccaaagttctgggattacaggcacgagccactgtgcccttctgggtctaccacttttaaacttgacaacttgagcaaactacttaatttttctgtgcctcagtttcttcatctggaaatggagccaatggtgatatctctcttattgtgttgttagaggattaaatgagaaaaaaaacatgtaaagtacttagaagaacacctggcaataaatttttgtttttgtttctcctagtacccttcttggctgcccaccagggcaggtggtaaaaaccagttttgagatctggttacctcatttgtgtcttgtcaatataaaatctctccctccctgcatttatcgtcatttaattattgacaaaagtgctaagacgattcaatagagaaatacttttttaaaacaaatagtgctaggtaaatggtgctagatgtatccacaggcaaaagaatgaaactggacttctaatctcgcaccatacacaaaaattaactgaaaatgtagcatagacctaactgtaagagctaaaactgtaaaactcttagaggaaaacacagatatgagtctttatggctttgggttaggcaatggtttcttggatatgacatcaaaagtacaagcaataaaagaataaataaaacagacttcaaaatttaaacgttttgtgccaccaatgataccaataagaaagtaaaaaagtaacctacagaatggaagaaaagttttgtaaattgtatatctgatgaagaacttataactagaatatatagataactcttataactcaataaaaagataaacaacccaattaaaaatgggcaaagatttgaatagacatgtctccaaagaatatacaaaaattgacaataagtatataaaaagatactcaacatcattagtcttcagggaaatgcaaatcaaaactataatgagatatcattttgcacacacaaggatggctgtaataaaaaggatgataacaagtgttggtgaggatatgaaaaaactggagccctcatacattgctggcaggaatgaaaaatggtgcagcctctttggaaaacagtttggcagtttctccgactgttaaacttagagctaccatatgactcaacaatttcacttctaggatattcccaagagaaatgcatgtctacacaaaaacttgtacatgaatagtcatgacaccattattcattacagccaaaaagtggaaaaaaactcaaatgtccatcagctgatgaatggataaacaaatgtggcatactcataaaatagactattatttggccataaaaagacgggagttgtgatacatactataccacaggaaaaccttgaaaacattatactaagtgaaagaagtctcaaaagactacagattgtgtgattccgtgcatattcaatgtccagaatgggcaaaatctatagagaaagaaagtagatttgtggtcgactaggtcaaggaagcggtggatggggagtgactaatgggtgcaaggtttctttttgcataaaaatgtcctaaaattagattgtggtgatggttgtatatgtctgtgaatatactaaaagtcaccaaattgtacaatttacatagtagaattttatgatatgtgaattgcgtctcaataatgctttttaaaaaaatcactccctcccatacagtcaactatgaatgtacagcattcttctcattcagttttgtatttctgttaggctgattatgtggtccccgtggaagataatgatgaaaactatattcatcccacagaaagcagttcacctccacctgaaaaaggtaagagtttgtcgccttaagcacctgaaaatttttagcagttgatcaggatgtataagagtatttggtagtaagcactaagaggctcagaaatgacagtgcccaggactttctcccctgggccacagtgtgtgcttctttggctggttgggcagacagcatcagtgacaacccatctctgtgtatcatagcccttccctgccttccccttcctcttccatgctttaatcttcccatctcacattatgaaagcacctgggtagttctcttcagctgccctcgcttcaaatggatttctcataaaacctaatacaatgtcacaagccaccatgttggccttgtaaacattgcaccaagaacagtttctgcagaggagtgaaaaaatgaaagagtgaaatatgccctgagtcctggttctttaaatttagtagtatgataagcctatgaaacatttcatccgtaaacccttcacagaacaacaaatgctatgaccaatgaattaccttaaaaagccagtgctacataagattaggcatggaaacagggtatgtttactctgaatatagtcactatggagaatatgatccagtacaagtgatacctcttcaggtaacattactcatctactactctcaactccatggtagccatattcaggtttcagtccgccatcatgtagcaaccctctcccgtactccgtacctatcaccaacagcttcaagacccacctgaattcccaagccacccattaccacaaaagaacaaatacacattccctccttaccaacccctctttaaaaaaacaaaaaagaacagaaaaaaacccatgaaatcccagagcaatggtgtgtattgcatctggtaggggaggtggagctattaattgggcccctccagtaaggggttcaatacactcttgatgaaaaacaaaaacaataaaactcctttatctcttagacctcccacttggcaaatgaaattcaaagccattattcactttaacaagatctctatcatcaaataatcaaataataatatatcaaattatgaatctgtcattgatattcccattctaaagatgtttcttctaagaagacttcttttattggtttgtgtgtctaataagggtgtctcccattctttgcaaattctctggtctggtcatcatttttccctgagtgtgaattttcctcaatggcatgtatctgtaatggttttatgtatatatatatatatatatacacacacatttctgtgtttaagctcccatggtgaatagatcaaccaagccaaattcctcaacgcccgcctctcctccaggaacagcttcaggtaaagtgtatgtgtgatttggtttggttttacgtctatttcaaataagaaaaacagatcaactatgaagagtaatcacttgtatttccaaatgtcttaatattgggaacagaaggccagtcctcatcctcatgcactgtctggtggcacgtgtgtggaagtggccatttccccaggccttttggcatctgctagacaagttctggttttcaccctaccttcctgggcaccttgctggcttctctgtgtccccttccttgactgagggggtcccggaatttagccctcagccctcaacccacagttctttcagaacatcatgatggttacaagcttggttttgagccagacagacctcggttggaaccccagtgtgccccgttaccagctatgccaccttgggcttgtacttcacctctccaagcatcagattttcttttctgtaaatggtgctcatagcccctactctgtgacaggagaattctgcaaatgtgaatgcgaaactcttaatgagtgcctggtacacactaagtgctgaggagagagaatgatttttcacttctgtagcgttcatcgattaatctggattcatgtctcaagtctacactggtaactccctggcatccaaccccaacctgacttcccttctgaacaccttgatgctcccacacaggactctaaactcactcctccctcccctgcgggcacccctgtttctcaatgcgtagagcctccaggccacatgctccaaatcctgcttttttttctcctgaatttgctgttccattttagctgtgaccaccctagtctgggctttctttactcagccaccttgcaccttcttgtccagcagccatacccctgcctcttggctctctcctcagcgacaaggactgagccgctgaactcctccagatgttaccagtttcatctcaccacaaagctagtctttgccatgtcacccctacccccaaaccatgaatgttcctggttgctcctataggttttggcaacccccaaggctgagcccaagacactgaggggtgcccatgacccccattaacagcacagagaggtgtaggagcctgctctccagcattctcacaggcatttcctctccctctctccccttgtccctctcccctaggcacacatatgcgcgtgtgcacacacacacacacattcatacacacacactctcttctctcacagagctgaacacaagtcattgagaggctgagctctgcttccagagacaggctccttcacagaaaatgaaagaacagtcgagtattttaaaaatcttttcctggactcatttcttgtgaaattattcactttcttcacaagttctggttttacttaacctctcctcagaacccacaagcgctttataagtggggagtggagctcagagccatcttagccagctcatcttaccctctggagagacaaaggtcaaacatgccaatctaaaacatcgtgaccaggttgcttaggccccagcagaaatggagactcctaactcccgataactcaggatgagggctgttgttactggaatagaaaacctttaacaaataaataaatgaagacctcaaccctcctttagagaaatagattactaatatctggtgtttacctcttacaaagctctacttgccttacaaggacctcctcttcctaaaacacactgccttacaagcacctcctcttcctaaaacacacccagtactccaatcagcctgtatgtcacgggtcttgcttcttggtctttgtgttctcacttttaggacacctaatcctactcatccttcaaggcccagcttgaggcctccacctccaggaagactcctctggtttctgtagccctcagagagctctcctttgcaggaagtctcttcccccttacacttagcccgtacttattccctaattactttgtgtctcagtctaatcgcttcctaagtacattgcaagctccttggagaccttgccttcaatgtcattgctcaggaggctttacctggccccaagctgggacagatccctctagtgccctgcacatgccctgagatttctgtctttatttgctcacagctgtttccagggcctaccccaggatctggctcaggggaggtgccgagactgtggaggggtcagttggttgagagggtgaatgagtcctcaaacactggttgtattaaatatttaaagaatcaccaacagggctttagccagctggatttattactcataagtttgctattaacctggtatagctgtattttaatactagggtcatcagatgaagaaagcaaatctaaacaagaaaataatgtcctggttatgtgattatcacatacaggtgggagtacctacaggaagggggaagaagtgaaataattttgaagggacaagcctaaacagtccgagtgggtttccgagtgtgcaaacagtggaaccttcagagattatttttacaaaagaaatgatcagactactagcctgtgtctttgaataaccatccattcccctttaaaggcttcagatagtcccccagtgggcatcacaaaagtgtccatcaggtgcctagttggtgtttctgtcaaagcaccacaccacatcagtttcctctggtcaatattgctcttggtcctttgatagccaataaggtgcctgccgagggtgatatagtaaatctggtgcagtgacagcccctgccgtccccgctgtgcttgagaagccagtagaatggatttagccgactccaaagccagaggtttaggtcctggctctgacatttgctaggtgccggactttgaacaagtgaagtcatctctgtttcttagtttcttcctctgaaaaaatggcacctatgcctaggggtatcatgagtagataccatgagaattaagtgactcaatatagatgacttgcactcataaaatgctagtgctttgttattattattgttattattcagaatcccttgttcaacctgccttgatccatgaccattctggcagatattatcagggaacaatattgtttcatgggccagtgacccatgaagagtcatgctccatccttccctagaactctgtcttcctgaggcaagaccataggctttccaccagtgtcctccgtgacagtgttccaccatgacaatcatgctgtcctctgattgtcagaagttatttatagggaaggaaaggaaaaggaaggttttggcagactattctgagatatgcaagaaaaggaagcatagtagaaaagccaggaggaaggtctgacaaagataatatagtggccaaaggagcccttaacatttcagaagagggaaaacccctgggatgaaattcagacttagaccttctttctacttccttatttttcatacaagattttgttccacttccctgagatcttccatcaaattctattgcagtcaagggtactttaacagtgtcagtcttaagtattcaatttgatacaccagttacttaaacacagggagactcctactacacattcaggtgacatttcagtttattgttttcatgttgtcacatgaaatgtaaacattccaaacgcaatctcttttccaaaatgtttcaaaaaatcagacccagttcaggtaccgtggaagacagctgtcatggagggggcattgcttcccagggtgctggggaaggcttccaggtacaatccacaccacccactctttgctgttgctcccatccttgagggtttaggaaaagagtcagtgggctctgagtagaagcctgggagcctctctccagtgacatacatgggaaggaacttcctgaactctatttcaatactttttgaggccttttctttttcttgtctgtgtttggatgagatgatatggagggtgcatgtatcttccctgttataaattctgagagggcagaggcctatgtctgcttcttcacctcttcctcggcccctaacacagtgccttcatgtgctttacatgtaccaagtcctcaataatccttggtaatggattattatttcaatgtgtgcttatctgtgctctatctcataaactaagaaagtacagactgagggcagcaggtccagcctgtacttacagagtatgccctataaatccattaggaattataggccaggcaccgtggctcattcctgtaatcccagcactttgggagaccaaggcaggtggatggattgagtccaggagttcaaggccagcctgggcaacatggcaaaatctcatctggacaaaaaattagccaggtgtggtggtgcatgcctgtagtcccagctactcaggagctacttagtggggaggatcacttgagtccaggagtttgaagcctccagtaagctgtgatctccccactgcactccagcctgggtgacagaacaagaccctgtctcaaaaaaaaaaaaaaaaaaaaaaacggaattgtggacttgtatgtgtagtaagttcttaagaaaacatttattcagttcagttaagttaatgaagagcctcatgaagagaccccttggtctcactgagcaatggtgtccaagcaggtgagcatcatgtctgaggcagctaggggatgctgagggggctggctcagctctggcctctcccctcctggcctgccctctgtcccacagtgaagatccatcctgcttctctttcacttcctccctcataacgattgtctggcatctatcttcaggtacaggaagggaggttgggtgcaggggacaagacccttcgggtcccttctatgacttgagaagatgagatttgggcagcagcctgcacttgtctcaatttgtccattaaggaaaacctgtcggcgaaagcccttgaaaactcagagatgagtgagtaaatatcctctgaatgtgaagttagaggcatttaccgtatttaagtgtgcttataaaggagcactgtctgaggtctgtgtcaggagtggtgggttggagcctctgtctctgggcacctctgccgtgcacatttgtgcagtgtgcacagatgtaggtgtgagctgttggctcccttcctgaaggacctctgtgggggtcctcactgagtcctcagaatcagtgggctcaggacttgccccatggggcagggggcgggtaaggagaaggtcctttagaaatgttaaggtggagtccctaacccccatcccagctctgagcttatacactgacacttttaaaatgtgtcatcacctttgcccacaagttttccttaatagcttcaatataactacctatatgtgcttaactgaaagcaacacagtatgtgcaaatatttctgagcctgccagagaggccagcctcagtgtgagcatcagcccccggctcaggacttggggactgagtagtgtatatgtttgtgcaggtcgaaacagtggggcctgggaaaccaagtcacctccaccagctgcaccatccccgttgccacgggccgggtaagtacctgttgcaggaagcagcttttgagatctggggagtgaggatggtgataccccactgccctgttgacttcattagaagttctccccatggcaggctgcaacttggaccaagagtaaggagccctgctaacatcaaatgagccaggcatggtggctcaggcctgtcatcccagcactttgggaggccaaggcgggcagctcacttgaagccaggagttcaagaccagcctggccaacatggcgaaaccccgtctctactaaaaatacaaaaattagccaggcgtggtggcacacacctgtaatcccagctacttgggaggctgaggcaggaggatcacttgaacctctgcaggttgcagtgagctgagatcacagcactgcactccagcctgggcaacagagcaagactccatctcaaataaataaataaatgaataaataaataaataaataaataaatctagaagtatttcctcctgtgaagttttagttaagtcttgagttcactaacttacagtgttccacaagacaccctgactttcagaagctccagcacctgaatcattttcagagcctctagcaggttttgtctttacttactgctgctcagttttatggtctgtaaataagtgtgtagatatatactatgtgctggtcataccagggcactccctcaaagccatacgactgaagttcctctcgaaagtgacagtcattctttcttattgaatttagaagggctttgtaaacagtcaggtgacgattgtaatgtgttaatattacaaacgtcaccccgtaaaattatgttggctcaacaggttatttggaaagcaaatttaaatatgtctaaagctggcctgaatggctctaatcttatttctgtctctgtgtaaaccaaagaaagcctccatgttgaaggtttattaaccaaaactctgcatacgtctctcttagttcagctgtatcactttgggcaaactacttcgtctctctgagcctcagtttcctcaccttaaaatgtcactgtaaggtttaaatagcacctgaggagcctaacccagtgccaggcatcttacaggtgctcaggaattcttagtgttcttcccccacacttcagctctcagccgaaaacaaagcgagagagagatatggtgagggtttttaaattaagaaatttaacacacagaaaaggagcatacaaccttaccaatattagactccagtctctattggaatcttgagttcattgacttacagtgttccacaagacaccccgactttcagaagctccagcacctgaatcattttgcaaactagaatgttagtgcaggcaagtaccttcaggaccacacatcagtggttttcaaacttgttttggtttcggatctctctgaaagaaagcctgcacagaagacagtggagaatagtccctagagacagggaggaagctggagtgggcaagtgcagctgcaacctcacctgctggaccaccctcttacctctaccctctgtcctggacagtaacccccacagggagctgttggggaagagggggctccacagaaacactgaaaatactgatcctggtcctcaattgacaggtgaggaatctaacctcacactcaagacaaagaggcccaaggtcacccgccaagtaattagtgcaactggtgcaagagtccagttctgccggactggtgccctactttatccccagttgaccccttccccatctgtcagcagactccatctgagcctaggaggatcataactaaatcccacttccatccctctccaccctgcaaggatagtcttctacacacttgtatcgctttcataattctagcttaaatttgagactaaaataatggtaaatagctccattttgtcttcgttgtgttttaacaaagctcatctctttttattccccaggaaaaaaccaacgacaccactgaagacagtaagttaattttgcatttaaaagtgcttcatatttcctgcagtgtttattcttatccatttatttaaagttgaaaatgcttccagctatggtgaacacagcaatcttagcaactgaagttgctgcccaagcagtccaagagaagcttcaaatcctcaggtagccagggaggatgctcctccctggagcatagaaggagctcatcctcacttgatcccagcagcttcactgagtgtgcgcagcagatcagaggggcagccaggttccctgccctctccacaggaagcgtctgtgtccactccccaccacagctaatggtagaccattgtgtatcaggcacacataggcctcactaaactcagattctggccagaacatggtgaacctgggccacaacactacataagggagcccacctggacctagtccctactgtgaagcctgacatttacaatcatttagcaaacacacagaaggggggggtcatgagaccaaagcagatgccagatgcctgctgtacatgggttactatgtggcagctgctgggggggtcatgatttccatcaaccctgttgacaaggcagggaggtttctccaccacagtgacattgctccttcataggacacttctggctgtttgttgcttaatgcaaaggttgggctagggactgtgggtttgtaattgttgttgtgattgaaagaatagcaatgcatcaaagaaaagtgctgccaaaatatttattttaataatattgctctgacatttatttccacattctgctatattgaataaccttgcctttttttcttttacatagactccagttgcctctcaacagaatgcttcaagtgtttgtgaaggtaaaatctattattttgaaggatgagcatgtcctctaaaagttattttattaaggatttgtatgtacacatttattacattatttttggggcaattgtaaacatgaaactcaattttctaaacaaaatagtttttgcaatgagcaatgaacagcaaaactagctcagaacctcagcatgtttagagtaggctacagaatgcatgcaaaaacctgccttttggcagacagatatgacttgccaggcaatagtgctaggaccttacataaatgtgaaaactaacgtagagccattcacatgttttagaactaatagcttacttaaagtaatgaaaactttaaaaatctgtttatttgaacaagttcttttgctaagttttcaagataatgttttcaaagttcaattgtctgtcttcttagtacatcttcaattgcttttcttcctttttttttttttttttgagttagggtctcactttgtagcccagactggagtgcagtggtgcataattatagctcactgcagcttcaaattcctgggctcaagttgtctttctgcctcagcctcctgagtaatttagaatttcttcctttatcatcactcaaaaatcttatatatatttttagaaactgctcatgttaaaaaaaattgtgtttggaaattaccggaaaaaaatagaagaatcatctataatatcagcacttaaaacattatatagaagttcatgccctgtacccatttaattccatacttgaagatacccagggttaaaaatgtagtgagtattctccctcttccctgagttgatgtgcgtatatctacataaagcactctcctttctctgatgatggacagtggatcttttctgagcatgcactacaactcacctctctgctttaatgacgccattaggttttttcatcctgtctcccatatcttgcttccctaggctatttctgaggcatcaccccttttctgctgtattgctttcttctgccttccctttgaggcttttgtcttttctgtacttccattccttgcagcctctcagacctgctgagtccaggttgtggagtgatagtgacttcaggagctctgagcatctgtaggaagtaagtacaacctgtgcagacttcatggctacaagagcctccaaaatccaggaaagaagcagggcccaaggcatgtccactgctgcttaggtgtcctcattctcaaagggttcccagtacaggagcctgccaggcatgccccctcctttgttatttatttcaagagcataggcaattaccatccaaatgcaaagtgagtgagtggcctctactagcctaggaaggaatcaggatggcggaggcagagcaggtgtagtcaaagcttataggctggcaagacctaaggtgttcattgtttctccttctgaaattaccaagttttaatgtcatgagcaaaacatctaacatagaggtttgaagtagcttgccacaaattcaaaatacaatcttcagaggttcaaggtttccaagctttagtgcaccactgaatggtaagaaaccctgacgtctatcttaccatttatttgaatctttgagttcttactacttttatttctttggggtttctgtagttctcagcctttcttccatgcagactcacacatgaacataccaagattttaacacaccccaccccccaacgacaaatttgagggagagtaaagtattaaaataatgtgtgatcacatttattaatggttcagcagtagagttcactatgggcttcaacataaatttcttacacttcaggtttatgctcatttcccaccctttcctcttctgctcaggaaaacactgaaatgcaagtgagatttacattattatagggataaccttgaatttgatccaattaattttgcaaaaagagatcatttatgaactcagtagtgtgcctcttatcagtaacacactgcttataccacgtcttatgactaatcaagacccaccagggtgttgtctccacctgtgtggaggccacatggcaagtagagggtgagttgtttagagggtggctaaaatgttctcatcttctggcttccacctatactcacacacttaaagtttcagggcccgtgggttcagtctctatgtacattgccagtggatgaatgcagaggtggtaggatgtacctgtaacactgctgggagggagtcctggtcctcatagcacaaccacatcaacagactggcaagtgcacagatccatgacatctcagtaactaagacatgttcccgggaagacttctgatcaaatttggttcttctcagctgatgttgctgggttttgggatgaggacagacatttcactctaatcctaatatgataattttcctgatccagaaaaacctatacctgctgaacgccaccgagggtcaagtcacagacaagaagctgtgcagtcaccagtgtttcctcctgcccagaagtaagaatcctttcctttaaagatcagtttcctcttgttgctgcaggaattaacatgtgcattgtttcactgcacagtgacactgacttgcagtgctaggtaaaaatccaacatttcattgttttgcagttacgtgttaaaaggtgttgagcaactttaaaataactgtgtagagttgcagagacctactaattgggttaattattgaacttgactaaaatacaatactttagtcaagatttcctcctttttcaaaactaaaaggaagagtcttacttatctttaaggttttggtggctcttttatctttagatacattttattggccatttgtattgatttatttgtgatgtgcctgttcacagcatcatcagtgtaaacaaaaagtcaaacttactcatattgtgctttgtcctttaattatctgaaattctttcttgcagacaaatccaccaaaaacccatacctctgccaagtaagtacaacgaagccatgtagtgtatcagggagtggtcgaggctggatcctagagtctgataggcctgggttctaacacagcactgtcgcttccagctgcgttatcctggcatcttctcccacttgtttccttacctgtaaaatggggccaagaatgtttatttcacagagttgttttgaaaagtaaatatatttgaggcaatttttactttttttagtagcgatttaatattttactgatcatgcatccttttttaactttttttttttttacaaaaacaatacagctgttttcaaaataataagatcaagtaaaacaacatatgggaagcaccagctatagtgtttggttctaaacaaataataccgatttaaattaagtcaaaatatattttaaagatcacaaaatatgtctacaaaaggtaccttaaaaagaagatacggcaaatatctggataatttttccaaggcaaacatcaccctaaaaatatatgaatcggataagtcaggctcacagaacgtaactgcccaaaccttaatttgcctgcaactcaatgtgggaaaaaaaggaagaaaaaaactctgctttacatagataatttgggatatattccaaaataataaagcttaaatccatttaaataaacagtaattgtccacatgcaaaatttttatgcattttttttactaaacataaattggctttttaaatttttaataatattcatcttaaataaatgaaacttttactagtttttaaaaaaaattctgacaacacaaagtgaaaatgatttggctacagaaatttatttttcattatttaaaaaggtttattataccttttaccgtttttcaaaccaagtcattcattcagttgttagtgaccatatgccgtgtgccaggcattgttctaggcacaggagatacaaggatgaacgaaacaaataaagaccctgtcctcatgaaacttatattctactgaaggagacagagagtaaaaataaacgcacaaataatatcatatcaggtaaatgctgaagtgctataaagaaaaatacagcgcagcagcaggggtgggtggcagagagtaacggaggcagggagggctgctgctgtagacaggatggtctgagaaggcctgttctataaaatgggcataatagctcattccacaaagagctggtgaaaggacgagatgcacgcatgttgaaaacagaataggcctagcacattcgggtgtcagaaaatattagccatgggtactcttccaactgccagaactgcagaaaccacaaactgccctgcactgtgcacctagggaaagtctgttcactcactcacctttgctgctctcacctgggagtgctgttcccctcctattagaatacatccttccttttggcccatctttgttgggcctgccaagccctcactgccccctcctcttacaatggtggctgccttctctaaacatccagggcactattatctgaagcacttagtttatccagaattctttctcctgcagatttccccatcttaataaaggacaactctggttgctgttgtcaaaaaccttagagtcacccttgacttctcacttgctttcttcacacaccttccagctattccttcaaaatagatccagaatccaaccactctcactgcttccactgctgtgatctgtccaagtcactgtcatctcctgcaagaacaccgaactggcctcccccactctgctgttgccaccctctgtttccagcccagcagctggaatgaccctgttaaaacataggcagatcatgttacccccctgttcaaaaccctccaaaagcttcccttatcatgttcattacagctcttgagtcatgttaagggtccaccaagtcctataaatctggtcccttcattgcctcctgtctgactgtatctcttactcttctccccttttcttactgtactccaggcacagtggcacccttgctattccttagatatgccaggccttgccttcacagctccctctacccgggacattctttcctgggatgtccagtgcctcctccctctccacctgcagatctcacccacatattcttcctttcctgatttatttttcttcatagcatttatgaccctctaacattatatatatattttttacttatgtctttattgcccatctcaatccattaaaatttaagttccaggagagcagggcattttgctgttttgttaactgctgtatatccccaatgcctttgatccatggcagagaaacaagaatgaatgaatgaatgaatgaatgaatgaatgcagataagtctttttcgtatttcacatgtttccacatttagactgtaaactctttgagggagttgatgcctgaagtcagcaattctcagacattttggtctcagaaccactttaacactcttaaaataattgtagacccaaagagctttggtttacatgtttctattgatacctagtattttaagaattaaaactgagacatttaaaacatttattaatccatttaaaaataatattaaactcattacatgttaacataaataatatttttatgaaaaataactatattttccaaacaaaaacaatttagggaaaagagtggcattagtttacattttgtaaatctctttaatgtatgttactgcaacataacagagactgctggattctcatctctgtttctacatttcatctgttgcaatgtttttctggtggaactacatgaggaaaattgggtttcatagtgataggtaattcaaaaagaaaagacctcttgaaccacctgaaaggattttcgagatttccaggggtccttggaccacacttttggaaccattgccttaaggattttttttggtggatgtgtccctggcagcacctagtacagtgttaggggataggcatagaaagagttcaagaaatatgaagattaattgaaggacttttctgatccctttcaggatttacagaagggggaaacccaactgtggatgggcccctacccagcttttcatctaattccactatttcagaacaggtatgaaatgaactcttgatgtcactaaattgttaccaggaaactgcaggaaagagcatgtcttctgagaagaagacatttggagtgaaccttgagaacagagactgtattttacatcattatgtgaactgtcatttggtaatagggacagaatacccagttgttgttttttttcaatgactaagacattgctccagttaatgtttcctcaaaactagcaaggaaatgtgttttcattattcttcctctcacatagattttatttaaactttgtaatttcctccaaatagatctgtagaggctgatgatattaaatcacatataagacagcacagtttataaagggacagagaaaggactctgtgtgcccttgggcaagtctttctaagtttccatacaaatatatgtaaaaatgtaaaatacggataatagcatgtgtccttcttgccttcaaagaaggcatatatcctttcttgcaagaatcaaataaaataatatttgtaaaaatgctttggaaattgtaaagcactccacaaagtaagagcaataagagcacaatggaaagggggattattacttatttaggagaaagaaagaaataattcaggaacctagctaaggccaaatgaaaaaaaaatacaaaaaacaagttaacggtataatccttgtgtttgatcaaaggaaaaataaaactcatcttaaaattattggtgtaaatgtagaggcctgtcttgataatgcaaatgggtctttgtttctagtacacagaaattagagttaagtagggaccatcccatgctgaccagtgccctccatttcacaggaagctggcgttctctgcaagccatggtatgctggagcctgtgatcgaaagtctgctgaagaggcattgcacagatcaaacaaggtctgatcatttttattatttattatttttattttattttattttatttatttgttttgagatgatgcagtttcactggagtgcagtggctcgatctcagctcactgcaacctctgcctgcctcccaagttcaagtgattctcatgcctcagcctcccaagcagctgggattacatgtgtgtgcccccaagcccggctaatttttgtatttttagtagagacggggttttaccatgttggccaggctgctctcgaactcctgacctcagttgatctgcctggcggccttggcctcccaaagtgctgggattacagacgtgagccaccgcgcccggccaaggtctgatcatttttaaatcacacgttttgccctcagcctgtaatagacacagttgtcgtccttatgatatgctaattaaataattgcaacaagtgtagatacaaggatctttttcctttacttactcaagagaaactgctatcccctcctctctttcaagttcctccatctcatttctacttgtcctttcatctcctcaaggacccacagcctccactgccctccaaacagtgggagacgagaaagctccaggggaggtctatggaaggcttggtgctgcatgagctccactgaggagtgaacagtgacaggctattttggatcaatgtgcaggattaaaaatttgagtcaagatggcaaacaaacaaacaaacaaaaaatacctggaagtaaatgtttggagagcccaacttcaatcatgtaggaacaccagggacagcttggacaattcaagattaaagtgacactttttctttctctcttctcctcccattttctttttctttgttttcttgcactccactttgtcagaatatatagcatttacatactgttcttcctcacccttgttttagtcctagctctacaagtaaatatattagtgtgttccgtcagtcctttggtggacttccaccattgtctctttcctttgatgaagtgtacctgtagtagattctgaggaaaaatcgtgtttacattattccctgagttcctttatattcaaaactattttctcagccaggcgcagtggcttatgcctgtaatcctagcactttggggggccgaggtgagtggatcacttgaggtcaggagtttgagaccagcctggccaagatggcaaaacctcatctctactgaaaataaaaaaattagccaggcgtgatggcgggcgcctataatcccagctcctccggaggctgaagcaggagaatcggttgggcctaggaggcggaagttgcagtgagccgagatcatgccactgctctccagcctgggcaacaagagtgagactgctgtgggggaataaaaagagaaagagagttaaaaaactgttttttcatatcctagtagttggaagaaatcttggctggctataaaatccttaatttgagtttgaaaagtgttgctccactagattgtgttgttctgtatgaagctcttgagaagtctgataccaatgtgactttcttgcccttctatgtaatttgatactttagtctggtggctctgcagactttttgtttttaaagtctaatcattttaccagaatatatctctgagttgataattccaaatcaattttctcaagtagacagaagccctttcaatacgtagatttaagttttctcttatatccaataagttttcttagatcatagtcttaaagggttgttctgttcccttatttgtttttcttctgcaagcactcaatttacatgcgttttggatcttttttgtcattttttctcccatcactgtctttgattctatggtacttattttattaaatcccattttctctcctggttgtttccacaccttccttcaagtgtcatttcttaaatcttcatttgaagctctcgtcccttggacatcttataatttgttctttgttgagataggcttgtctttttcttcagtttgtttcctgagtttgatcaactcttgttgcatttcattctgctttttgtccatcttttgttcgtaattttttattttatgattctaaatatttttattaaaaaatttaataaaatttgaattactgtcttacagtttggggatttttttttctttttctttttctttctttttttttttgatgttgtctcgctctgtcacccaggctggagtgcagtggcacgatcttggctcactgcaaactccgtctcctgggttcacgccattcttctgcctcagcctcccgagtagctgggactacaggtgcccgccactatgcccggctagggattttttttcttataaaagttctttgaggagagaattttcataatgaggtcagtctgacccaagattttagtccaggggcaaatataaaatgaaagttttgattcccaacctctgttttcttcttatagtacttatgaatggaatttgtttgatacattttttttcatagacaactggtggctatggttcccagttcaagagagtcctctagatttgatcttaatgtgtcccttcacatatttctaaattttataaacataaaaccttatttagcacattaaaaagctagcatttagctgggcatggtggtgcatgccagtagtcccaggtactcaggaggctgaggtgggaggatcgcttgaactcaggagttccaggctgtagtggactgtgattgcaccactgcacaccagcctgggcaacaaagtgagactgtttctaaaaataattaattaattattacctttttttcaaaaaaggcaagcattgatctcactcaggattttctatgagtatatattttcctggactattttcttagaaaataagaagacaagcgctaatcaataataaaaataatgtagctaaataatttacctttggaatgtaatataggtgttcttcacaaaatgattttttgaacctgtagaaatataagtaatactaaccataattatgttttttaaaaaaaattaaacaggatggatcatttcttattcggaaaagctctggccatgattccaaacaaccatatacactagttgtattctttaataagcgagtatataatattcctgtgcgatttattgaagcaacaaaacaatatgccttgggcagaaagaaaaatggtgaagaggtcagtgatttctttttaaattcaattctataactatgcattgagtataatgacatcaaatactgtattagatgctagagatgaggagaaaggatacaaaagtacttgttctaatgcttgcataaatgtcatagagaacaagataaaatactatatttaggcagtatatcctataagaacacagaaaaggaaaaagtcatgtgatgtacatgctagtcctttcattcagttatttaatgaggtcagtctgacccaagattttagtccaggggcaaatataaatcaaggttgaaatgtcaagttgaattaaggttgtaagaattagggtcaagttccagacctccaaagtcaagacctaaaatctcaactcaagtaccaaggtaggttaccagggaaggatccagaagagatgcagaaacttgagttaaaacattagactatagcccttgtaccagaatgagcttatgggcctggagcaagaaaaaaaaatcacatgggtcttaaatattaatcaaacattaactttaatgcctctttaatctggaccaaactcagtgcttaccatatctcagtttagccagcctgctcctataaatgaaccctgaaatatgagctggagtaacccatgaatggtctagaaatgcagtgatacttattctggttttgaattacgggttgaatttaaatgggtagaatgtaagttggagggatggagaaggagaaaaatgggaagaacaatctatgcagagaaaatagcataaacaaaattcaaggtaagaaatatttactttcaagattccttcagaaaaaggtacaccattccaaacccagcacctgctagaaaatatttgaattgttggaaaatgtcatgattgctgaagtgtctgtcttccccactacatgaagccaaggacaatgtcttttcatctctgtatttccagaatcagagcacagtaactggcttcagtgtacacttgataaataattattaagcaactgaattgatttggttgagtgattacaggcaggagaatagcatttgcaaaacaaactgaaaaagtcatgtgtattctttattttgccttttagacaactgtggttaaaaaaccacatataaaatttaccatcttaatcattttaagtgtacagctcagtaataagtatatttacattgttgtgaaacagatctccagaacttgttcatcttatagaactaaaaccctatacccactgaacaacagtttcccttttccccctcccttcagcccctagcaaccacgttctatttttatgaatttgaatattttagatacctcatacaagtggaatcacacagtatttgtcctttaggaccagcttatttaacttagcatgatgtccttgagactcatccatgttgtagcatgtgttaggatttccttcctttttaaggctgcatagtatctcattgtatctatataccacattttgtgtgtctaacatccatcagtggacatttgtgttgcttctacctcttggctattgtgaatagtgctgctataaacacgggtgtgcaaatctctccaggacactgctttcaattatttgggggtatatacccagaagtgggattgctggatgatatgggtattctatttttaattttttgagaacctcccatacttttttccatagcagttgcaccattttacagttccaccaacagcacacgagggtttaacttcttcacatccccaccagcacttgttatattctgaattgtgttgttgttttatagtagccgtccaaatgggtgtaaggtgatagacagctcattgtggttttaatttgcatttctctggccgggcgcggtggctcacgcctgtaatcccagcactttgggaggccgagacgggcggatcacgaggtcaggagatcgagaccatcctggctaacacggtgaaaccccgtctctactaaaaatacaaaaattagccgggcatggtggcgcgtgcctgtagtcccagctacacaggaggctgaggcaggagaatggcgtgaacccgggaggcggagcttgcagtgagtcgagatcgcgccactgcactccagcctgggcgacagagcgagactccgtctcaaaaaaaaaaaaaaaaaaaatttgcatttctctgatgattagtgatgttgaacatttttcatatgcttttttggctacttgtaagtcattttcagagaaatgtctattccattttataatcaggttatttgatttttgttgttgctgagttttaggagttctttatgtttctggatattaaccccttatcagataaatgatttgcaaatatttttcccactccataggttacctttccactctgttgattgtgttatttgctgagcaaaagcttttaagcttgatattgtcttctctatttttgctttttttgcctatgcttttaatgtcatatccaaaaaatcattgccaaatccagtgtcatggtgtttcccccctacattttcttctagaatttttatattggggaattttattttgcttttaacaaagtctcagataattttaaaatgcaaaactcttgaatctaagggcactaatcaagaccaatctttggttttaaaatgtagaccgcattatcatttaacatcctaaagcttctccagcagtctagcttttctataagaggcttaagggtgggtgaagaagctgtcctatttcgaggtcctgaaattctctcacaaattttgaactccctgaggggctctggatttcgttgtcctgctaggaaactctggtaaacaggaattcctcttggcctgatgaatcttcatctccactttagaatgaatagactagagcttcacctcacttccaacatattcagcctatggattccaaaataagtaatatattactataatagcatctggaggtactgacagtcaattaaaactcttacttaaagtatctataataaaaagattatgtcccctatacactgaacatctgaatggaaaattaaagtgttggttacatgatgtcaatcatgtggagtttttctgaaagtctgtgtgtatttgtgtgtacatggctagaaaaagtaaccaattcattaactatttaactgtttatgcagctattttggcactgtgtgatacaacattgagtaattttacagttttgacaactgtctgctttatcttagtggccaatacgttgtttttctgtccacaaatacactgaatgtatctgtctcaaatacactgaattaataaaaacagaaaaaaaggagagtgaggggaagctgtaactatgttatgcccaattcttttttaaattaaatcacaaatattcttcaacttcattccctacttcaaatgtttcaactcagctcaactccctactgcacacacttcaatccccgaacaccacaacaaggcaatactcacaaatattcagggactagagggacggaatgagatatttgtttgtataagtacagcaatcctctcctatgcttcctaggttcaggacacactttttcccttgtaatccacttcaaagagattgtgctatttcgttttctggcccttgagtccataactttaactttcaactgcatttggtttagcaacatattatgccaaacaagcagaatgaatgtttaatgggatttataatgaaagaatttctttggcaattgcaagatggctgaatgattgaataggaagtaaagaataaagactaaaggtatttgaaagtccctgtctcttacctctctccctgactgaatattcagctagccaattatctaaaagacaactggtatttcatttggaaatgttggccaatattctgaatattttactttattcaatatgtagctacttggaagtcatccaaacaattaataaacacttaaaaattttactgtggatgtttgtctttatctaaaaaatcgagaaaataaaatcaattgatagtaactgctaaactcatggcactgttgtaaaacaatcaccacttttaaaaagtgattctaaatacatttaatgagtgtgaacttgtagcacttttgtatactcaatgaatttaatttcatgatctgtgttacatttgtttttatctttccttcaaaactttaattatttttcagaacaaaatttgtgataattttaaattaaaacccatagacaacaaggatcaaaatttggaaaaataagtatgtatggagagagcctagcatgaaatttcattattaattaggcactaagttaactctaagcttaccaggaaccaagtaaaaatggaaatatgaaggtttataaagctttctttatttgtttaaaaaagaaaacaaaacataattttgtttaggagatgactatttccttgtactaaatttctaaggttaatttattacatcaattcttgtatctgagacttgtgcaaagtaagagatgatctatgttttgtaaagaatgtagaaaaatgcgttgtatgatagttttacatttaacggtaaataaaaagcaatatactataatattttatcataactcagtgaagtaatctctctaagtagctatgctaattgaggctgtcagtgtgtttttcttcgtacttaatacagcaaagtccaaggtctgccaccttgaaggttacagcctttgttaaactagatttttttgtgcagaatgtcagctggggtgtaataacttttactaacttgagaatgagagaagatgggaggagtggagctcaaatttaacacaaatgccaaagtataattcatctatgttttcttcctctagtactttggaagtgttgctgaaatcatcaggaatcatcaacatagtcctttggttcttattgacagtcagaataacacaaaagattccaccagactgaagtatgcagttaaagtttcataaagggggaaaaaaaagatcaataccattgcttcagacactttcccaaagtttctccttttgagaaaaagtcccaaaacttcatattttggattatgaatcatccagtaataaaatggaagatggagtcagctattgaagtggtcatccatttctttttaagaagctcatgtggacttgttctattgcctgacctgatgaactgttaatatctggtgaggttgagttatcatgctactaatattttccaaataaatatttttatttttaaaaa

SEQ ID NO: 630 - DNA, 1426 bp, Homo sapiens
tccactcctgctctccctcctgcaggtgaccccagccatgaggaccatcgccatccttgctgccattctcctggtggccctgcaggcccaggctgagtcactccaggaaagagctgatgaggctacaacccagaagcagtctggggaagacaaccaggaccttgctatctcctttgcaggaaatggactctctgctcttagaacctcaggtaggagacatcaatcttgcacatctgcaaaatctagaaaaaaaggattggagaaaggatctggagtcaagtgtggaaaggtctacctcacttgagtgactttacttaatcttcctggaccttgattttctcatctataaattaatcagtgagaaccaaataaatctaaaagattttcttttttctaagactttcagttccaagatatttctgtgaaatttgctacttttaagatagaaagagctacactgactagttctttgtagatctaaatgggcagacttagttatatagagagtgttttactttgtccattggaaaagcttttagaacctagagaggaacctataggtgtgttttgatgtaggctaataggcttgattaaatctttctacaatacatccttagatcaaaacatcatattgtgtctcatacatatacacaattattgtttgtcaattaaaacaagtaaatatgtaaaatgttaaaaaaaaaaaaaaaaaaaaaaaaaggagagacagagaatgaagaatttgaatttggaaagtcttcaaagactccttgagcaccaaagtatttggtccatgacattagcatgcacaatgcggcatttcagaaactgattcaggtgctttagggagccttgttaggacctggaaatcacacatggaggtcaagattaggcgtgtggatgaagcagaatgaagagtaggtaaccctgaggttgagaggtatattgttggaccagggagcaggtaataaatacatcctggatagactcacatggggaaaaaaactatgatcttgcatgactaacacatagctagtaagatttcttgtcacttacgacaaagacatgaattttctccatcctaacatgactgatacagtgtctcttatttagactatctcagttagtctggctgtgcttgtcctttttcccacctccctcgctgtgcctgaccctctcttctttccacaggttctcaggcaagagccacctgctattgccgaaccggccgttgtgctacccgtgagtccctctccggggtgtgtgaaatcagtggccgcctctacagactctgctgtcgctgagcttcctagatagaaaccaaagcagtgcaagattcagttcaaggtcctgaaaaaagaaaaacattttactctgtgtaccttgtgtctttctaaatttctctctccaaaataaagttcaagca
